United States Patent Application Publication US 2020/0109395 A1 - sequence listing, part 11

SEQ ID NO: 44729 - DNA, 3372 bp, Mycobacterium neoaurum
atgagcgagcagttccatctgtcccgcctgcaggtgatcaactggggcgtcttcgacggttaccactccatccccatcaacgccggcggctcgttgatcgccggatcctcaggtagcggtaaatcctctctgctggatgcgatctcactcggattcctgccgttcaaccggcgtaacttcaacgcctcgggcgataacaccgccgcgggctccagcgccgggcggcgcaccgtggacaagtacgtccgcggtgcgtgggggcagcgcagcgacggtggcaccagccaggtgatgtatctgcgcggtgacggcaccacctggtcggccgtcgcggtcacctacacctccaacaccgggcgcaccatcaccggcctggtactcaaatggcttaccggagagtctcgttcggattcgtcgagccggttcgtgctcggcgacggcgatctggacatcgagggtgtctgcaatcggtgggcggcgggacgtttcgacagcaaggtgttcaccgactcccggggcgagcgaagcgacggggcatcgtacggttggcggttctccaccaaggtcgaatcgcagtacctggcccagctctacgccgccatcggcatccgggcctctgaggcggcccagcagctgctgggcaaggccaagtcactcaagagcgtcggcggcctggaacagttcgtccgcgatttcatgctcgacgaaccggacagcctgagccgacttcccgaggcactcaagcagatcgaccccctggtcgaggcgcgcgagctgctggcggttgcccagcgcaagcgcaaggtgctcggtgatatcgaggcgatccaactgcgctatgcctccgaatcctcggacctgggcatcatcgatctggtcgacatgccgatggtccgcgcgcacaccgatcaccagcgcctacagcagtgcccggcccagatcgagtcgttggacggcaccatcgaccagttggagaacgagtacggcgacatcacccgtcagctcaatctcgccaaggccgagggcgacgccctcaacgcgcagatcagcggggccagcgccagcatcggtccgctgcagtcccaggtcgcggccgccgaggcgcaggccgaggaggtcacccgccggtacgccgcctacgcggagatggtccgcgcgcacggtgtcgaggtgcccgagaccgcggacgagttctggaatctgcgtgaggagctgtccaaacaggccgccggtctggctgtccagctcgaccgcggacgggagtcctccaccgatgccgagtacgcccagaaggccgcccggatggcccgcgatcacgcggccaaggaactcaaacgcgtcgaacacgtcgggtcggcgcttcccgagttcgccgtcgccatgcgcgaacacatctgcaccacattgggtatcgacccctcggcgctgccctatgtcgccgaactgatggacctgcggcccgaggagaaccgctggcgcgccgctgtcgagaaggtgctgcgctcggtcggattgcgcctgctggttcccgatcagcactatgccaaggtgttgcgcttcgtcaacgagaacaacatgcggggcaggctggcgctgcaccaggttcgggtcaatgcccccgatcggcgtcccgagccgaacacgttggcgggcaagctgttcgtggtgaacccgagccacccgtgtgccgccgaggcgctggatgtgttggccgcggccggtgatcacatctgcgtggacagcccggatctgttcgccaggttccgccgcgcggtcaccgataccggtctgtacaaggactccgaccggttggccatcaaggacgaccgccgcccgctgaaaccctcggagtacatctaccagggtgatatcaccgccaagctggacgccctgaccgccgaactgaccgaggccgaagaggtgttcgccgcggcgcggacggccgccgacgagatcgccgcgggcaggcaacactggcgtgatcaggccgcggcctgcaaggccatctgtgaacagttcccccagtggagccatatcgacaccgagaccgcggacgggcacgccgaccggctgcgtgaacagtacgagttgctgctcgccgacaatcccgatgtcgaggcgctgagcgcgcgggccgaggagtgctggaacgatattcaggttctgatgacccggcgaggcgccatccagacccgccgtgacgatctcgattcgcgtcgtacccggctgctggatctacaggaccgcctcgatccggcggcggtgtccgagcaggccaccgagttgctcaaccgctacgcggcgcagatcccggtgagcctggagctgctcaaccccgagccctaccgagaggcgctgttcaacgcgatccggcgggagagggaccgactcactgagagccgcaggcgatctcacgatgagctggctcgcatcatcgccacctacgactcgtcgttccccgatgccatacccaatgattccgatgatctcgacgagcgggtgcacgactatgtcgcggtgtgccgccacatcgacgagcgcgaactccccgatgcctacgagcggatgatgcggctgatcaccgagcaggcccccgatgcgatcctgacgttgcaccggatcgccgagcaagaggcccgccgcatcgccgagcagatcgagcgggtgaacaccggcctgggtgcggtggagttcaaccggggtacccggctgacactgcgggccacgccccgcagtctgaccgcggtgaccgagctgaccgacatcgtcaaggccatctcgcggcgcatcgccgaggtcggcctcggtgacaagaaggcgatcctggagcagtacgcggacatcctgcggttgcggaaccggttggcgggcaacacccccgaggaccgggtgtggacccgcgatgcgctcgacgtgcgcaaccggttcaccttcgactgcgcggagtgggatatgcgcaccgaggagttgatccgcacgcacagcaacgccggcgacaactccggtggtgagcaggagaagctgatggcgttctgcctcgccggagcactgagcttcaacctggccaaccccgacagcggggacaacaagccggtgttcgcccagttgatgctcgacgaggcgttctccaagtccgatcctcagttcgcccagcaggcgctgcaggcgttccgcaagttcggtttccagctcgtcatcgtggccaccgtgcagaacgccacgaccatccagccctatatcgacggtgtggtgatggtgtccaagaccgaggccagcggtcgcaatgcccggccggtcgcgcacgtgaccaccaagaccatctctgatttcaccgcgctcaagcgcgaactcaaggtcccggagcctgtctaa

SEQ ID NO: 44730 - DNA, 1470 bp, Xanthomonas axonopodis pv. vasculorum
atgaagcaccaggcacgtatctccggctaccggcaactgcgcgagcagccggtatggaaactgctcgccgccgaccacgcccccgaactgatcggcctgctgcagacggtgctgatggatggcgaacgccgcctgccgtcggtcgtgttgcacgaacgtttgcagcgccagctcgacgccttgcgcgccgacgagctatcgcgcgaactgccgcgcaccgcacaggcgtatctggcgcattggttggcacagggctggctggaacgccgcctgcctgaaggcgcggccgaagaagaatacgaactctcgtgtgccgcgattcaggccatccgcttcatcgccggcctgcgcgaaagcagcagcagcgctaccgaaagccgcctgtcgctggtgatccagcaactggtgcagttggccgggcagaccgaagccgatccagaggtccggctggccgcgctgcgcgacgaacgtgcgcgcatcgatgccgagattgaacgcgtcgcctccggccgcgtggcggcgctggacggcaaacgcgcgctggaacgtgcgcgcgacctgatccatctctccgacgagctggccgaagatttccaccgcgtgcgcgacgacttcgagcagctcaaccgccaattccgcgagcgcatcatcgacgacgaaggcgcgcgcggcgacgtgctcgagcaactgttcaacggcgtggatgtgattgcagacagcgaagccgggcgtaccttcgaggcattctggagtctgctcaacgacacccagcaaaccagccagctcgaccaggcgctggatgcgctgctcgcgcgtgggtttgcccgcaagctcgatcgccgcgaacgcgcttttctgcgcgggctcaccggcacgctgctggaacgcggcggcgaggtgcacacggtgatgcagcatttcgcgcgcagcctgcgtggtttcgtgcaaagccgtgggtatctggaacagcgccggctcaatcaattgctcaagcaggcgcaaggcgaagccttgcaattgcgcgacagcctgcacgccaccgcctccaccggctatacgcaggcgctcagcagcagccgcctgcgctcgctatcgcaatggcggctgcacgatccacggctcacccaggtcgatggacgcgtgcaggccgccgacgcggccgagatctcgctggacagcgtgggcgatctggtcgcgcaatcggagatcgatgtgcgtaccctgcgcaacgatctgcacgagctgctcggccaacgcccgcggctgaccatcggcgatgccttgcaacaacgcccggccgtgcagggcctgggcagcgtgatcggctacctgtcgctgggcacgcgccacggcatggtgatcgaaggacagatggaaacggtgcaatgggaaggcagcgacggcgccgtgcggcgcgcgcgcattcccttggtgtggtttacccgggagaaacgcaatgaactggtctga

SEQ ID NO: 44731 - DNA, 702 bp, Xanthomonas axonopodis pv. vasculorum
atgaactggtctgaggacacgcgcttggacgccgacgaagacaccggggcgtcggccaccgacgagcgcatgccgatgacgcaagcctccagtgccgagccgcgtggcgagctgtttttaggcgacaccggcacgctgccgttcgacgcgcggcgcgcgctgtgccagttgctggcagggccgagcatcgatgcgcaacgtcacggcgcgctgtggccggcgttgttgcgcaatgaggcggcgatccgccaggtgttgtgcgagctgtttctggagttggtgctcgaccgcgagggcggggtagccttcacccgtcaggccgacaccgccgagctggaatcgcccatcttgctgcgcagcgcgccgctgacgtttatcgagtcggtgctgctgctgttcctgcgccagcaactggccgaggccgatacgcgcggcgaacgcgcagtggtggacgaagcgcagttggtcgaagcgttgtcggtgtacgaaaagaacgtctccaccgatcgggcgggcttcgcacggcgggtgatgacggccatcggcaagatgcgcgacaaccagttgctgtcgcgcttgcgcggcagcgaggagcggtacgaggtatcgccggtgttgaagttgctgttctcggcggaggatgtacaggccttggtgatggcgtatcgggggctgcgtgagggggaggttgcgctggattga

SEQ ID NO: 44732 - DNA, 4032 bp, Xanthomonas axonopodis pv. vasculorum
atgaattcccagcccaatctgtcgccagcgcaaccaggtgcctccttgtttgccgagacgctcgccgagcaacgtgcgcagcaattccgcatgcgccgcttgcaggtgcacaactggggcaccttcaacgggctgaccgaagtgccgatcgcggagaaaggcttcctgttcgtggggcgttcgggctcgggcaagtccaccttgctggatgcgatgtcggcactgctgacgccgccgaacatcgtcgacttcaacgccgccgcgcgcgaagccgagcgcagcgggcgcgatcgcagtctggtgtcgtatgtacgcggcgcgtgggccgatcagcaggacagcgcgtccggcgaaatcgccacccaatacctgcgcaagggcgcgacctggaccgcgctggtgctggaatacgcaaatgcgcacggcgaggcggtgagcctgatccgcttgttctggatcgccggcagcggtaacgcggcggccgatgtgcggcgtcactacatagtcgcgccacgccgtttcgacgtggcgaccgagctggatggtttcgatcttgatctgcgcaagctcaaggcgcgattgggtgaggaagtggcacatttcgatggcttcgccggctatgccgaacgcttccggcatgcgctgggcatcggcaacgagatggcgctgcggctgttgcacaagacccagtcggccaagaacctgggcgatctcaatgcgttcctgcgcggcttcatgctggatgagccgcgcaccttcgaagcggccgaccggctggtggaggattttgccgaactcgatggcgcccaccatgcggtggttacggcgcggcgccaggtggaaaccctgacccccgcgcgcgagcaccacgcggcgctgatggcgttgcgccacagcgttggcgagttgcgcgagctgcagttgggcgtggacagctaccgcgagcagcagcggctggccttgctggatgagcggctgcaggaattggacaaccaggaccgtggactggccggcgaagaaggccagcgccgcgaatcgctggataaccacgaacaaaaactggttggcttggagcgcgagcagcgcgccgccggcggcgagcagatcgaagaactggaacgcgagcgtgcgcgtgtggagcgcgagcgcgacgaacgcctgcgtcgccgtgcgcagatcgaacaggcctgccgccagctcggcaccgccctggccgcgggcgccagcggctttgccgcgcaggtcgcgcatgcgcagaccgtgctggataacggcaagcacgatgccagcgcgctggacgaggccatcgccgaccggatgggcgcgcggcgcgacgacgagcgccggtttgccggaatccgtgccgaactggaggccttgaagaaggcgccgtccagcatacctgcaccgatgcaggccctgcgcgcgcggctgtgcgaagacaccggcattgccgaggcagcgctgccgttcgtgggcgagctggtgcaggtgcgcgaggaccagtcggcctggcgcggtgcgatcgagcgtgtgctgcacggtttcgcgcaatcgttgctggtggacgagcggcattacgcgcaggtcagcgaatgggtcaatcgcacctatatcggtacgcgtctggtgtacttccgtgtgcgccgtaacgacgagctgcattcgcggcgggtcgaccccggcgcgttgcccggcaagctgcaattgcgcgagcacgcctttagcgaatggctacgcaacgagctgacccgccgtttcgactacgcctgcgtggacaacgccgccgcactgcgcaacgccgaccgcgcgatcacccgcgagggccaggtcaaacacccgggcgatcgttatgaaaaggacgaccgccacgccgtcaacgaccgcaagcgttggctgctcggtcacgacaaccgcgacaagctcaaggtgttcgagcgcgaagcgcaggcgctggcccagcgcatcgccggctgcgatgccgatgtggcagcgctgcgcaagcagcgcgaacaggaccaggagcgccaactggctgcccacaccttggtggagcgcgattgggacgaaatcgacgtcggccccaagctgcagcgcctgagcgatatcgacgaacagttggtgcagctacgcgaaggcaacagtggcttgcgcgcgctcggccaggccatcgacaccgcacgcaccttgcgcgaccaggccaagcgcacctatgaagatgtgcggctggagcgcgcgcaactggcgcgcgagcgcgtgcggctcgaacagcagcacgccgcgtgtgcgggacgcgccggcaccgctacgctcacgcctacgcagttgcagggcctgcgggaacggctcgccgcattgacgccgctgtcgctggacaacctggaagcgcatttccgcgtggtcgaacgtggcctggccgagcagctggccgacagccagggccgcgacagccggctcagcgcgcagttgctggaatgcttccgcaagtattgccagcagtggcccgaagacagcggtgatttcaccgtcagtcttgccagcgccgacgattttcttgcgcggctggaccggctggaaagcgatggcctgccgcgtcacgagcatcgtttcttcgatttgttgcagacccagagcaagaacaacctgctggccttgcagcgccacaccgccgaggcccacaagggcatcaagcagcgcatggacgaggtcaacgccagcctggagcaggtgccgttcaaccgcgacaccatcctgaccatcgaggtcggcgaccgccgcctggccgaggtgcatgaattccagcagcagttgcgcgcagtgctgtcgcatcaacagaccgaagaccgcgccttggccgaagcacagttttccaccttgcgcgcgctggtggcgcgcctgggcgcgcaggaaccggaggcacgccgctggcgcgagcaggtgctggatgtgcgcctgcatgtggagttcatcggtgtggagctggacgcacagacgcgcgcgcaggtggagatctaccgcagcggcgccggcaaatccggcggtcagcgccagaaactggcaaccacctgcctggctgccgcgttgcgttaccagctcggcggcgaagacggcgaactgccgcgctattgcgcggtggtgctggacgaagccttcgacaaggccgacagcgaattcaccgccctggcgatgaacatcttcgagaacttcggcttccagatggtggtggccacgccattgaagtcggtgatgaccttggagcccttcatcggcggtgcgtgctttgtcgaaatcagcggacgccacaactccggcgtgttgctgatcgaatacgacgagcaggcgcagcgattgaagctgcccgagcgctcgcgtggcgatgagccggcagttgccgatgccgctgatgctgcgccttcgatcgaggctgcgggcgagtctgcaggagtgcggggcactgcaagcgcagatggcatggcaattgacggcgccgcgctgcacacggcatggcctgcggcggcagggaccccgtctgcagcgcagaaaacgcagacgggtaagcgcaagccggcagtcgcgacggcgaacacccagaacaagaacgccaagactgccaagaccgcacctgccacgcgcgctgcggcgcagcctcgatcaaagcagacgaaaaaatcgccttcgcgcatttcggctgatgctggcaagccggcatctgacaaacgcgcagcaggcgtgccagcggtgtcttcagcagccgcatccaggtccaacgtgggcaagaccgctcggccttcaaaaccgccgggcaagccgattgcggccacagacgcatccagcgccacaaccaggaaggtcgccgccgcatccgcggcagtgaaaactgccgcagccaagccacgtgcaacagccgcatcgaccgggcagccagtacgcggtgccggcaagacaacctcaaagcgcgtggcgacgaattcttcaccgtccaaaacgtgcggcgccgagccaggcacggcgcagccgcgcggcaagcgctga

SEQ ID NO: 44733 - DNA, 1470 bp, Xanthomonas arboricola pv. celebensis
atgaagcaccaggcacgtatcgccggctatcgccaattgcgcgagcagccggtatggaaactgctggccgccgaccacgcgccggagctcatcggcctgctgcagacggtgttgctggacggcgaacgccgcctgccctcggccgtgctgcacgagcgcctgcagcgccagctcgacgcgctgcgcgccgacgagctctcgcgcgagttgccgcgtaccgcgcaggcctatctggcgcattggctggcgcagggctggctggaacgccgcctgcccgaaggtgcggccgaagaagaatacgagttgtcgcgcgcggccacccaggccatccgcttcatcgtcggcctgcgcgagagcagcagcagcgccaccgaaagccgcctgtcgctggtgatccagcagctggtgcagctggcgggccagaccgaagccgacccggagctgcgcctggccgccctgcgcgaagaacgcgcgcgcatcgatgccgagatcgaacgggtggcctccggccgcgtggctgcgctggacggcaagcgcgcgctggagcgtgcccgcgacctgatccatctctccgacgagctggccgaagatttccatcgcgtgcgcgacgatttcgaacagctcaaccgccagttccgcgagcgcatcatcgacgacgaaggcgcgcgcggcgatgtgctggagcagctgttcaacggcgtggacgtgatcgccgacagcgaggccgggcgcaccttcgaggcgttctggagcctgctcaacgacacccagcaaagcagccagctcgatcaggcgctggatgcgctgctggcacgcggcttcgcgcgcaagctggaccggcgcgaacgcgccttcctgcgcgggttgaccggcacgctgctggagcgcggcggcgaggtgcacacggtgatgcagcacttcgcccgcagcctgcgcggtttcgtgcagagccgcggctatctggagcagcgccggctcaatcaattgctcaagcaggcgcagggcgaagccttgcagctgcgcgacagcctgcacgccaccaccgccaccggttacacccaggcattgagcgcggcccgcctgcgttcgctgtcgcaatggcgcctgcacgacccgcgcctgacccaggtcgatggccgcgtgcaggctgccgacgcggcagacatctcgctcgacagcgtgggcgatctggtcgcgcaatcggaaatcgacgtgcgcagcctgcgccgcgacctgcacgagctgctcggccagcgcccgcgcctgaccatcggcgatgcgctgcagcagcgcccggccgcgcagggcctgggcagcgtgatcggttacctgtcgctgggcacgcgccacggcgtggtgatcgacggacagatggaaacggtgcaatgggaaggcggcgacggcgccctgcggcgcgcacgcattccgctggtgtggttcacccgggagaaacgcaatgaactggactga

SEQ ID NO: 44734 - DNA, 702 bp, Xanthomonas arboricola pv. celebensis
atgaactggactgaggacacccgcctggacgcggacgaggacagcggcgcgtcggccgatgccggccgcacgccgctgacggagacatcgcctgcacagccgcgcggcgagctgttcctgggcgacaccggcacgctgccgttcgacgcgcggcgcgcgctgtgtcagttgctggccggccccagcatcgacgcacaacgccacggtgcgttgtggcctgcgctgctacgcaacgaggcggcgatccgccaggtgttgtgcgagctgttccttgagctggtgctggaccgcgagggcggggtggccttcacccggcaggccgacaccgccgagctggaatcgccgaccctgctgcgcagcgcgccgctgacctttatcgagtcggtgctgctgctgttcctgcgccagcaactggccgaagccgatacgcgcggcgagcgggcggtggtggacgaggcgcagttggtggaggccttgtcggtctacgagaagaacgtgtccaccgaccgcgccggattcgcgcgacgggtgctgacggcgatcggcaagatgcgcgagaaccagttgctgtcgcggctgcgcggcagcgaggagcgctacgaggtctcgccggtgctgaagttgctgttctcggccgaagacgtgcaggccctggtggtggcgtatcgcggcttgcgcgagggcgacgttgcgctcgactaa

SEQ ID NO: 44735 - DNA, 4068 bp, Xanthomonas arboricola pv. celebensis
atgaattcccagtccaacctgtcgccggcgcagccgggcgcgtccctgttcactgattcgcttgccgagcagcgcgcgcagcagttccgcatgcggcggttgcaggtgcacaactggggcacgttcaacggcctgaccgaggtgccgatcgccgagaagggcttcctgttcgtcgggcgctccgggtcgggcaagtcgaccctgctggatgcgatgtcggcgttgctgaccccgcccagcatcgtcgacttcaacgccgccgcacgcgaggccgagcgcagcgggcgcgatcgcagcctggtgtcgtatgtgcgcggtgcctgggccgatcagcaggacagcgcctcgggcgagatcgccacccaatacctgcgcaagggcgccacctggtcggcgctggtgctggaataccgtaacgcgcacggtgagacggtcagcctgattcgcctgttctggatcgccggcagcggcaatgccgcggccgatgtgcgccgccattacatgatcgcgccgcgcagcttcgatgtggccagcgagctggatggcttcgatctggatctgcgcaggctcaaggcgcgtcttggcgaggaggtcgcgcatttcgacggctttgccggctacgcagaacgctttcggcatgcgctgggcatcggcaacgagatggcgttgcggttgctgcacaagacccagtcggccaagaacctgggcgatctcaatgtgttcctgcgcggcttcatgctggacgagccgcgcacgttcgaagcggccgaccggctggtggaagacttcgccgaactcgacggcgcacaccatgcagtggtcaccgcacgccggcaggtggaaacgcttagcccggcacgcgagcaccatgcggcgctgatggccctgcgccacagcgtcggcgagttgcgcgagctgcagctgggcgtggacagctaccgcgaacagcagcgtctggccttgctggagacgcgcctgcacgaactcgacagccaggaccgcgggctggccggtgaagaaggccagcggcgtgagtcgctggacaatcacgaacagaagctcgccgggctggaacgcgaacaacgcgccgccggtggcgagcagatcgaggaactcgaacgcgagcgcgcccgggtcgagcgcgaacgcgacgagcgcctgcggcggcgcgtgcagatcgaacaggcctgccgccagctcggcaccgccctggccgcaggcgccagcggctttgccgagcagatcgcgtacgcgcagaccgtgctcgagaacggcaagcacgacgccagcgcgctggatgaggcgatcgccgagcgcatgggtgcgcgccgcgacgatgagcggcgctttgccgagatccgcgccgaactggatgcgttgaagcgcgcgccgtccagcatgccggcaccgatgcaggccttgcgcgcgcgcctgtgcgaggacaccggcattgccgaagcggcgctgccattcgttggcgaactggtgcaggtgcgcgaggatcagtcagcctggcgcggtgcgatcgagcgcgtgctgagcggttttgcgcagtcgctgctggtggacgaccgccattacgcgcaggtcagcgaatgggtcaaccgcacccagctcggcacgcggctggtgtatttccgggtacgccgcaacgatgcgctgcatgcgcgcacgccggatgcgcgtgcattgccgggcaagctgcagctgcgcgagcatgccttcaccgagtggctgcgcaacgagttgatgcgtcgcttcgactacgaatgcgtcgataacgccgccgcgctgcgcaatgccgaccgcgccatcacccgcgaagggcaggtcaagcatcccggcgaccgttatgaaaaggacgaccgccatgcggtcaacgaccgcaagcgctggttgctgggccacgacaaccgcgacaagctcaaggtgttcgagcgcgaagcgcagacgcttgcccagcgcatcgccagctgcgatgccgacgtggccgcgctgcgcaagcaacgcgagcaggaccaggaacggcagctggccgcgcacacgctggtggagcgcgactgggacgagatcgatgtcggccccaagctgcagcgcctgagcgatatcgacgaacagctgcagcagctgcgcgaaggcaacagcggcctgcgcgcgctcggccaggcgatcgagaccgcacgcaccttgcgcgaccaggccaagcgcacctacgaggacgtgcggctggagcgcgcgcagctggcacgcgagcgggtccggctcgaacagcagcacgccgcctgtgccagccgtgccggcaccgccgcgctcacgcccacccagctgcagggcctgcgcgaacgcctggcggcgttggcaccgctgtcgctggacaatctggaggcgcatttccgcgtggtcgagcgtggcctggccgagcaactggccgagagccagggccgcgacagccggctcagcgcgcagctgctcgattgcttccgcaagtactgccagcaatggccggaagacagcggcgatttcaccgtgagcctggccagtgccgacgattttctcgcgcgcctggatcgcctggagagcgatggcctgccgcgccacgagcaccgcttcttcgatctgctgcagacccagagcaagaacaacctgctggccctgcagcgccacaccgccgaggcccacaagggcatcaagcagcgcatggacgaggtcaacgccagtctggagcaggtgccgttcaatcgcggcacgctgctgaccatcgaggtcagcgaccgtcgcctgggcgaggtgcaggaattccagcaacagctgcgcgcggtgctgtcgcatcaacagaccgaagaccgcgcactggccgaagcgcagttttccaccctgcgcgcgttggtggcacgcctgggcgcgcaggaaccggacgcacgccgctggcgcgagcaggtgctggacgtgcgccagcatgtggagttcatcggtgtcgaattggatgcgcagacccgcgcgcaggtggagatctaccgcagcggcgccggcaaatccggcggtcagcgccagaagctggcaaccacctgcctggccgccgcattgcgctaccagctcggtggcgaagacggcgaactgccgcgctactgcgcggtggtgctggacgaagccttcgacaaggccgacaacgaattcaccgcgctggcaatgaacatcttcgagaacttcggtttccagatggtggtggccacgccgctgaaatcggtgatgacgctggagccgttcatcggtggtgcctgttttgtggaaatcagcggccggcacaactccggcgtgctgctgatcgaatacgacgagcaggcgcagcgactccagttgcccgagcgctcgcgcggggacgaggccgcagcagcggtgacggaacaggcggtgagtgctgcgcagcgcgaggatgcaccgcgttcgacgcagggtgaaacgcggatggacagcaccgctgccgtctctgccgctgagggcgcggcacttcaggacctccctgcacaggacgacgtggcggccaaggcgggcaggcgcgccagcaaggtcgcgccggcatcgacgccggccgttcaagccgcgccgaagccatcaaagacagccgctgccagcgcacgtgcgggatcaggcaagtcggcagcggcaaagaccgcagcgggcaaggccgcatccgccaagactgcaccagccaaacctgcatcagccaggcgtgcatcgcctgcagctggcacagcgcgcaagccggcaacgccggccaaaccggccaagacgccagcgaacaccggggcggcatccaggcgcacgaccgcgtccgtcaaaccgactgccaggccgaacaaggccgcgacaacagcggcagcgccgaaaaagcctgctgccaaatcgacggtagcgaccaggcgcgccaccacatcgctgggtggcgcaaccaaggcaaccagggcaactgccgcgcgcactgcggccaggcccgcgccaaccaaacccgtggccaaggcacgtgctgcgtccacgcgcggatctgcaggcaagccgcgcggaaaacgctga

SEQ ID NO: 44736 - DNA, 1470 bp, Xanthomonas arboricola pv. celebensis
atgaagcaccaggcacgtatcgccggctatcgccaattgcgcgagcagccggtgtggaaactgctggccgccgaccacgcgccggagctgatcggcctgctgcagacggtgttgctggacggcgaacgccgcctgccctcggccgtgctgcacgagcgcctgcagcgccagctcgacgcgctgcgcgccgacgagctctcgcgcgagttgccacgtaccgcgcaggcctatctggcgcattggctggcgcagggctggctggaacgccgcctgcccgaaggcgcggccgaagaagaatacgagctgtcgcgcgcggccacccaggccatccgcttcatcgtcggcctgcgcgagagcagcagcagcgccaccgaaagccgcctgtcgctggtgatccagcagctggtgcagctggcgggccagaccgaagccgacccggagctgcgcctggccgccctgcgcgaagaacgcgcgcgcatcgatgccgagatcgaacgcgtggcctccggccgcgtggctgcgctggacggcaagcgcgcgctggagcgtgcccgcgacctgatccatctctccgacgagctggccgaagatttccatcgcgtgcgcgacgatttcgaacagctcaaccgccagtttcgcgaacgcatcatcgacgacgagggcgcgcgcggcgatgtgctggagcagctgttcaacggcgtggacgtgatcgccgacagcgaggccgggcgcaccttcgaggcgttctggagcctgctcaacgacacccagcagagcagccagctcgatcaggcgctggatgcgttgctggcacgcggcttcgcgcgcaagctggaccggcgcgaacgcgccttcctgcgcgggttgaccggcacgttgctggagcgcggcggcgaggtgcacacggtgatgcagcacttcgcccgcagcctgcgcggtttcgtgcagagccgcggctatctggagcagcgccggctcaatcaattgctcaagcaggcgcagggcgaagccttgcagctgcgcgacagcctgcacgccaccaccgccaccggctacacccaggcactgagcgcggcccgcctgcgttcgctgtcgcaatggcgcctgcacgacccgcgcctgacccaggtcgatggccgcgtgcaggccgccgatgcggcagacatctcgctcgacagcgttggcgatctggtcgcgcaatcggaaatcgacgtgcgcagcctgcgccgcgacctgcacgagctgctcggccagcgcccgcgcctgaccatcggcgatgcgctgcagcagcgcccggccgcgcagggcctgggcagcgtgatcggttacctgtcgctgggcacgcgccacggcgtggtgatcgacggacagatggaaacggtgcaatgggaaggcggcgacggcgccctgcggcgcgcacgcattccgttggtgtggttcacccgggagaaacgcaatgaactggactga

SEQ ID NO: 44737 - DNA, 702 bp, Xanthomonas arboricola pv. celebensis
atgaactggactgaggacacccgcctggacgcggacgaggacagcggcgcgtcggccgatgccggccgcacgccgctgacggagacatcgcctgcacagccgcgcggcgagctgttcctgggcgacaccggcacgctgccgttcgacgcgcggcgcgcgctgtgccagttgctggccggccccagcatcgatgcgcaacgccacggggcgttgtggcctgcgctgctgcgcaacgaggcggcgatccgccaggtgttgtgcgagctgttcctggagctggtgctggaccgcgagggcggggtggccttcacccggcaggccgacaccgccgagctggaatcgccgaccctgctgcgcagcgcgccgctgacctttatcgagtcggtgctgctgctgttcctgcgccagcaactggccgaagccgatacgcgcggcgagcgggcggtggtggacgaggcgcagttggtggaggccttgtcggtctacgagaagaacgtgtccaccgaccgcgccggattcgcgcgacgggtgctgacggcgatcggcaagatgcgcgagaaccagttgctgtcgcggttgcgcggcagcgtggagcgctacgaggtctcgccggtgctgaagttgctgttctcggccgaagacgtgcaggccctggtggtggcatatcgcggcttgcgcgagggagacgttgcgctcgactaa

SEQ ID NO: 44738 - DNA, 4077 bp, Xanthomonas arboricola pv. celebensis
atgaattcccagtccaacctgtcgccggcgcagccgggcgcgtccctgtttactgattcgcttgccgagcagcgcgcgcagcagttccgcatgcggcggttgcaggtgcacaactggggcacgttcaatggcttgaccgaggtgccgatcgccgagaagggcttcctgttcgtcgggcgctccgggtcgggcaagtcgaccctgctggatgcgatgtcggcattgctgaccccgcccagcatcgtcgacttcaacgccgccgcacgcgaggccgagcgcagcgggcgcgatcgcagcctggtgtcgtatgtgcgcggtgcctgggccgatcagcaggacagcgcctcgggcgagatcgccacccaatacctgcgcaagggcgccacctggtcggcgctggtgctggaataccgcaacgcgcacggtgagacggtcagcctgattcgcctgttctggatcgccggcagcggcaatgccgcagccgatgtgcgccgccattacatggtcgcgccgcgcagcttcgatgtggccagcgagctggatggcttcgatctggatctgcgcaggctcaaggcgcgtcttggcgaggaggtcgcgcatttcgacggctttgccggctacgcagagcgctttcggcatgcgctgggcatcggcaacgagatggcgttgcggttgctgcacaagacccagtcggccaagaacctgggcgatctcaatgtgttcctgcgcggcttcatgctggacgagccgcgcacgttcgaggcggccgaccggctggtggaagacttcgccgaactcgacggcgcacaccatgcagtggtcaccgcacgccggcaggtggaaacgctcagcccggcacgcgagcaccatgcggcactgatggccctgcgccacagcgtcggcgaggtgcgcgagctgcagctgggcgtggacagctaccgcgaacagcagcgtctggccttgctggagacgcgcctgcacgaactcgacagccaggaccgcgggctggccggtgaagaaggccagcggcgtgagtcgctggacaatcacgaacagaagctcgccgggctggaacgcgaacaacgcgccgccggtggcgagcagatcgaggaactcgaacgcgagcgcgcccgggtcgagcgcgaacgcgacgagcgcctgcggcggcgcgtgcagatcgaacaggcctgccgccagctcggcaccgccctggccgcaggcgccagcggctttgccgagcagatcgcgtacgcgcagaccgtgctagagaacggcaagcacgacgccagcgcgctggatgaggcgatcgccgagcgcatgggtgtgcgccgcgacgatgagcggcgctttgccgagatccgcgccgaactggatgcgttgaagcgcgccccgtccagcatgccggcaccgatgcaggccttgcgcgcgcgcctgtgcgaggacaccggcattgccgaagcggcactgccgttcgtcggcgaactggtgcaggtgcgcgaggatcaatctgcctggcgcggcgcgatcgagcgcgtgctgagcggttttgcgcagtcgctgctggtggacgaccgccattacatgcaggtcagcgaatgggtcaaccgcacccagctcggcacgcggctggtgtatttccgggtacgccgcaacgatgcgctgcatgcgcgcacgccggatgcgcgtgcattgccgggcaagctgcagctgcgcgagcatgccttcaccgagtggctgcgcaacgagttgatgcgtcgcttcgattacgaatgcgtcgacaacgccgccgcgctgcgcaatgctgaccgcgccatcacccgcgaagggcaggtcaagcatcccggcgaccgttacgaaaaggacgaccgccatgcggtcaacgaccgcaagcgctggttgctgggccacgacaaccgcgacaagctcaaggtgttcgagcgcgaagcgcagacgcttgcccagcgcatcgccagctgcgatgctgacgtggccgcgctgcgcaagcaacgcgagcaggaccaggaacggcagctggccgcgcacacgctggtggagcgcgactgggacgagatcgatgtcggccccaagctgcagcgcctgagcgatatcgacgaacagctgcagcagctgcgcgaaggcaacagcggcctgcgcgcgctcggccaggcgatcgagaccgcacgcaccttgcgcgaccaggccaagcgcacctacgaggacgtgcggctggagcgcgcgcagctggcacgcgagcgggtccggctggaacagcagcacgctgcctgtgccagccgtgccggcaccgccgcgctaacgcccacccagctgcagggcctgcgcgaacgcctggcggcgctggcgccgctgacgctggacaatctggaggcgcatttccgcgtggtcgagcgtggcctggccgagcaactggccgagagccagggccgcgacagccggctcagcgcgcagctgctcgactgcttccgcaagtactgccagcaatggccggaagacagcggcgatttcaccgtgagcctggccagtgccgacgattttctcgcgcgcctggatcgcctggagagcgatggcctgccgcgccacgagcaccgcttcttcgatctgctgcagacccagagcaagaacaatctgctggccctgcagcgccacaccgccgaggcccacaagggcatcaagcagcgcatggacgaggtcaacgccagtctggagcaggtgccgttcaatcgcggcacgctgctgaccatcgaggtcagcgaccgtcgcctgggcgaggtgcaggaattccagcaacagctgcgcgcggtgctgtcgcatcaacagaccgaagaccgcgcactggccgaagcgcagttttccaccctgcgcgcgttggtggcacgcctgggcgcacaggaaccggacgcacgccgctggcgtgagcaggtgctggacgtgcgccagcatgtggaattcatcggtgtggagctggatgcgcagacccgcgcgcaggtggagatttaccgcagcggcgccggcaaatccggcggtcagcgccagaagctggcaaccacctgcctggccgccgcactgcgctaccagctcggtggcgaagacggcgaactgccgcgctactgcgcggtggtgctggacgaagccttcgacaaggccgacaacgaattcaccgcgctggcgatgaacatcttcgagaacttcggtttccagatggtggtggccacgccgctgaaatcggtgatgacgctggagccgtttatcggcggtgcctgctttgtggaaatcagcggccggcacaactccggcgtgctgctgatcgaatacgacgagcaggcgcagcgactccagttgcccgagcgctcgcgtggggacgaggccgcagcagcggtgacggaacaggcggtgagtgctgcgcagcgcgaggatgcaccgcgttcgacgcagggtgaaacgcggatggacagcaccggtcctgtctctggcgctgagggcgcggcacttcaggacgtccctgcacaggacgacgtggcggccaaggcgagcaggcgcgccagcaaggtcgcgccggcatcgacgccggccgttcaagccgcgccgaagccatcaaaaacagccgctgccagcgcacgtgcgggatcaggcacgtcggcagcggcgaagcccgcagcgggcaaggccgcgtccgtcaagactgcaccagccaaacctgcatcagccaggcgtgcatcgcctgcagcgggcacagcgcgcaagccggcaacgccgaccaaaccggccaggacgccagcgaacaccgggaccgcacccaggcgcgcgaccgcgtccgccaaaccgactgccaggccgaacaaggccgcgacaacagcggcagcgccgaaaaagcctgctgccaaatcgacggtagcgaccaggcgcgccaccacatcgctgggtggcgcgaccaaggcaaccaagacaaccaagacaactccagcgcgtagcacggccaggcccgcgccagccaagcccgtgcccaaggcgcgtcctgcgtccacgcgcgggtctgcaggcaagccgcgcggaaaacgctga

SEQ ID NO: 44739 - DNA, 1482 bp, Burkholderia cepacia
atgaaaactgcattagcgctgcatgaactctcggcgatgcgggagaaaccgatgtggatgctgcttggctcccatcaggcgcccttgaccatggcgctattgcaatcgctgtttcccgaaagttctacacagctgggtgcggcaagtttgatggagaaactctcgatcgagctcgacgggctgcgtgcacgcggcgaggatatcgagaaagcgccccaaattctggtcgctgagtgggtgcagtccaaatgggtagcgcgcggttttcctgaaggtgccagcgaagaaatgtatgaactcgcggccgacgtggtgccagcgctgcaactggtaaggaggcaactcgagcctcgacagactgccactgaaagtgggctggcggtggttatcgattcggtgctgcgcctggcttccgacaccgacccagacccggcgtctcgactggaggcgcttcatgaggagtccagacgcattgctgatgaaatccggcatgtcatgaagcatggtgtgtcaccactagaccccgctcgtgccggcgaacgggggcgttatatcgttgcgctgacggaggcgattgctgtcgacttcagacgggtgcgtgaagcatttgaacgtctcaatcgcgacttgcgccggcaacttgtggagcatgaggggtcgcgtggggaggtgttggagaaagtattcctcgggagcgacgtcattgcggaaagtgacgaaggtaagtcctttctcgcgttttggcggttgctgactgatccttcacagtttgaaggattaaaagcagcgttggaagcactggagtcgcgaccatttatccgttcactgggcctcgaggagcgccgacggcttttccgcgtgacggagacattgctggtcgaaggcgggatggttcaggacgtcatggcgacactgagccgtagtctgaaaacctttgtgcaaagtcgggagttccaggagcagcgcaagattcaacgactgatccgcaccgcgattgcggagtcactggtactaaaggaccaactgaccaatggccggactctggatttcaccctgacgttatcgaccagcagcttacgttcggtggcgcaactggtactcgctgacccacaggaacgccccggagaaacctcagtcgacgaggccgaggcgccggaaatcgacctcgaggtcatgcgtgagatgatcgacaacgcggatatcgacattccgctacttaagcagaacgtccgatccgcgctagccgaacgcaatcaggtgagcgttggagaattgacccgtatgttcgaggtcactcaggggcttgcctcgatagtcggctatatgtcccttggtcagagatacggtatcgtgctccagaacagtgagcgcgaattccatccatgggaaagggtgtcgtgggccggacaagatggcgttgtgcgccacgcacggattgcacagatactgtttacgagggactgcctgaatgacctcgattag

SEQ ID NO: 44740 - DNA, 3450 bp, Burkholderia cepacia
gtggaaacagcccagctgttcgaggatccggaactgtcgccggcagcggcggacgagacaacgcatggggaggagggaccgcgcccgacatggagcgatcgtgatctcgaagaagcggggcaacagcagttcaggctacggcaaatgcaggtcatgaactgggggaccttcagcaagctccacgtattcgatatctcgccgcgcgggcacttgctcgttgggccgtcggggtcaggcaagtcgaccattctcgatgcacattcggcgttgatggcgccgccgaattcagagttcaatgccgcagcccggggtaacgataaagtcacccgcgatcggacgatggtcacttatgtgcgtggggcctgggctacgcaggagtcggaggaggggatcatcgcggcgcagtacttgaggcccgacaccacccttagtgcagtcgccgaggtgtatgcaaacgcacaggggcagatgctgacgctggtcggcatgtggtggatcaagggtaagtcgacactcgcaaaggacgtgcgacactgtttcttcgtcatcgaacgggaattcagtctcaaggaactgtcgttcttcatgcaggccgactacaacttgcgctcgtttgcaaaacatcttcctgaagtcaaacctttcgatacgcacgcgtccttccgtgaacgcttcaaggcgcgcctcggtattgaccacgatctggcgttgcgactgcttcacaggacgcagtcgtcgaaaaatctgggcgatatcaacgcgttcatgcgtgacaatatgctggacgagccccaaacgttcagcctcgccaaagcgctctgcgaggacttcaacacgctggcagcggcccaccaggacgtcgtggaagctcgtaagcagcgggatctgctgaacctcgcacgttcgcatcatgatctgtaccagcagcatcacgcggaggtcgccagggccgacgaactgctgaagcaactggaccaccaccgcgaatacctgcaatacacgttgcgcggcaggcgtgtggacgaattgaagatcgcgctcgaagggctgcatcagagcgtcgatgcattggcccggaaggccaatgatgagcagacggaactccagcgattgatgaggcagcgtgccggcatgaacgacggcaatgttgctgggctacaggcgcaactggccacgaaggaagcgcaactgaagcaggttcgccgtgcacgtgcacgggtcgcaggctggctccagacgctcgggtggcccgagtcgcaagatgccggccattttggcgaatacgtgggtcgcgctacggtgctgcgagaccacggtctgggtgaagaaagcgaggcgaaggccgaggaactgcgccagaaaaggtttgaggcagaacggcaactcaaggaactgcttgctgatgtagcgtcgcttgaactgagaaaatcgaacttgccgcgaaaactggtcgatgtccgtgaccagattgcgctcgccctgaatctggatcccgctgcgcttccgttcggcggtgaactgctggacgtacccgagaaattcaagcagtggcaaggtgcactggaacgcctgctggctcctcttacccgctcgtttctcgtgccggaagaacactattcgggggttgtgaactggctcgagtcgaatcatacggggcagcatgtgctttacctgcgtatgcgcccgcaccagaagcgtttcgataacggctcgagggctcctggcaggatgctggattcgtcggcggatgaatacggcgactggctgcgcgacgagatagccgtgcattacggcgagtttgtgtgcgcagaaacgactgaggaatttcgcaattcgccacgagccatcagcctgcacggtcagatcaagcggggaggtgcgcggcatgagaaaaatgaccgtacccgccttgatgaccgtcgggactgggcaattggtttctccaacgagcagaaaaaacttgagcttctcgatgaaatccacgctcagcagaaggcggaaagcgaagccagtcgggagctggccgaactcctggcgaggcagaacaaggagcgggagaaattgaacgcagccgcggaactgacacaggtggtctgggaggatatcgacgatgtctcggtggccgacgaggtgcagcgtttgctgaaccagatagaagaggctcaacggtcacacccggagatacaggaactcgatgggcaaatcaaggcgcagggtgcaaaggcgtctcaagcgggtagcgcgcatgaaaccgaaaagaaaaaatacgctgataccgaacagcagatcaacgggttgatccgggatctggaaaatacgcgcgacgatgtgcgtatgccgcctgtagatggagatgagcttcagtcattgtttggccatctggacagcctgacgttggacaacctggagccgcggcgcctgtctgcacgcagtgaactgaaggacagaaagaacgatgccgataaggctcaagcaaatgagcggagcctgcttgaggaagttcttcgtacgtttcagcgcgaacacaagatggcagcagcggatatggcagcgacgctggacgattggcccgactatgcccggttgttagccaaaatcgaggaggacgatctgccccgattcgaagagcggtttttcaggctgctcaacgagcagagcgatcgccatctggccagactgcggcagcgtctcattactgaaaaggatgagatacgtgggcgcatgaatattgtcaacgacgcactgtcgcagtcggagttcaacgctggcacctatctggttctggagaaccggccgcgaacgttgccggatgtgaccgcgttcctggccgaactcaggaactgccttgagcgcaatatcaagccagatgcgacccgcgaagagcgcgaagagcagtttaaggccctcaatgcaatcgtccaacggttgcacagtgacaagccggaggacgaacgctggaaagcactcgtgctcgacgtacggcagcacgtcgaatttgtggcgaaagagtttgatgctgatggccgtgtgcgcgacatttttcagtccggcgccggcaagtctggcggacagcgacaaaagcttgctgctacatgcctggcggcggcattgcgctatcagctcgccgggacgcagagaccgctgccacagttttgcacggtattgatggatgaggctttcgacaaagccgatagcgagttcacagcaatgacgctgaacattttcaatacgtttggattccagatgctgatggctacgccgatgaaggcagtgagaacgctcgagccattcataggcggtgcgcacgtctttagcaacaagttgcgcaacagttctggggcggtggcgatcgagtatgacatggcgcatcggcgactggtcggtctcagccaccagcggcccgaagacaaaggtaacgccgatgatggaatacctcagagcgacgactaa

SEQ ID NO: 44741 - DNA, 864 bp, Burkholderia cepacia
ctgcgccggaattgggacacactcaatgcgcggtggcaaacattggtcgggcggtacccagtcctgactggccagcgcgattgtgcgaacgccgttataagagcagccgagtggtcggacgacgatttccggagactgatggaattgctgggctggtgccagcataatcctgaaagtgggctttacttgcgccagttgccgctggtagacattgacacgaaatgggtcgaggggcggcgcggcgtcgtggaaccgctgcttcggattgttatgggcagggatggtgatattcaccaggtcatgggcctgaggcgttcgccggacaccgtgcgcatgagactgctcaatgtccggcttcgcgagcaactgcttggcatgggtgatcttcagatgcctgtagagcagtggagctatgtgttccagtctccgccgaagcgattgctgattgtcgagaacctcgagagcgggttagccctcccagatatcgagggtgtggcggttgtgatggcactcggtaacaatgtgacggtcctacgtgaaatagaatgggcacacgctgccgacatcctctattggggggatattgatacctgggggttgcatattctgtctcgggctcgcggtatctttccacatctcaagtcggttctgatgaccgatggggtggtggagtcgcatcggcatctcctgaccgaggagtcgacacaggacaagcggcccgccgcgaatctcacgaaggaagaggcgcaactcctgtctgatttgcaaaccgggcgctggggggcgcgccgtcgtctggagcaggagcgaatacactggccaagcgtaacggacgaacttcgccgtcaatgggctcattcttga

SEQ ID NO: 44742 - DNA, 1467 bp, Pseudomonas sp. AAC
ctggaccacctcacgctcacgacataccgcgatcggcatcctgcatggcgattgctcgcctcgccacatgcgccattggtagcaagcttcctgtaccgggtgttcgttgcaccgaacgtgcggctgacgagcgaagcggatctggccgaaatgctggaagacgagttgtttgccctgcgcgaacagctcggtgccgaggcgtatccgaaagccgcaaccgaatacctgaatgactggtgcgcgccggacaagggctggctgcgcaaattctacaagcccggcaccgacgaggcccagttcgatctcacccctgccacggaaaaggccatcgcctggctggtgtcgctgaccgaacggcctttcgtcggtaccgaatcgcgcctgctgaccttgttcgcgctgctggagcagatcagcaccggaagcgaggccgatccagccaagcgcctggaggaactgcgccgcaagcgcgatgagatcgacgccgagattggccgcgtcctgtccggcgatgtgccgctcatggatgacacggccatcaaggatcgcttcctgcaattccagcagttggcgcgcgaactgctgagcgattttcgccaggtggaacacaacttccgccaactcgaccgcagcgtccgcgagaagatcgcgttgtgggacgggagcaagggggcgctgctcgacgaggtcatgggcgagcgcgacgccatcggggattccgaccaggggcgcagcttccgtgcattctgggacttcctgatgtccagccgtcgccaggaagaactgtccgcacggctcgaccagatcctcggcctgcccgccgtggttgcgctcaagccggagccgcgcacccgccgggtgcaccacgattggctggaagcgggcgaacatacccaacgcacggtagcgcagttgtcgcaacaactgcgccgcttcctggatgaccgggccttccaggaaaaccgccgcatcctcgaactcttgcacggcatcgaaaccaaggcgctggccttgcgcgacatgcctccggccggcgacgtgatacgcctcgacgagatgggcgcggacatcgccttgccgcaggaacgccccctgttcgcgcttcatgccaagccacgcctggcggaactggtccttgaggacggtgacgacgacatcgacaccgcacgcctgttcgaccagcacgtcgtggacaagacccgcctgcgtcaggccctgcggcaggcattgcggcagcagtcgcagatcagcttgcgcgcgttgctggagacgcagccgctgcaacagggattggccgagctggtgacctggctggaactggcgcacgcgggcagccgcgggctggatggcctcagggccacggtggatgacgatgtgcaggagatcgtcgaatgggccatgcaggacagcgatggctcaacggtacgacggcgggcgcgaatgccccgcgttatttttgcgcgttga

SEQ ID NO: 44743 - DNA, 675 bp, Pseudomonas sp. AAC
atgaacgacatgcaccaggatgatccagaaggcagtaccgagtcccgcccgcccgttgtcgcggaactctcgcaactgatggtgcatttgctcaaaggcgtgttgtaccttcaggacgacgagcgcctgtgggccagcctgctgagcctgcaagcgcgggtgcgggagcaggcggcggtgctgttgctggatctggtactggacgaagccgagggttacgccttcctcaaaagtcagccggagccggagcatgcggacgccacaccccgtccgccacgcctgatcgcgcgacggccgctgtcctacccggtcagcctgatgctggccttgctgcgcaagcgcatggccgaatccgacgccagcggcggcgatacccggctggtgctgtcgcgcgaggagatcgccgaattgatgcgcgtgttcctgccggacggcaccaacgaggcgcgcctcatcgaccaagtggattcgaccatcaccaaggtggtggaactgggttatctgcgcaagctcaagcccgctgctggcgcagctcagcaggcaactcgctacgaggtacggcgcatcctcaaggcgttcgtcgatgcacagtggctggccgacttcgatgcacgcctggagggctatcgcaccgcattgtcaggtgccgatcgcgacaaggaagccggccgatga

SEQ ID NO: 44744 - DNA, 3378 bp, Pseudomonas sp. AAC
atgaacgatttttcgccacaggagctcgatttcgtggccgacgacagccgcgtcggctttcgcctgcagcggctggaagtcctgaactggggcacattcgaccggcgtgtctggcgctatgaactcgatgggcgcaacggcctgctgactggcgacatcggttcgggcaaatccaccctggtcgatgccgtcaccacgctgctggtgccggcgcaacgcatcgcctacaacaaggctgcaggcgccgagacgcgtgaacgatcactgcggtcctacgtgctgggccactacaagagcgagcgcaacgaaaccaccggcagcacccgcccggtggcgctacgcgacaccaccagctacagcgtgatcctgggtgtattccgcaacgaaggctacggccaggcggtcacactggcgcaagtcttctggtttcgcgaaccacagggccagcctgcgcgcttgttcgtggctgtagagcgggaactgtccatcaccgagcacttttccggattcggcagcgacatcaacggcctgcgcaagaagttacgcgcgatgggctgcgaactgaacgacagcttcccgccctacggcgcctggttccgccgccgcttcggcatcgagcacgagcaggcactggaactgttccatcagacggtttccatgaaatcggttggcaatctgaccgatttcgtgcgcagccacatgctcgaaccgttcgacgtagggcgccgcatcgaggcactgctcggccatttcgatgacctcgaccgcgcccaccagtcggtactcaaggccaagcgccagatcgagttgttggctccgctggtggaggatggccttcgccacgggcaaatcaccggcgagatccaggcgctgcgccaaggacgcgatgcattacgcccgtactttgccggtttgaaggcagcattgctggagaggcgcctggaattgttgactcaggatgcgacgcgctgggatgcccgcatcaagcaattgggagagcaacgagacaacgcccgaatcgagcaggggaaactcgaaggcgcactgcgcgagaacggcggcgaccggctgcaacaactcgctgccgccattcagcagcaggaggccgagaaacagcaacggcaggagaaagccgacgcgtacaccacgctattgacgtgcattggcgaagcagcgccgggagacgaagctgctttcatgacacaaagatccaccatcggagaacacgccgaagcgctgcgtacaagcattgcggaccacgatacgcagatcaatgaagacggctatgcgctgcggcggggtcaggaagaacacaaagcgctcagcgacgagatcgacagccttgcgcgtcgcaagagcaatatcgacgcggcccaagtgcgtatccgcgaggcattgtgcaccgccctgtccatcgcagaggaagacctgccctttgccggtgaactgatccaggtgcgcgaggacgaacgcgactgggagggcgcggccgaacgcctgctgcatggcttcggcctgtccctgctggtgccggatgtgcactacaaggacgtggccgattgggtggaacgccagcaccttggcacgcgtctggtgtacttccacgtgcgtgcgcgcaagtccacgcaggccgtcagcctgcccccccagtcgctggtgcgcaagctgctcatcaagcccgacacgcagcactacgattggctggaacgcgaactgcaccaccgcttcgacctggcctgctgcgacaacaccgagcagttccgccgcgagacccgcgccatcacccgcgccggacagatcaaggacccgagcggacgccacgaaaaggacgaccgccgccgcatcgacgaccgcagccgctacgtgctgggctggagcaacgccgacaagctgcgcatcttgcgcgacgaacgcgagggcttggaacagcaactgggcgacatcggtctgcgcattgccaacacacagcgattgcgcgggcaatgccaggcgcaactggaggccttggccaagctcgaagtcttcacccgctacagcgaaatcgactggcaggcaccggcacgcgagattgcccggctgaccgaggaacgcgaccgcctcaaggcggcctccgataccctgcgggaactggaaagccaactggcgcaggtcgttgagcgcctgaaggagatcgaagacgatcttggcgaagcacaaggcaaacgcggagaaatccgcagcaaacacgaaactgcccaggcacagcatgcgcaggctctcgaaatccagacgcaagccgcactcgacgacatgttgctgcaatctcttgagggctggcgcgccgaagtcctgggcgaccaccagctcacggtggaatcctgcgacaaccgcgaacaggacgtgcgcaatggcttgcaggcgcgcatcgatgccgaagacaagcgtctctcacgcttgaccgaacgcatcatcaacgccatgcgcggtttcaaggaggccttcaaggcagagaccgccgagatcgacatcagcctggccgcgctgcccgagttcgagcgactgatgaaggatttgcagcacgacgacctgccgcgcttcgaagcgcgtttcaaggaactgctcaacgtcaataccatcaacgagatcgccaacttcaatgcccagctcgcgcgcgagcgggaaacgatcaaggagcgggtcgatgtcatcaaccaatccttgcaggtgatcgactacaaccccggacgctacatccggctgctggcgcaacccagccccgatgcggagatccgcgacttcctgcaggatctgcgtgcctgcaccgaaggcgcgctgagcggctcggaagacgaacagtattccgagaccaagttcctgcaggtcaaagccatcatcgaccgcttccgggggcgtgagggactggccgagatcgaccggcgctggatgcagaaggtgaccgacgtgcgcaacggcttcctgttttccgccagcgagcgctggcgcgaggacgatgccgagcacgaacactactccgactccggcggcaaatccggcgggcagaaggagaagctggcctataccgtgctggccgccagcctggcctaccagttcggcctggaatggggggcggtgcgctctcgctcgttccgttttgtcgtgatcgacgaagccttcgggcgcggctcggatgaatcggcccagtatgggctggaactgttccgccagctcaacctgcaactgctgatcatcacgccgctgcagaagatccacatcatcgagccatacgtgtccagcgtcggcttcgtgcacaacgaaggcggccgtgagtcgcggctgcgcagcctgagcatcgaggaataccgggcacagaaggctgccgccaggggcggcgctgtatga

SEQ ID NO: 44745 - DNA, 1206 bp, Pseudomonas sp. AAC
atgacatggagccagcccgccgaccttcgcgcgcagatcgaacggctgtggcagcgcggcgagttgctgcgtgccgtggtcggcgacggcacgctgggctggccgttgcgtctgtcgctgaaatcgccgtccgccgccgatctcagcaaccgtttcgatgccgtgcgcggctgggtgcgcgacatcagcgccatgccactcgtgcgcatcgaatggcgcgagtggacgcaccgggtgcagggacggcagcgcctgccggatacgctctggatcgatacactggaagacgcgctggcgatgatcggtaagaccggcgatacccaccgattccaggcgctctggcagcaaactgccgaagcgcaacccgcactgctgccgtggctgcacagagcaccgttgcagaccttggcactggccgaacactggccgcgcctgctggccgtggtggcctgggtgcaaacccatccgcgccccggcgtctatcttcggcaggtcgatgctccgggcgtggacagcaagttcattgaagcgcatcgcggtacgctggctcagtggctggacctggccttgccgactgaagccattgagcctgctgcaaccgggatgaccgggtttgcccgtcgctacggctttctggaaaagcccgttcgcatccgcctgcgcttgctcgatccgcaactgccccaacttcccggctgcaccggcctgaccgacatcaccctggatgaggacagcttcgccgcgctcgcactgcctgcgcagcgtgtcttcatcaccgaaaacgaggtgaacttcctggcctttccgccggtgtccggtgccatcgtcgtgttcggtgctggctatggctggggagcgctcgcccgggccgactggctgcatcgcgcctctctgcactattggggagacatcgatacccatggctttgccattctggacagcctgcgcaagtatttcccgctggccgcttcgtttctcatggaccgctccaccctgatggcccacgcacttcaatggggtgaggagcccctcgacaaacgccatacgttgcccttgtcccgactggtcgatgatgaacccgctctctacgacgacttgcgcggtgatcgaatccggccacaactgcggctggaacaggaacgcatcggctatcgctggctgtgcgcggcgttggtcgcaacagtccgggacgatttccggccgtag

SEQ ID NO: 44746 - DNA, 1632 bp, Bifidobacterium longum subsp. longum EK5; identical to SEQ ID NO: 42278

SEQ ID NO: 44747 - DNA, 675 bp, Bifidobacterium longum subsp. longum EK5; identical to SEQ ID NO: 42279

SEQ ID NO: 44748 - DNA, 3549 bp, Bifidobacterium longum subsp. longum EK5; identical to SEQ ID NO: 42635

SEQ ID NO: 44749 - DNA, 1632 bp, Bifidobacterium longum subsp. longum 17-1B
gtggccgatgtgatgcgggagctggaacggctgcgaccggtgtatgagacgggcgtcctgcggttgctgttgcgacagaacgcgatgctgtacgtgtcgctgctgcgttccacgttcgacccgctcaccggcgagctgccgcgcgagaccgtggaggagcggttcgcgcaaagtctgaacgctctggccgacgccggcgagtatgcgccgcgcgaggaccagaccttcgccgaggccgcccatcagatcctcgccgacctgacccgtgaaggcgaaggcgactacgcctggctcgccaactcgcatgatgcggcctcacaccgattcctctaccgtttgacggcccgcgcccaccgcgccatcgaggcgctgagcaggctcgaagacgaatcacgcgccctgtccggcgcgcaggccaacagcatcatcatggaaatcgagcacgcgcgcatgcagctgaccgccgaccccggcgagcgcatcaaactcctcaaccgtgaaatcaaggaacgcaagcacgagatcaaacgcatccaacagggcaagcagcatgccacgctgagcgaagcccaggtggaggacgtgatcgccgtgatccacaacacgctgcgcggcgtgcccatcgacctgcgcgaactcgtgctcgacgagcgggacaacggcgacgccttgcgtcggcgcatgcaggccggcgacatcagcgtggacgagaacctgacccgctaccacgatgaataccgccgctcgttccgcgaatcagacagcggccgccgcttcgaggacgccttccaggtgatcatcaccgacgagggccgccagcaaatcgacgaagccctgcgcgccatcgccaaaaccccgtatctggccggcgaatccggcgtgctgctcggccagatccgcgacgaactggcccgcatctacgacggcatcgaagccgtgcgccgccagatgcgcgtctccgacgaggcgatcagccggctcgtgcgccagcaaaccgacactcgctaccgtacgatgctcacccgcttgaaccgactgtacgcgcgcctcaacgcggatgcgaaaacccatatgggagacgcctcgcgcccgtacgacacggccacctcggacgcgctgttcgcgccattgccgatgcgcccggccaaatccatgacccgcgccaccgcacccggcctgagcgacctcgccgccgaagccccgcagtcgactccggtggccgatctgcgggacatggtcaacagcggcggcccccgactcctgcgcatggtcagcctcatccggcgcaacccggtgaccgttgacaggtccgatgacaggcccggcgcaaccctcgtggacatcgccgccagcttcaaccggctgcccgaaagcgaacgccgcgaaagcgagatcgtcggcttcctgggcgggctgggagccgtaagcggcaacgccatcgccgacgagccgtccactgacggcgtcggcgtcggggtcgacagcgacatcgccaccgagccggctccggcgcagcgcggcgatactgcgacctggcattgcgtatcgatcgacggcgagccccggaactggatcactagaccggtgctggccgacatggacgagctgagcatcattgtggaggaaggatga

SEQ ID NO: 44750 - DNA, 675 bp, Bifidobacterium longum subsp. longum 17-1B; identical to SEQ ID NO: 41629

SEQ ID NO: 44751 - DNA, 3549 bp, Bifidobacterium longum subsp. longum 17-1B
atgatgcaggcgacagacgtgcagatgatcgcggaccggtggatgctggaatcccgccgactcatcaactggggctcctatgagggctaccacgaattccgcccctccacggaccacaagctgccggtgaccctgctcgccggcgccagcgaatccggcaaatccacgctggtcgacgcgcagatctccctgctgtacccaaccggtacgccgttcaacaaggcctcgaactccggccgctccgaacgcagcgactacacctacctgcgcggcatggtcggcgtgggcagcaccgaaaccggcgacgagccgctctacctgcgcggccgcgacgagaacggcgcaccgcaacccgtgtggggcgccatcgtggacacctatcgcaaccagaccaccggccaggtgctctcctgcgccaaattcctctacctgatgcccggcgacggccgcggcgacgtgcgccgacagtacgtggtctggggcaagcccgtggaccccaggcgcatggaccaataccgtgacgccccgttcacgccggcccagctcaaagccacctaccccgactgcctcacattccccagcgccgaagcgttccacacacacatctggagcgcaatgggcctgagcgaggccgcctgtcgactgctgcacaagatccagtccgccgacgcgccctcccggctcgacgacatcttcaaacaaggcgtgctcggcgtgcccgaagccctggacctggcccgcaccacggtcgaggactacgaacgttacgacgagaacttccacgccatggacgagaagacccgccgcatggacacgctgcgcggcatccaacaggcctacggcgaatacgccgccgcacgcggcaaggcccgcgccttcgaaccggtcaagccggccgtcgacggcacggtaccggccgtgctgcgcgactgggcattggcccgcatgcgcggcgaagtcgccgtccaactgcccgccgaccgcgccgaacaacagaacagcgaggcggaagccaagctgctgcgccgccgaaccgaagacctgcgcacccgtctcgacatgatccgcggccagatgcagggtctggacggcggcaacctgacccgactcgaactcgaactcgaccaggcccgccgcaccctcgaagacgtgcaagccaaccgaacacgaatcgaacaaacgttcgcatccatcggcgagacgctgcccggcgacgaacaagcctggaacgaacgccgcatcaacgccgtgaacttcaaacgcgaatacaacaaacgagacggcgaatgcgaggaagccctcaccgccgccatcaacgcgcgggccggcgcacgcggcgacctcgaacgactgcaacgcgacttcgaccggcaacgctcccagcgcacccgcatctcccagcagatggacgaaacccgcgccatgctctgccgcgccaccggactcgcccccgccgaactgccgtacgtggccgaactcatggacgtgaacgaacacgaggaagactggcgtctcgccatgaacgtcgcctacgcgcccatcgcccagaccatcctcgtcgacaagcgccacgaacagggcttcgccgccaaagtcagcaccatcgacccgcgcaccatgccccgacgcacctggcagttcgtggacaccgcacgccactacgacgacaccggcgcgcacgcgaacatactcaccggagaacaggacggcgactggttgtccggcaaactgcgctaccgcgacgactcgcccttcgccgactggctgcgctcgcagacccaggacgaacgattcgacgccctatgcgtcaccgccatcgacgacaccgaccgcaccaaccgtcaggtgcaggccgacggtcagatcaaatccggcgcacgcggccagcacggcaccaaagaccgcgcccaggtcatcggattcgtcaacgaaacctacctcaacgcgctcgcagcgcaggtcgacgccgcccgcaacgcgctcagccaagccgacaccgactacacggccgccaaaacacagtccgataacctccaccgcgaactcgaactggccaaccagctcgcctacacgtcatgggaacgcatcgacatcgccggcgcgcaacggaccatcacggacacgcaggacgccatcgcatccatcaaaaacgatcccaaactcgccgaactcgccaaacagcgcgacgaactgaacgccgaactcgaccgtgtggaacgccagcgcatcgaatccgaccaggccgcggcccgcgccggcagcgccgtcgaagcggcgctcatctggctgcgcgaccatgccgacaccggcacgacggacgccgccggtgccaccgccgacaatgacgatgacgccgcgtccggcccgctgccggacgaagtcacggcggcgctcgccgaatcctacgacaaccgattcgccggactggcggacgccgccatgcgcgcgcacatgatcatcggcgcgggcgcggcaggaacgcaggcaccgggggagagcttccccgaacgcaccatcgccggcatcggcaaggacatggcctcccgcatcaacctgctgaacggccaggccgatgccgcacgcaccggcgtcgaatcgaagatgagcacctacatcgcgctctacgcggccgacgatgattcgctgaccgccagcgtggaggactaccggtactatctcgacgaactcgccagcctcacccagctggccgcggttgccgccaccgacgccgaataccggcgctgcctcgaacagctgctcaggagcttcctgaccatcaaacgcgccatcgacacggatgccagcgacatccacgaccagcttgaccgcatcaacgccatgctcaaaggccagcagttcggtcccaagcacggcagcctgtccctgcacgcggacgtgcgccgtcccgagcgcaccttctgggcgcagctcatccgcgtcatcggcaccctgaacgattggaaatccgccgacgtcaacgattccgacgcctcgcgcaaggccttcgcggcctgcgcgccgatggtcgggctgctgcgcgccgaactcgcgcaggtcaaggacgcgaacggcgtgaaaagctacggcgcccgcaacctcgacccgcgctgccgctcgtccttctacgccatcgtgcatcatgccgacggcccggatgaacgcatcacctccaccggcggccgttcgggcggcgccttgcaggagctcacctcattcgtatacggcgcggcgctcatctacctgctcggcggcggcctgaccagcgatccctcgtacaccacgctgttcctcgacgaggcgctcatcaaggccgacggccgttacacgcagcgcgccctcacggtgctgccgcgcctcggattccaggtcatcgtctccgctccggaaagcaagaccggcgaaatcctcgaggtctccaccaaggcctacgtgacctacaaggaccccgacaccggcctcacctccctgcgcgaggccgtgctgcatcagaatgacatggacgatgaatcatcgtcggatatattgaaggatgacggggttgccgaatga

SEQ ID NO: 44752 - DNA, 1185 bp, Bifidobacterium longum subsp. longum 17-1B; identical to SEQ ID NO: 41659

SEQ ID NO: 44753 - DNA, 1632 bp, Bifidobacterium longum subsp. longum 72B
gtggccgatgtgatgcgggagctggaacggctgcgaccggtgtatgagacgggcgtcctgcggttgctgttgcgccagaacgcgatgctgtacgtgtcgctgctgcgttccacgttcgacccgctcaccggcgagctgccgcgcgagaccgtggaggagcggttcgcgcaaagtctgagcagtctggccgacgccggcgagtatgcgccgcgcgaggaccagaccttcgccgaggccgcccatcagatcctcgccgacctgacccgtgaaggcgaaggcgactacgcctggctcgccaactcgcatgatgcggcctcacaccgattcctctaccgtttgacggcccgcgcccaccgcgccatcgaggcgctgagcaggctcgaagacgaatcacgcgccctgtccggcgcgcaggccaacagcatcatcatggaaatcgagcacgcgcgcatgcagctgaccgccgaccccggcgagcgcatcaaactcctcaaccgtgaaatcaaggaacgcaagcacgagatcaaacgcatccaacagggcaagcagcatgccacgctgagcgaagcccaggtggaggacgtgatcgccgtgatccacaacacgctgcgcggcgtgcccatcgacctgcgcgaactcgtgctcgacgagcgggacaacggcgacgccttgcgtcggcgcatgcaggccggcgacatcagcgtggacgagaacctgacccgctaccacgatgaataccgccgctcgttccgcgaatcagacagcggccgccgcttcgaggacgccttccaggtgatcatcaccgacgagggccgccagcaaatcgacgaagccctgcgcgccatcgccaaaaccccgtatctggccggcgaatccggcgtgctgctcggccagatccgcgacgaactggcccgcatctacgacggcatcgaagccgtgcgccgccagatgcgcgtctccgacgaggcgatcagccggctcgtgcgccagcaaaccgacactcgctaccgtacgatgctcacccgcttgaaccgactgtacgcgcgcctcaacgcggatgcgaaaacccatatgggagacgcctcgcgcccgtacgacacggccacctcggacgcgctgttcgcgccattgccgatgcgcccggccaaatccatgacccgcgccaccgcacccggcctgagcgacctcgccgccgaagccccgcagtcgactccggtggccgatctgcgggacatggtcaacagcggcggccctcgactcctgcgcatggtcagcctcatccggcgcaacccggtgaccgttgacaggtccgatgacaggcccggcgcaaccctcgtggacatcgccgccagcttcaaccggctgcccgaaagcgaacgccgcgaaagcgagatcgtcggcttcctgggcgggctgggagccgtaagcggcaacgccatcgccgacgagccatccactgacggcgtcggcgtcggggtcgacagcgacatcgccaccgagccggctccggcgcagcgcggcgatactgcgacctggcattgcgtatcgatcgacggcgagccccggaactggatcactagaccggtgctggccgacatggacgagctgagcatcattgtggaggaaggatga

SEQ ID NO: 44754 - DNA, 675 bp, Bifidobacterium longum subsp. longum 72B; identical to SEQ ID NO: 41629

SEQ ID NO: 44755 - DNA, 3549 bp, Bifidobacterium longum subsp. longum 72B
atgatgcaggcgacagacgtgcagatgatcgcggaccggtggatgctggaatcccgccgactcatcaactggggctcctatgagggctaccacgaattccgcccctccacggaccacaagctgccggtgaccctgctcgccggcgccagcgaatccggcaaatccacgctggtcgacgcgcagatctccctgctgtacccaaccggtacgccgttcaacaaggcctcgaactccggccgctccgaacgcagcgactacacctacctgcgcggcatggtcggcgtgggcagcaccgaaaccggcgacgagccgctctacctgcgcggccgcgacgagaacggcgcaccgcaacccgtgtggggcgccatcgtggacacctatcgcaaccagaccaccggccaggtgctctcctgcgccaaattcctctacctgatgcccggcgacggccgcggcgacgtgcgccgacagtacgtggtctggggcaagcccgtggaccccaggcgcatggaccaataccgtgacgccccgttcacgccggcccagctcaaagccacctaccccgactgcctcacattccccagcgccgaagcgttccacacacacatctggagcgcaatgggcctgagcgaggccgcctgtcgactgctgcacaagatccagtccgccgacgcgccctcccggctcgacgacatcttcaaacaaggcgtgctcggcgtgcccgaagccctggacctggcccgcaccacggtcgaggactacgaacgttacgacgagaacttccacgccatggacgagaagacccgccgcatggacacgctgcgcggcatccaacaggcctacggcgaatacgccgccgcacgcggcaaggcccgcgccttcgaaccggtcaagccggccgtcgacggcacggtaccggccgtgctgcgcgactgggcattggcccgcatgcgcggcgaagtcgccgtccaactgcccgccgaccgcgccgaacaacagaacagcgaggcggaagccaagctgctgcgccgccgaaccgaagacctgcgcacccgtctcgacatgatccgcggccagatgcagggtctggacggcggcaacctgacccgactcgaactcgaactcgaccaggcccgccgcaccctcgaagacgtgcaagccaaccgaacacgaatcgaacaaacgttcgcatccatcggcgagacgctgcccggcgacgaacaagcctggaacgaacgccgcatcaacgccgtgaacttcaaacgcgaatacaacaaacgagacggcgaatgcgaggaagccctcaccgccgccatcaacgcgcgggccggcgcacgcggcgacctcgaacgactgcaacgcgacttcgaccggcaacgctcccagcgcacccgcatctcccagcagatggacgaaacccgcgccatgctctgccgcgccaccggactcgcccccgccgaactgccgtacgtggccgaactcatggacgtgaacgaacacgaggaagactggcgtctcgccatgaacgtcgcctacgcgcccatcgcccagaccatcctcgtcgacaagcgccacgaacagggcttcgccgccaaagtcagcaccatcgacccgcgcaccatgccccgacgcacctggcagttcgtggacaccgcacgccactacgacgacaccggcgcgcacgcgaacatactcaccggagaacaggacggcgactggctgtccggcaaactgcgctaccgcgacgactcgcccttcgccgactggctgcgctcgcagacccaggacgaacgattcgacgccctatgcgtcaccgccatcgacgacaccgaccgcaccaaccgtcaggtgcaggccgacggtcagatcaaatccggcgcacgcggccagcacggcaccaaagaccgcgcccaggtcatcggattcgtcaacgaaacctacctcaacgcgctcgcagcgcaggtcgacgccgcccgcaacgcgctcagccaagccgacaccgactacacggccgccaaaacacagtccgataacctccaccgcgaactcgaactggccaaccagctcgcctacacgtcctgggagcgcatcgacatcgccggcgcgcaacggaccatcacggacacgcaggacgccatcgcatccatcaaaaacgatcccaagctcgccgaactcgccaaacagcgcgacgaactgaacgccgaactcgaccgtgtggaacgccagcgcatcgaatccgaccaggccgcggcccgcgccggcagcgccgtcgaagcggcgctcatctggctgcgcgaccatgccgacaccggcacgacggacgccgccggtgccaccgccgacaatgacgatgacgccgcgtccggcccgctgccggacgaagtcacggcggcgctcgccgaatcctacgacaaccgattcgccggactggcggacgccgccatgcgcgcgcacatgatcatcggcgcgggcgcggcaggaacgcaggcgccgggggagagcttccccgaacgcaccatcgccggcatcggcaaggacatggcctcccgcatcaacctgctgaacggccaggccgatgccgcacgcaccggcgtcgaatcgaaaatgagcacctacatcgcgctctacgcggccgacgatgattcgctgaccgccagcgtggaggactaccggtactatctcgacgaactcgccagcctcacccagctggccgcggttgccgccaccgacgccgaataccggcgctgcctcgaacagctgctcaggagcttcctgaccatcaaacgcgccatcgacacggatgccagcgacatccacgaccagcttgaccgcatcaacgccatgctcaaaggccagcagttcggtcccaagcacggcagcctgtccctgcacgcggacgtgcgccgtcccgagcgcaccttctgggcgcagttcatccgcgtcatcggcaccctgaacgattggaaatccgccgacgtcaacgattccgacgcctcgcgcaaggctttcgcggcctgcgcgccgatggtcgggctgctgcgcgccgaactcgcgcaggtcaaggacgcgaacggcgtgaaaagctacggcgcccgcaacctcgacccgcgttgccgctcgtccttctacgccatcgtgcatcatgccgacggcccggatgaacgcatcacctccaccggcggccgttcgggcggcgccttgcaggagctcacctcattcgtatacggcgcggcgctcatctacctgctcggcggcggcctgaccagcgagccctcgtacaccacgctgttcctcgacgaggcgctcatcaaggccgacggccgttacacgcagcgcgccctcacggtgctgccgcgcctcggattccaggtcatcgtctccgccccggaaagcaagaccggcgaaatcctcgaggtctccaccaaggcctacgtgacctacaaggaccctgacaccggcctcacctccctgcgcgaggccgtgctgcatcagaatgacatggacgatgaatcatcgtcggatatattgaaggatgacggggttgccgaatga

SEQ ID NO: 44756 - DNA, 1185 bp, Bifidobacterium longum subsp. longum 72B; identical to SEQ ID NO: 41652

SEQ ID NO: 44757 - DNA, 1632 bp, Bifidobacterium longum subsp. longum 7-1B; identical to SEQ ID NO: 41649

SEQ ID NO: 44758 - DNA, 675 bp, Bifidobacterium longum subsp. longum 7-1B; identical to SEQ ID NO: 41629

SEQ ID NO: 44759 - DNA, 3549 bp, Bifidobacterium longum subsp. longum 7-1B
atgatgcaggcgacagacgtgcagatgatcgcggaccggtggatgctggaatcccgccgactcatcaactggggctcctatgagggctaccacgaattccgcccctccacggaccacaagctgccggtgaccctgctcgccggcgccagcgaatccggcaaatccacgctggtcgacgcgcagatctccctgctgtacccaaccggtacgccgttcaacaaggcctcgaactccggccgctccgaacgcagcgactacacctacctgcgcggcatggtcggcgtgggcagcaccgaaaccggcgacgagccgctctacctgcgcggccgcgacgagaacggcgcaccgcaacccgtgtggggcgccatcgtggacacctatcgcaaccagaccaccggccaggtgctctcctgcgccaaattcctctacctgatgcccggcgacggccgcggcgacgtgcgccgacagtacgtggtctggggcaagcccgtggaccccaggcgcatggaccaataccgtgacgccccgttcacgccggcccagctcaaagccacctaccccgactgcctcacattccccagcgccgaagcgttccacacacacatctggagcgcaatgggcctgagcgaggccgcctgtcgactgctgcacaagatccagtccgccgacgcgccctcccggctcgacgacatcttcaaacaaggcgtgctcggcgtgcccgaagccctggacctggcccgcaccacggtcgaggactacgaacgttacgacgagaacttccacgccatggacgagaagacccgccgcatggacacgctgcgcggcatccaacaggcctacggcgaatacgccgccgcacgcggcaaggcccgcgccttcgaaccggtcaagccggccgtcgacggcacggtaccggccgtgctgcgcgactgggcattggcccgcatgcgcggcgaagtcgccgtccaactgcccgccgaccgcgccgaacaacagaacagcgaggcggaagccaagctgctgcgccgccgaaccgaagacctgcgcacccgtctcgacatgatccgcggccagatgcagggtctggacggcggcaacctgacccgactcgaactcgaactcgaccaggcccgccgcaccctcgaagacgtgcaagccaaccgaacacgaatcgaacaaacgttcgcatccatcggcgagacgctgcccggcgacgaacaggcctggaacgaacgccgcatcaacgccgtgaacttcaaacgcgaatacaacaaacgagacggcgaatgcgaggaagccctcaccgccgccatcaacgcgcgggccggcgcacgcggcgacctcgaacgactgcaacgcgacttcgaccggcaacgctcccagcgcacccgcatctcccagcagatggacgaaacccgcgccatgctctgtcgcgccaccggactcacccccgccgaactgccgtacgtggccgaactcatggacgtgaacgaacacgaggaagactggcgtctcgccatgaacgtcgcctacgcgcccatcgcccagaccatcctcgtcgacaagcgccacgaacagggcttcgccgccaaagtcagcaccatcgacccgcgcaccatgccccgacgcacctggcagttcgtggacaccgcacgccactacgacgacaccggcgcgcacgcgaacatactcaccggagaacaggacggcgactggctgtccggcaaactgcgctaccgcgacgactcgcccttcgccgactggctgcgctcgcagacccaggacgaacgattcgacgccctatgcgtcaccgccatcgacgacaccgaccgcaccaaccgtcaggtgcaggccgacggtcagatcaaatccggcgcacgcggccagcacggcaccaaagaccgcgcccaggtcatcggattcgtcaacgaaacctacctcaacgcgctcgcagcgcaggtcgacgccgcccgcaacgcgctcagccaagccgacaccgactacacggccgccaaaacacagtccgataacctccaccgcgaactcgaactggccaaccagctcgcctacacgtcatgggaacgcatcgacatcgccggcgcgcaacggaccatcacggacacgcaggacgccatcgcatccatcaaaaacgatcccaaactcgccgaactcgccaaacagcgcgacgaactgaacgccgaactcgaccgtgtggaacgccagcgcatcgaatccgaccaggccgcggcccgcgccggcagcgccgtcgaagcggcgctcatctggctgcgcgaccatgccgacaccggcacgacggacgccgccggtgccaccgccgacaatgacgatgacgccgcgtccggcccgctgccggacgaagtcacggcggcgctcgccgaatcctacgacaaccgattcgccggactggcggacgccgccatgcgcgcgcacatgatcatcggcgcgggcgcggcaggaacgcaggcaccgggggagagcttccccgaacgcaccatcgccggcatcggcaaggacatggcctcccgcatcaacctgctgaacggccaggccgatgccgcacgcaccggcgtcgaatcgaaaatgagcacctacatcgcgctctacgcggccgacgatgattcgctgaccgccagcgtggaggactaccggtactatctcgacgaactcgccagcctcacccagctggccgcggtcgccgccaccgacgccgaataccggcgctgcctcgaacagctgctcaggagcttcctgaccatcaaacgcgccatcgacacggatgccagcgacatccacgaccagcttgaccgcatcaacgccatgctcaaaggccagcagttcggtcccaagcacggcagcctgtccctgcacgcggacgtgcgccgtcccgagcgcaccttctgggcgcagctcatccgcgtcatcggcaccctgaacgattggaaatccgccgacgtcaacgattccgacgcctcgcgcaaggctttcgcggcctgcgcgccgatggtcgggctgctgcgcgccgaactcgcgcaggtcaaggacgcgaacggcgtgaaaagctacggcgcccgcaatctcgacccgcgttgccgctcgtccttctacgccatcgtgcatcatgccgacggcccggatgaacgcatcacctccaccggcggccgttcgggcggcgccttgcaggagcttacctcattcgtatacggcgcggcgctcatctacctgctcggcggcggcctgaccagcgagccctcgtacaccacgctgttcctcgacgaggcgctcatcaaggccgacggccgttacacgcagcgcgccctcacggtgctgccgcgcctcggattccaggtcatcgtctccgccccggaaagcaagaccggcgaaatcctcgaggtctccaccaaggcctacgtgacctacaaggaccccgacaccggcctcacctccctgcgcgaggccgtgctgcatcagaatgacatggacgatgaatcatcgtcggatatattgaaggatgacggggttgccgaatga

SEQ ID NO: 44760 - DNA, 1185 bp, Bifidobacterium longum subsp. longum 7-1B; identical to SEQ ID NO: 41659

SEQ ID NO: 44761 - DNA, 1632 bp, Bifidobacterium longum subsp. longum 1-5B
gtggccgatgtgatgcgggagctggaacggctgcgaccggtgtatgagacgggcgtcctgcggttgctgttgcgccagaacgcgatgctgtacgtgtcgctgctgcgttccacgttcgacccgctcaccggcgagctgccgcgcgagaccgtggaggagcggttcgcgcaaagtctgagcagtctggccgacgccggcgagtatgcgccgcgcgaggaccagaccttcgccgaggccgcccatcagatcctcgccgacctgacccgtgaaggcgaaggcgactacgcctggctcgccaactcgcatgatgcggcctcacaccgattcctctaccgtttgacggcccgcgcccaccgcgccatcgaggcgctgagcaggctcgaagacgaatcacgcgccctgtccggcgcgcaggccaacagcatcatcatggaaatcgagcacgcgcgcatgcagctgaccgccgaccccggcgagcgcatcaaactcctcaaccgtgaaatcaaggaacgcaagcacgagatcaaacgcatccaacagggcaagcagcatgccacgctgagcgaagcccaggtggaggacgtgatcgccgtgatccacaacacgctgcgcggcgtgcccatcgacctgcgcgaactcgtgctcgacgagcgggacaacggcgacgccttgcgtcggcgcatgcaggccggcgacatcagcgtggacgagaacctgacccgctaccacgatgaataccgccgctcgttccgcgaatcagacagcggccgccgcttcgaggacgccttccaggtgatcatcaccgacgagggccgccagcaaatcgacgaagccctgcgcgccatcgccaaaaccccgtatctggccggcgaatccggcgtgctgctcggccagatccgcgacgaactggcccgcatctacgacggcatcgaagccgtgcgccgccagatgcgcgtctccgacgaggcgatcagccggctcgtgcgccagcaaaccgacactcgctaccgtacgatgctcacccgcttgaaccgactgcacgcgcgcctcaacgcggatgcgaaaacccatatgggagacgcctcgcgcccgtacgacacggccacctcggacgcgctgttcgcgccattgccgatgcgcccggccaaatccatgacccgcgccaccgcacccggcctgagcgacctcgccgccgaagccccgcagtcgactccggtggccgatctgcgggacatggtcaacagcggcggcccccgactcctgcgcatggtcagcctcatccggcgcaacccggtgaccgttgacaggtccgatgacaggcccggcgcaaccctcgtggacatcgccgccagcttcaaccggctgcccgaaagcgaacgccgcgaaagcgagatcgtcggcttcctgggcgggctgggagccgtaagcggcaacgccatcgccgacgagccgtccactgacggcgtcggcgtcggggtcgacagcgacatcgccaccgagtcggctccggcgcagcacggcgatactgcgacctggcattgcgtatcgatcgacggcgagccccggaactggatcactagaccggtgctggccgacatggacgagctgagcatcattgtggaggaaggatga

SEQ ID NO: 44762 - DNA, 675 bp, Bifidobacterium longum subsp. longum 1-5B; identical to SEQ ID NO: 41629

SEQ ID NO: 44763 - DNA, 3549 bp, Bifidobacterium longum subsp. longum 1-5B
atgatgcaggcgacagacgtgcagatgatcgcggaccggtggatgctggaatcccgccgactcatcaactggggctcctatgagggctaccacgaattccgcccctccacggaccacaagctgccggtgaccctgctcgccggcgccagcgaatccggcaaatccacgctggtcgacgcgcagatctccctgctgtacccaaccggtacgccgttcaacaaggcctcgaactccggccgctccgaacgcagcgactacacctacctgcgcggcatggtcggcgtgggcagcaccgaaaccggcgacgagccgctctacctgcgcggccgcgacgagaacggcgcaccgcaacccgtgtggggcgccatcgtggacacctatcgcaaccagaccaccggccaggtgctctcctgcgccaaattcctctacctgatgcccggcgacggccgcggcgacgtgcgccgacagtacgtggtctggggcaagcccgtggaccccaggcgcatggaccaataccgtgacgccccgttcacgccggcccagctcaaagccacctaccccgactgcctcacattccccagcgccgaagcgttccacacacacatctggagcgcaatgggcctgagcgaggccgcctgccgactgctgcacaagatccagtccgccgacgcgccctcccggctcgacgacatcttcaaacaaggcgtgctcggcgtgcccgaagccctggacctggcccgcaccacggtcgaggactacgaacgttacgacgagaacttccacgccatggacgagaagacccgccgcatggacacgctgcgcggcatccaacaggcctacggcgaatacgccgccgcacgcggcaaggcccgcgccttcgaaccggtcaagccggccgtcgacggcacggtaccggccgtgctgcgcgactgggcattggcccgcatgcgcggcgaagtcgccgtccaactgcccgccgaccgcgccgaacaacagaacagcgaggcggaagccaagctgctgcgccgccgaaccgaagacctgcgcacccgtctcgacatgatccgcggccagatgcagggtctggacggcggcaacctgacccgactcgaactcgaactcgaccaggcccgccgcaccctcgaagacgtgcaagccaaccgaacacgaatcgaacaaacgttcgcatccatcggcgagacgctgcccggcgacgaacaagcctggaacgaacgccgcatcaacgccgtgaacttcaaacgcgaatacaacaaacgagacggcgaatgcgaggaagccctcaccgccgccatcaacgcgcgggccggcgcacgcggcgacctcgaacgactgcaacgcgacttcgaccggcaacgctcccagcgcacccgcatctcccagcagatggacgaaacccgcgccatgctctgccgcgccaccggactcacccccgccgaactgccgtacgtggccgaactcatggacgtgaacgaacacgaggaagactggcgtctcgccatgaacgtcgcctacgcgcccatcgcccagaccatcctcgtcgacaagcgccacgaacagggcttcgccgccaaagtcagcaccatcgacccgcgcaccatgccccgacgcacctggcagttcgtggacaccgcacgccactacgacgacaccggcgcgcacgcgaacatactcaccggagaacaggacggcgactggctgtccggcaaactgcgctaccgcgacgactcgcccttcgccgactggctgcgctcgcagacccaggacgaacgattcgacgccctatgcgtcaccgccatcgacgacaccgaccgcaccaaccgtcaggtgcaggccgacggtcagatcaaatccggcgcacgcggccagcacggcaccaaagaccgcgcccaggtcatcggattcgtcaacgaaacctacctcaacgcgctcgcagcgcaggtcgacgccgcccgcaacgcgctcagccaagccgacaccgactacacggccgccaaaacacagtccgataacctccaccgcgaactcgaactggccaaccagctcgcctacacgtcctgggagcgcatcgacatcgccggcgcgcaacggaccatcacggacacgcaggacgccatcgcatccatcaaaaacgatcccaagctcgccgaactcgccaaacagcgcgacgaactgaacgccgaactcgaccgtgtggaacgccagcgcatcgaatccgaccaggccgcggcccgcgccggcagcgccgtcgaagcggcgctcatctggctgcgcgaccatgccgacaccggcacgacggacgccgccggtgccaccgccgacaatgacgatgacgccgcgtccggcccgctgccggacgaagtcacggcggcgctcgccgaatcctacgacaaccgattcgccggactggcggacgccgccatgcgcgcgcacatgatcatcggcgcgggcgcggcaggaacgcaggcgccgggggagagcttccccgaacgcaccatcgccggcatcggcaaggacatggcctcccgcatcaacctgctgaacggccaggccgatgccgcacgcaccggcgtcgaatcgaaaatgagcacctacatcgcgctctacgcggccgacgatgattcgctgaccgccagcgtggaggactaccggtactatctcgacgaactcgccagcctcacccagctggccgcggttgccgccaccgacgccgaataccggcgctgcctcgaacagctgctcaggagcttcctgaccatcaaacgcgccatcgacacggatgccagcgacatccacgaccagcttgaccgcatcaacgccatgctcaaaggccagcagttcggtcccaagcacggcagcctgtccctgcacgcggacgtgcgccgtcccgagcgcaccttctgggcgcagttcatccgcgtcatcggcaccctgaacgattggaaatccgccgacgtcaacgattccgacgcctcgcgcaaggctttcgcggcctgcgcgccgatggtcgggctgctgcgcgccgaactcgcgcaggtcaaggacgcgaacggcgtgaaaagctacggcgcccgcaacctcgacccgcgttgccgctcgtccttctacgccatcgtgcatcatgccgacggcccggatgaacgcatcacctccaccggcggccgttcgggcggcgccttgcaggagctcacctcattcgtatacggcgcggcgctcatctacctgctcggcggcggcctgaccagcgagccctcgtacaccacgctgttcctcgacgaggcgctcatcaaggccgacggccgttacacgcagcgcgccctcacggtgctgccgcgcctcggattccaggtcatcgtctccgccccggaaagcaagaccggcgaaatcctcgaggtctccaccaaggcctacgtgacctacaaggaccctgacaccggcctcacctccctgcgcgaggccgtgctgcatcagaatgacatggacgatgaatcatcgtcggatatattgaaggatgacggggttgccgaatga

SEQ ID NO: 44764 - DNA, 1185 bp, Bifidobacterium longum subsp. longum 1-5B; identical to SEQ ID NO: 41652

SEQ ID NO: 44765 - DNA, 1626 bp, Bifidobacterium longum subsp. infantis EK3
gtggccgatgtgatgcgggagctggaacggctgcgaccggtgtatgagacgggcgtcctgcggttgctgttgcgccagaacgcgatgctgtacgtgtcgctgctgcgttccacgttcgacccgctcaccggcgagctgccgcgcgagaccgtggaggagcggttcgcgcaaagtctgaacgctctggccgacgccggcgaatatgctccgcgcgaggaccagaccttcgccgaggccgctcatcagatcctcgccgatctgacccgtgaaggcgaaggcgactacgcctggctcgccaactcgcatgatgcggcctcacaccgattcctctaccgtttgacggcccgtgcccaccgcgccatcgaggcgctgagcaggctcgaagacgaatcacgcgccctgtccggcgcgcaggccaacagcatcatcatggaaatcgagcacgcgcgcatgcagctgaccgccgaccccggcgagcgcatcaaactcctcaaccgtgaaatcaaggaacgcaagcacgagatcaaacgcatccaacaaggcaagcagcatgccacgctgagcgaagcccaagtggaggacgtgatcgccgtgatccacaacacgctgcgcggcgtgcccatcgacctgcgcgaactcgtgctcgacgagcgggacaacggcgacgccttgcgccggcgcatgcagaccggcgacgtcagcgtggacgagaacctgacccgctaccacgacgaataccgccgctcgttcagcgaatcggacagcggccgccgcttcgaggacgccttccaggtgatcatcaccgacgagggccgccagcaaatcgacgaagccctgcgcgccatcgccaaaaccccgtatctggccggcgaatccggcgtgctgctcggccagatccgcgacgaactggcccgcatctacgacggcatcgaggccgtgcgtcgtcagatgcgcgtctccgacgaggcgatcagccggctcgtgcgccagcaaaccgacactcgctaccgtacgatgctcacccgcttgaaccgactgtacgcgcgcctcaacgcggatgcgaaaacccatatgggagacgcctcgcgcccgtgcgacacggccaccgcggacgcgctgttcgcgccattgccgatgcgcccggccaaatccatgacccgcgccaccgcacccggcctgagcgacctcgccgccgaagccccgcaggcgactccggtggccgatctgcgggatatggtcaacagcggcggcccccgactcctgcgcatggtcagcctcatccggcgcaacccggtgaccgttgacaggtccgatgacaggtccaacgcaaccctcgtggacatcgccgccagcttcaaccggctgcccgaaagcgaacgccgcgaaagcgagatcgtcggcttcctgggcgggctgggagccgtaagcggcagcgccatcgctgacgagccgtccactgacggcgtcggcatcgacagcgacatcgccactgagccggccccggcgcagcgcggcgataccgcgacctggcattgcgtatcgatcgacggcgagccccggcactggatcactagaccggtgctggccgacatggacgagctgaacatcattgtggaggaaggatga

SEQ ID NO: 44766 - DNA, 663 bp, Bifidobacterium longum subsp. infantis EK3
atgaccgtggccgaggaacacgaggaacatatggacgccaacccgtacgccctgttcgaaggcgacaccggcgacatgccggccgaggcacgcatggccgccatcgccctcaaacgcgaccgctatatcagcgggcccacctacgacaccgtgctcgacaaccgcgacgccgtcgtacgctccctgaacaacgacctgctcgacttggtgatcaacgaacgctaccgcatcatgtacgccacgcccgtggccggcgacgacgtgaccctgcgctcgctcaaaacccgcgtcagcctcaaacgcgaggaggccgcgctgctcgccttcctgcgcatccgcgtcctcgaatacgagaacgtgcacgccgaccccgccgactggctcgtcagctttgaggagatccgcgccgcgctcgccaccggcgccggctatctggccgcccgcaacgacgaggaaggcgtggcaaagcagatcggcgccatcgtctccgcgatgatcacctacgggtatttggtgcgcctggacgacgaagccatgtaccagatcacgccgctcgtgcccgtggtgctcgaccgcgaactggccgacacctggctcgacgtcgtggaacacggcgacggcgacacggaagatgacgatgacgacgagaagggagccgaatga

SEQ ID NO: 44767 - DNA, 312 bp, Bifidobacterium longum subsp. infantis EK3
atgtacgacatcgaaccggcatggccatttcccgtgccggtgggattgccggaccaagcatttttggaaaccaatgcgattgcagtgcatgacaacaacaatgagatacggcaatgggcaagcaagaatggttgcgaaatcataaccaagcatcgcaccataggcacctctgtcgagttgatctccaaagtcgtcgatcctgacgaatcaatagccatgcgtgtggttggtcgtacgctggcggcggaatatcgcgaagcgcaccgtcgcacagattccactgacaggattcagcggcaaatggctgaatga

SEQ ID NO: 44768 - DNA, 1632 bp, Bifidobacterium longum subsp. longum EK13
gtggccgatgtgatgcgggagctggaacggctgcgaccggtgtatgagacgggcgtcctgcggttgctgttgcgccagaacgcgatgctgtacgtgtcgctgctgcgttccacgttcgacccgctcaccggcgagctgccgcgcgagaccgtggaggagcggttcgcgcaaagtctgagcagtctggccgacgccggcgagtatgcgccgcgcgaggaccagaccttcgccgaggccgcccatcagatcctcgccgacctgacccgtgaaggcgaaggcgactacgcctggctcgccaactcgcatgatgcggcctcacaccgattcctctaccgtttgacggcccgcgcccaccgcgccatcgaggcgctgagcaggctcgaagacgaatcacgcgccctgtccggcgcgcaggccaacagcatcatcatggaaatcgagcacgcgcgcatgcagctgaccgccgaccccggcgagcgcatcaaactcctcaaccgtgaaatcaaggaacgcaagcacgagatcaaacgcatccaacagggcaagcagcatgccacgctgagcgaagcccaggtggaggacgtgatcgccgtgatccacaacacgctgcgcggcgtgcccatcgacctgcgcgaactcgtgctcgacgagcgggacaacggcgacgccttgcgtcggcgcatgcaggccggcgacatcagcgtggacgagaacctgacccgctaccacgatgaataccgccgctcgttccgcgaatcagacagcggccgccgcttcgaggacgccttccaggtgatcatcaccgacgagggccgccagcaaatcgacgaagccctgcgcgccatcgccaaaaccccgtatctggccggcgaatccggcgtgctgctcggccagatccgcgacgaactggcccgcatctacgacggcatcgaagccgtgcgccgccagatgcgcgtctccgacgaggcgatcagccggctcgtgcgccagcaaaccgacactcgctaccgtacgatgctcacccgcttgaaccgactgtacgcgcgcctcaacgcggatgcgaaaacccatatgggagacgcctcgcgcccgtacgacacggccacctcggacgcgctgttcgcgccattgccgatgcgcccggccaaatccatgacccgcgccaccgcacccggcctgagcgacctcgccgccgaagccccgcagtcgactccggtggccgatctgcgggacatggtcaacagcggcggccctcgactcctgcgcatggtcagcctcatccggcgcaacccggtgaccgttgacaggtccgatgacaggcccggcgcaaccctcgtggacatcgccgccagcttcaaccggctgcccgaaagcgaacgccgcgaaagcgagatcgtcggcttcctgggcgggctgggagccgtaagcggcaacgccatcgccgacgagccgtccactgacggcgtcggcgtcggggtcgacagcgacatcgccaccgagccggctccggcgcagcgcggcgatactgcgacctggcattgcgtatcgatcgacggcgagccccggaactggatcactagaccggtgctggccgacatggacgagctgagcatcattgtggaggaaggatga

SEQ ID NO: 44769 - DNA, 675 bp, Bifidobacterium longum subsp. longum EK13; identical to SEQ ID NO: 41629

SEQ ID NO: 44770 - DNA, 3549 bp, Bifidobacterium longum subsp. longum EK13; identical to SEQ ID NO: 44755

SEQ ID NO: 44771 - DNA, 1185 bp, Bifidobacterium longum subsp. longum EK13
gtggccggcatgaaagacatcgctgcgatcaccacatgcgtgaagaaacatatgcgttcacatatgtacgacatcgaaccggcatggccatttcccgtgccggtgggattgccggaccaagcatttttggaaaccaatgcgattgcggtgcatgacaacaacaatgagatacggcaatgggcaagcaagaatggttgcgaaatcataaccaagcatcgcaccataggcacctctgtcgagctgatctccaaagtcgtcgttcctgacgaatcaatagccatgcgtgtggttggtcgtacgctggcggcggaatgtcgcgaagcgcgccgccgcatagcatgtctggttgctgcttgtgacgttgctccggaaacaatcgaatcggccgctcgcatgacaggccatgaacagcctgacgacttcgatctgcttgtcagcgcagttcgatatttcaggcatcatgatgtgaccggtatgacgccgcgacagattccactgacaggattcagcggcaaatggctgaatgagtcaaaaaccaatcgtcgtaaggccatttgccgactgctcggtgtcgaaacgttgggtctgtcaaaacggccgaccgaactgcggttccgttatctcgatccggtccgcgacgatgctgagctcgaacgcatcatatggtgtccgtgggaaggcgaagcgttatccggcattaaatatgctgtcatcgttgagaacaaagacacgtatcagactatgccgccgattgcgcagggcatctgcatatggggttctggtcgcgctgtaagcgatgctgtacctgcggttcctgcactgcgtgacatgcgtatcgtgtattggggtgatatggatgcggatggactggaaatactttcgacattacgtgaatcaagtatcgaatgcgactccatcctgatggattgcgatgcatacgatcggtaccacagatttggtaccgatcgtactgaacgcagcgcgaagattgctatgcgggagcctaagccgacgcccggccttcaatcggcggagcgacgtctttatgaacgactgtgtgctgacaaaacaatcgcttatcggcgtatcgaacaggaacgcattcccatgcgtgatgcagttgacgaattacgcaagcttggcatccccgtggagtccattgaaaatcaggatttgccgatttag

SEQ ID NO: 44772 - DNA, 1626 bp, Bifidobacterium longum
gtggccgatgtgatgcgggagctggaacggctgcgaccggtgtatgagacgggcgtcctgcggttgctgttgcgccagaacgcgatgctgtacgtgtcgctgctgcgttccacgttcgacccgctcaccggcgagctgccgcgcgagaccgtggaggagcggttcgcgcaaagtctgaacgctctggccgacgccggcgaatatgctccgcgcgaggaccagaccttcgccgaggccgctcatcagatcctcgccgatctgacccgtgaaggcgaaggcgactacgcctggctcgccaactcgcatgatgcggcctcacaccgattcctctaccgtttgacggcccgtgcccaccgcgccatcgaggcgctgagcaggctcgaagacgaatcacgcgccctgtccggcgcgcaggccaacagcatcatcatggaaatcgagcacgcgcgcatgcaactgaccgccgaccccggcgagcgcatcaaactcctcaaccgtgaaatcaaggaacgcaagcacgagattaaacgcatccaacaaggcaagcagcatgccacgctgagcgaagcccaggtggaggacgtgatcgccgtgatccacaacacgctgcgcggcgtgcccatcgacctgcgcgaactcgtgctcgacgagcgggacaacggcgacgccttgcgccggcgcatgcaggccggcgacatcagcgtggacgagaacctgacccgctaccacgatgaataccgccgctcgttcagcgaatcggacagcggccgccgcttcgaggacgccttccaggtgatcatcaccgacgagggccgccagcaaatcgacgaagccctgcgcgccatcgccaaaaccccgtatctggccggcgaatccggcgtgctgctcggccagatccgcgacgaactggcccgcatctacgacggcatcgaagccgtgcgccgccagatgcgcgtctccgacgaggcgatcagccggctcgtgcgccagcaaaccgacactcgctaccgtacgatgctcacccgcttgaaccgactgtacgcgcgcctcaacgcggatgcgaaaacccatatgggagacgcctcgcgcccgtacgacacggccaccgcggacgcgctgttcgcgccattgccgatgcgcccggccaaatccatgacccgcgccaccgcacccggcctgagcgacctcgccgccgaagccccgcaggcgactccggtggccgatctgcgggatatggtcaacagcggcggcccccgactcctgcgcatggtcagcctcatccggcgcaacccggtgaccgttgacaggtccgatgacaggtccaacgcaaccctcgtggacatcgccgccagcttcaaccggctgcccgaaagcgaacgccgcgaaagcgagatcgtcggcttcctgggcgggctgggagccgcaagcggcagcgccatcgccgacgagccgtccactgacggcgtcggcatcgacagcgacatcgccactgagccggccccggcgcagcgcggcgataccgcgacctggcattgcgtatcgatcgacggcgagccccggaactggatcactagaccggtgctggccgacatggacgagctgaacatcattgtggaggaaggatga

SEQ ID NO: 44773 - DNA, 663 bp, Bifidobacterium longum; identical to SEQ ID NO: 42025

SEQ ID NO: 44774 - DNA, 3555 bp, Bifidobacterium longum; identical to SEQ ID NO: 42026

SEQ ID NO: 44775 - DNA, 1521 bp, Neorhizobium galegae bv. orientalis str. HAMBI 540
atgccattattcaagtatcttcatgacgacgcatttttgattttttcgcgtaagcaccgttatctctacgaagagtcgctgcttgaagtatatgaccgttgcttctcgacagggtcaaccttcccgacgcgccaggaactggtccatgcgatctatgatgtcgttggccgacggccggatttgcttctggatgcagatgatctcatcgagggcctgccggaggtcgtttcgaaggggcgccgcaggttgaaatttgccggaactggcggtgagaccggggatcgagctctgaaggccgcgcaacaggtctatctgggtctcgttcgcaccggctggctggaggaggaagaatatggcctgaagatcaccgtcgatatgccgatgggagcgctcctagtcgttcagcggctttcgagcttgaagtctgacgtctcgcagcggttcggcggtctcgtggtccatatcaagaccagtctcgatctggtcgaaaatctttcgatcaaaaatcccgataaagcgaggtcgagtgccgtatatgcattgcgcgaagcgcgagttcaggccgaccagttcgtgaagacgctgcgggccatcttatcggatctccggcgtattcgcaaagcgctggtggagtcggaaaaccttcgccagaagatggacacctatttcgaggaattcatcggcgaactgatcctgaaggattttcaggcgatcctcacctttaatcacccctatcgttttcgcgaccagatcgtgacgacagcccgccggatttcctatgcgccggacctccttgctgttgttgcagaggggtatatcgaaatcgggatcacgtccgacatgcagcaggcccgtgatgaggcggtcagcgatctcctgtccatcgaaaggacgttcgataccgtcggagagatgttcgaccgtatcgcacaatttcgtcgggcgctggaaatgcggctcaagaacacggtgaaatacgctgaacagggagaacgcgggctttcttcacgggcaagggcactggtggcacgcatggaaacgctgttgacagccgagcctgatcattatgtggggccgaccgttccttgcgaggttgcgcgaatttttgtgccttggtcgcaaaaacagcttgcgcagcaaaggcgggcgaggtcgccaatcgaagcaaaaccgcttgccaagcgcccttatgatccgatctatgaactccgaaaacgcatgcgggcagactatctcgatcgaatttctccatcggctgaacgcgtcagccagtttcttgcgcgcatatcatcccgctatcacaccatcgaagcacgatttgtcgagcttcgaaatatcgacgatttcctggccttcgatgcggctcggcgttatgcgctgacccgcgatgtccccagccccgtttctgacgaattcgagcttgagcatctgcccgagagcgaaccgcatgactgcgaatggcttcgctgcagcaatttctccattcgccgtctgggcgatccttcgcgtcgggaggcctga

SEQ ID NO: 44776 - DNA, 690 bp, Neorhizobium galegae bv. orientalis str. HAMBI 540
atgttgagcgagttcgagcaggtcgaggcgacttatggtatcgacaaggcggccgacctgaggaaggcatgtcgctatctgttgcgaaaccagttcgcctattccggagatcgcggtgccgctaccgtctataacaccctgatcgacaatcgcttccgacgaattatcgacgggttcttcgatagcataggttatcgcgtgcataaaaacgcggaggagcagtgggtcggtatcctcttcgatgatgacgatccttcctccgttccgaaaatgcgactcgacgagacgatcgtggtgctggtgctgggcagtcactggcaggaggacgcggatgtcggcaacttgcttgatcgagcgactgcggtcaccaccgtcaacgtgcttcatgaacgctacagggacatgctgcagaatacgggcaagcccgcaatcacggccggccgtttcctcgatttgctcaaggaggtcgcggttcgcaatctcatctcgatcggagacttcgattacgacgctcaggatcgggaggttgtgatacggccgatgatcaagttcgtcagcggggccgatgttctcgcacgccttgaaagctatgtgacgacggaggaacggggtatgcgcacgcgtgcgatgccggccgtcggcgagctgcttcgcgccgatgcctctgccgcaaaaggtgatactccatga

SEQ ID NO: 44777 - DNA, 3462 bp, Neorhizobium galegae bv. orientalis str. HAMBI 540
atgatggaattgcggcgtatcacattagtcaactggcatctgttcgatgtcgaggatatcgaagttcagggcaatttcggcattcttggcgagaaccggtccgggaagtcgacgatcctcgacatgatacaggtcgttctgtccggggcgagccgaagttatctgagactgaacgccgtcgctggggaggggagcaaggcgcgctcggcatcgaagcgcaccgtgctcagctactgcctgggaacgctgaatgacggcgacgtccgccgccccgagacgctgacctacatagcgcttggtttcgaggatcaagaaaagcagcagcctcccatcacaattgggcttgccatcgaagcacggcaaaccgacgctgcggaaacgattctcgggcgcttcgtggtcatcggcaagctgctgacgacggcggactttacggacaagcgggctgacggcatttatgccacgcagtgggatgaggtgaaggcccggatcattgcgtccgtcggcgacgtaaattttgtcaatcatcgcgacaaggcaatcgactttgtccgcgagtatatgcgccggctggtgccaagccttcccaatgccgagcagagcgcttccgcgctgttaaaagcggtcgtgaacgcgatgacgctcaatcagggatattccgcgactgagttcgtccgacggttcatccttgaagacaaccccatcaacatccgcgatttgcgtagttcgatcgaaacctatcggagcgtaagcgcgacgatcgtgaccttgcgcgaaaagctcgaggctctcaaggagctgggagggttcatcgctgccttcgaggagagtttgggccagaaggacctggagaattggttggcgcgtcgggcatggtggcttgcttcccgcgcggaaaatcgggccatcaaagagcggattgccgaagccaggcgctttatcgacgccgagaaagaggacaggggcttggcgatcgaggggatcaaggatgccgaacaagaaatcgagcggctaaggaaagcgattgccacccacgaagcacggtccggacgcgatcagtggctggaggtcctaaagagcgtcacggcggacaacgatcgcctgaagaaggaggtcgacaggaggcgcaggtcggcgatcgagctcgtcgacttgacacaggtgctcgacgataccggcttcatgaaggcttattgcgcactggtcgcagggccagatggcaaagctgatcgcaaagctatgcgagatgccgagcagaatttccgcacccatgtcgtcgtcaccgtggagacggtagagagacgtcgtcgggagacggcagcgcaaatcgtgctgctgacaaaggaaatcacgggtattcgccaggtgctggacgaagtggatgagcggggctctgccgcatatctctcgcgtgagacgaaactcctgctgcggcggctcgaaagccgcggcatggatgccaggccattttgcgacttgctcgaagttgccgatgcgagttggaccgctgcggcagaggcgttgctgggtcgcgatcgagaagcagtgttcgttgaacgacgcaatattcgtgaagcgacagcgcttttccgcgaagggcgccgggattttcaaggtgcctcccttgttagtctgaacaaactcgacgaattccgcgatgcgcctcgacagggaacattcccagcgctcttccggtccgccgatcccgacgctcgtgcctttcttcagcgccgatatggcaatgtgcgcctcgcgttgacgctcgaggagttcaaccagccggggcgcgccatcatgcaggatggcctctatgacgatgggcttgtgcgtagccacagagcggtcaatccgcgcgatcacaagatcggcagggcagcgcaggcggatcatctcatcaacctgagggaagattttgctcaaaaggcagacgttttgtcaggcctgcagcgcgaagagaaacttctgacgcatgccctggcagcgcttgatttgctgaaacggcaggatacggaccgactggcggacatgctcgacagcatcgacgattgtgcggaacgcatgcgggatgcgcaagagcgagtcgcggccatcgacgcggcgggcgacgatgggctcaaagaacggctccgcgcccagaaggcgttccaggatcgcaaaaaagaggaactaaggacgatcgacgagcgctcgcgcaagtatcaggtcgatgtagaagtgggtgagcgagccttgaagagcggcgagggaacggaaggttcggctatgaacctatctattgccaaagcccgctacggcactcagcgcagattgtaccagtatccagaaggcagcggcgcttaccgtcagaggctggaggcactaaggcgacgatcccacgattccgggacaatgggccaatccgctcgaaacgaagctgtagcgcatcgcaaacttggtcaacaagcggccgaggcagctgaccgcgcagccgaccgaaaccgtcgcgcggaactcgatgcgcgccgtgccctccatgactatttcaataaccccaagttcggcgtgagttcacaggtcgggcccgagagcgaattgctggccgacataaaaccctggatggacctcttgatcgaggacatcgagagaaacgaattaaggcgctacgaagacaaggcgaaggaggcatcggagcgggcgtccgtcctattccgcggtgagttcgtgaacgcacttaacacgcgtgtttcgaagatggagagggacatagaagcgctcaaccgcagcctcagggggcaccccttccacaatgaaatctattcgtttcacaggactgcagaggcccagttccagcctatcctgaagattatcgacatcagtcggatctcggacgaagcgctcgatacccttttcaagcccaatgttcccgatgattttcaacacaaggatacgatcaaggctgtcgagcaattgctggaagatccggacaaggatgtctcagcctttgaagactatcggaacttttatgccttcgaaatccacatggaggatgttcacaccaaagctcggacccggtgggagacgcggcggaataccggatctggtgccgagcagcaggtaccgctctatgttgccatcggcgcttcgctcgcagccgtgtacggcagtgccgtttcgcatcggggccagaagggcatgtcgccggcactgttcgacgaagccttttccaagatggatggcaaaaatcaacgggcgatgatgtctttttatgcagatctcggacttcaggtcgttatcgccgccccactggaaaagaagcctgccataatcggttacatgcacagcctggtcgagatcgaccgcatcaacgaacaatccttcgccaacgtcgtctatatcggtaaacgcgccagagacgaaattcttgcgatgaatccggaaacgctgagtgatgccgacatcgccgcaaggatggcggcggagtaa

SEQ ID NO: 44778 - DNA, 1182 bp, Neorhizobium galegae bv. orientalis str. HAMBI 540
gtggcacgcggtcgcaagttcaccatcgcccaagatttgctgcaggatttgctcgatcgtttcgaggacggcacagcccagcccgtcggttatccagatcatggcggttttgccgatattaccgccagcgatgtttttatgaggaagatcggcgaggcagaacgccgaggcggcgtcgcacttgtttacggttccggtcggaggcgcggagaactgaaactggtgaggttgaccgatgcgcggctgctttacgaatatctcgaccgcacacccagccgccagacggcattgaccgttggagaggaagtgctcggcggattgagcatccaccctgccattcgcgacgttgcgttctcggcggtcgaggcatggtcgcgaaatcgcaaatggatcaatattggcgtcgagagtgcggcctccatgcgaaatgcggtcatcctggctcaggcgattgtggagaagcgccacctcgatctggattatcgcactttctccagaaggatcgtcgcggatagcaaagcgcttgaaaaattggagggcgctgtcctgcggttggtcggggccgtcgttgacgtccctcctgcaagcagtgcgcgggcggctttcgcgacccttggtctagagcgatttagccctccgcttttgttgtccggaaggttcctgctcgacggcatctctgtcggggcatcgctctcctatctgggcatcccgccgaccgagatgatgcggataagcttcagcaggcagccggactacgttctgacggtcgagaattttgccagcttcaaccggcatgtcctagaggcggacccgaatggatcgggtctcacgctcttcgtcggtgggtatccttctctagcggctcaaaaagcgatcgcggtagttgcgtcaatgctgcctgataccgtgccattctttcattggtccgatatcgatgcggacggtacctggatcttcaggacaatcgaacgcgcgcttgagcgcagattgcgaccgcatcttatgtcccgcgaacttgcggaggcgttcggtgtagcttcgataggggcttcgaagttgcgtcgtggagaggcagcgggctcgatgatttccaaccttgtggactatcttgcccagccagaggcgaagatcatggagcaggaacaggtcgatccccaaattccaaacattgtcgcaacgtag

SEQ ID NO: 44779 - DNA, 1530 bp, Sphingobium yanoikuyae
atgctgttcggccaactccattccgatatcttcgcgctgttcgccgggtcgaaccgctttctctacgagcgcgtgctgatcggcctctatgaaggcttctaccggtccgacctgcatttcccgacccagggcgaggtcgtccagctgatctacacgctgctgggcgacaatgcggagctgtggcgcgaggatgaaagcccggtggtgctggacaagctggccgcgcgaccgggccgccgcgtgcgccggcgcaagctggaagccgccgacgcgcaggcgaccagcgcggcgatgatgcgcgcccggcatatctacaaccgactgcaggcaaccggctggatcgaggaaagccgctatggcctgaaggtcacggtcgacatgccggccggcgccatgcgcctggccgaatttctctgcagcttgcgcgaaggcctgtccgaccagcttggcggccttgtcatccaggtgaagaacgagctggaagccctgcagcgcaatgcgcgggaaaatgcgcccggcctgcacaaggcggcgcgcgacgccgccagcttcggccgctatctgcgcagcgtgctgagcgcgctgcgcgacatcgacaagcgggtggtggaaagcgacagcgtcggccgccggctgcgccattatttcgaggatttcgtcgagaagctgctgctgcaggattatgcggccatctcgaccacttcccacccctatcgcttccgccatcgcatcttcaccgcgctcgacgcgatcgaggattcgatcgccgacgtcgccgccatcgccgaagcctatcatgaagcccggctggcgcccgatccgtccgccgcccgtgatctggtctatgacgacctgcacaaggtgcggcgcgtgttcgaccagatagaggaggctttcgaacgcatccagcagcatcgcagccggctggaaacgcggctgcgcaacaccgttcgctatgccggacggcgcggcaacagctttctccagcgcagcgagccgatgctgctgcaactcgacaggctgctcgcgcacacggatggacaggatatggcgccgtccatgtccggcctgctggaaccgcgccggttctactggtcccccgccctgctcgcccggccgcgcacctatcgttcgacggtttcgggcggcctgctggtcctgccgccgcccgatcccctgcgcgaatggcgcaagcgcctggaccgggactatctggcccgccttgccgtcacgcccgaacaggtaagccgcttcctcgaacggcgcgtggcgcccttcggatcgggcgaggccagccgcttcgcgatcgagacggtcgatgatttcctcacgctcgaagccctgcgcctgtccgtgctggccgccgatgccgacggccggggcaatgccatcgccaaccatctggcaccccatttccgcttctcggtcgataccggatcgaccatcgacaatgactggctgcactgcgcgggcttcaccgtctcgcgcatcggcgacgccgtgaccccagagatacaagatgctcagtga

SEQ ID NO: 44780 - DNA, 669 bp, Sphingobium yanoikuyae
atgctcagtgaatttcagaccctggaggcgcgcgatccgcgccggatgcaccgcgtgacccaggcgatcagccagttgctgcgccatcagttcctgcatgtgcaggatcgcggctcatcggcgctgctcgaagtcctgctccgccccgatgtcgagcggctggtggcggattatttcgaagtcgccggctatcggctggtggtgcgcgaaagcgagggctgggccggcatcctgcccgacaccgaacagatcggccatccgcgcatgcggatcgacgaaacgctggtgctgctgctgttccgccgattgtgggaagaaggcatccaggaaggcgatgtcgaacgctatggcagcgtgatggtgacgctcaacgccgcctatgacgcctatcaggacatggtcgcccgcgcccgccgcgcgacgctgggcatcaacgagttcaaggcactggtcaccgcgctcgaccgccgggcgatcgtccatatgggcgacatcgacgaagagctggaggacatgccgatcaccatccgcgcgctgatcgccaccgtcgcgggcgaggagttcatggcccatctcgaacaattgctggccggcggcgactatcaggaaagcgagacggaggagcccgtcatcgacctggatgacgccgacgaggaggaggtcgcatga

SEQ ID NO: 44781 - DNA, 3444 bp, Sphingobium yanoikuyae
atgatgcagcttgcccatatcgcactggtgcaatggcatctgttcggccgtgaagacctggccgtcggcggcgacaccgccgtgctgggccagaaccgctccggcaagtcgacgctgatcgacctcatccaggcggtgatgaccggcggttcgcggcgctggtatcagttcaatcgttccgccggcgaaaccggtagccgcaagtcggaacgcacgctgcgcggctattgcctcggccagctcaacgaacatgaatttctgcgccaggaatccgtcacccacatcgtgctgacgttcgacgatcccgacggcctgcgcccaccggtgagcgtgggcctgtgcgtcgaggcatccgcgatcgaggatgcacaggtggtcggccgctatatcgcgcccggcgtgcgagtggataccgacctgctgatcgagcatctggatggcgggcagcagcgctcggcaccctggagtctggtgcgcgaacggctggagcaggcctgcgcagcggccggcacccagctcattcgccccgacggcccgcgcaaccatatccgcgaatatatgcgccagctgttcaccggccggcgccacagcgatccggatcgcttcatccgcgccttcgtcatggccctgtcgttcgaggacatgcgttcggtcgaaggcttcgtgcataatttcctgctcgcccggaacgacatcgacatcggcgaactgcgcgagggcatccagcgctatcgcgacatccagaaggatgtgcatgagctggaacggcggctcgacgcgctgcgggcgctggccgaactcgtgtcccgcttcgtcaccttgctggagcgggaggatgtcgcccgtggcaccgcccgcctcgccgccatgatcgaggcgggcgccgcgctgatcgccaatctgcgcgaacggcgcgacacgctggcggaactggacgacatccagcacgacatcggccgctgcgatgcggagatcgcggcactgggcgatcggcaggacagcctgctcgcccaatccgtggcggagggcgccgccggcaagcgggccgtggtcgccagcgaactcaaggccgtggacctggcccgcaccggcgtggtgcaacggctcgaagcccgtttccgcgcggccgcgctcggcgccagcctgctcgaccatcgcgagcggctcgcgcccctgaagctcggcgccctgttccaggcgctggaggccctgcggcagcagagcgacgggctggagccgccgacatggccgcgcgatccgctggcgatggaggagctgatcgccagcgcccgccgcagcgccatcgatagcatcgccaagatccaggaacggcgtgatcaggcgatcgcccagcggcgcggtctgcaggacgaactggccgatctggtcgcgcgccgcgacaaggcgcgcgccggtcaggtgagcctggacgatcgcaccatccgcctgatggccgcgctggagcgggagaatatgcgcccgcgcacgctctgtcaggtggccgaaatcgtcgatccgcaatggcgcgaagcggccgaggccctgcttgggcgcgaccgcgaggcgatcctggtcgatcccgaacatgcgtcccgcgcggtcgagatcgtgcgcgccaaccgcgacggcttccgcggatgccgggtcatcaacagccgccgcctcgccgaacagccgcccggcttcgacaccgattccctcgccaccgtctttgccagcgacgatcccttggcgatcgccttcctgcgcttccgcaccggccaggtgcgccttgccggcacccaggcggaattgctggccggcggccgcgcgatcatgcgcgatggcgcctataatagcggcatcgtggtcgaggtgctgcgcacccgcgacctcaagatcggccgggccgcggccccgctgatggaggccgaactgctcgcccggatcgaggatcggcaggcgctgatcgccgtccatgccgaaagcgagcggttccacgacgatattcatcgcaagctgctgccgctgatggccgatgtcgatccggccgaccggctcgacctgctggtcgccgcgatcgaccagcatgaggaaagccgcaccgaactgcagcaccggctcgacaagatcgcgatgacggtcgatccggcgatccagcacaatctggacaaggtgaagctgcaactgcgcagcgctaccgaggaaaaggaagaactgatcggccggcgcggccagcttggccaggccaggatcgaaatccagcggcggctggatgcgggcgatgcccagcccggctcctggctctgcctgcgctcgcggcgcgccctgttcaaggatcgggtgcgctcatcggccagcctctcgatcctgcgcgaggcctatcgccagcagcgcggacgtcccctgccccgactggtgcaggagatgatgaagcgcgcggacgaggcccgcgacgcctatcaggcgttgcagggcgaaattcgcgagacgctgggccattaccgcgccgatttcgacaatagcgcgcctattgccctgcccggcgcgattgcgaccgaggtgaagccctggctcgccgccaatatcgcggcgctggaggaaaatgagctgatccagtatcggcgccaggccgacgaagccgccgagcagatcggccagctgttccgcaccgccttcatccatgagctgaacgcccgcttcaacgacctgcgttcggagttggacaacctcacccgcgcgctgcggatgcggccgctccatggcgagatctacacgctccatgcccgtcccaaggaggaatttgccgcgctccaccggctggcgcgcgagagcgagcatgacgaactgaccttcgacgccctctttggccgggccgcgccgcgcgacgccgaacatgcccaggcgctggcggaggtcgaacggctgctgagcgacgagtccctcgatttctcggcctaccaggattaccgcaactatttcaccttcgacctgcgcatggaggatgtgaacaagggccgcaccaccagctatgacaagcgcaagggcacggcgagcggcgcggagcggcaggtgccctattatgtggtgatcggcgcggcgcttgccagcatctatcatggcgcgcgccgtcaatatgagcgggcggaactgggcctgggccttgccgtgttcgacgaggccttcagcaagatggacggccccaaccagcgcacgctgctcgaattttacgacgatatcgggctgcaggtggtgatcgctgcgccatcggaaaagcgcgcggtcgtctatgaaaatctcgacagcgtgatcgacgtgttccgccatggcgacaatgccagcgccgaagccgtccgcatcaagccccatgcccgcacccagatgcgcgccgccaacccgcagcatctcgacgatgccgcgctggccgaacggctcgacctcttcgcgctggacagcgcggaatag

SEQ ID NO: 44782 - DNA, 1383 bp, Salinisphaera hydrothermalis C41B8
gtgatcgtgcgtctctatgaggatcacttctcggcggaagccgaactgcccgagtcgggctattacctcaaacacgatctcgtgccaccgatcgaacgttatctcgcgcatgaggcggactgggccgaggaggagggcattacgcacgacaccccagttaatgtgcgcgcgaacaatacgctcgcttatctcatcgactgcggctggtttgtggaaactcgggtggtgctcaaccgcaccatcgagatgcgcccggacgtcgctcagttcctgcagatgctactcgagttcaccgaacgcggaccgcgcttcatcggcgggaaggtccaggtcatctacggcacgctcaagaacatcgtcgacgacccggccggccaagcagacgccttcttcgagacggccaaactcgtacgcgatctagtcaacggcgtcgcggcgacacgcacccaagtcagcgagctcatgtcgagcctgcgcgatattgacgaggccggcacctacgtcgaagcgttcttcaatagctatatcgagcagatctatattgcggactactcggacctgcgcaccactaaccaccctttacgccggcgtcgcgagattctcgatctagtgctcgaactcaagatcaacgaagaaaaacgggctcaactactgtcctggtatcgccaacagaagtgggggcggctgacgcccgagcaggcgcttgatcgcgacttccggcgctacgacatcttcgaacgtatcgaggagcatctggatcggctcaaccgcgtcgtggctacggctaatcggcaagcgatgtcgtacattcaatacacgatgcgcacacgccagaacttcgatcgggtcatagatcgcagcatcgagatcgtttcgagtgcggcgggcggccacgccgagccggccacgtggatcgaagcgccactggccgccggtatcgggctgagtgaagccactttggccacaccgagtacaccgcgtcggccaccgcaacgccggactctgaaaaagcgcgagatcagcccccgccagatcgcactgaacaatctgcgcaaggcgatgagcgaccaccgccgaaccgatcccgccaccgtgagccactacttggaaatggcgctcggcgacgacgacgaactatcaagcgacgagctgcccatcgagaccgtgaacaacctttgcgtgtttcttaccttgcctcgtgtggccgcactcaatcagggcactactcaaacggtccaccacaccagtggcgttgccggcgggcccacccagcgaagggttgccctgccaggcctggagctggctatcgacgcggataacccaatcgacaacgcatacgtgcgcgcgccgcgcgtcacgatccgtaggactgcccgaaaatga

SEQ ID NO: 44783 - DNA, 708 bp, Salinisphaera hydrothermalis C41B8
atgaaggacaagattcgccactggcgcgacgtactgaccgaccacgatagcactgaagaacaagatttggaggcggctgcttaccggctggtcacggagcaggtgctctacgacagcgagccgcgccagcgtacgcactatcggctagtcaagcagtacgccgcccattttcgtcaggtctgcgaactgctcggcatggaattgcatgtcagcgacaacccagcctactgcgccgcgcgtccgttgagcgcgtccacgatccgactgaccttgaccgagacgctggtcgcactggtgttacgcaagatctatcacctgcatcgccaagctggcgaggatcaggcaggccatgtattcgtgcctttggccgaattcgccgatatctttcaagaaagcactggtcgggcgccgcccacggacaagcgacagatgctcgaacgtcacattgatcgaatgcgtcagttcggcgtcgccaagcgctgtcaagccgacccgcaggatgaccagcctttcggtatcgagatcctgccaggcatcgagttcctgctggacgagcgggcactcgcccagctccaggcgcatgccgccgcccagggtacgaacacacacgagccgcccgatgaaagcgagatgtctgacgaggcctcagatctcgatgacgaatcccatgacggactgattcgagaggccaacgatgaaacgacttag

SEQ ID NO: 44784 - DNA, 3561 bp, Salinisphaera hydrothermalis C41B8
atgaaacgacttagccgcatcaatctcgtgcagttccatgtgtacgagaaagagcagatcgaaatcgccgggaatactgccatcctcggcgacaacggctcgggtaaatcgacgatcctggacgccatacagctggtcatgacaggcgggcacggcaactaccgcagtttcaacgcgcagtcgtcatcctcgtcggcctcgaagcgcacgattcgtagctatttgctcggcacgctggaatccaagagccaagacggcagtgtcgacgaggtcctggtacgcgacgaagccgcttactcttacatcacgctgaccttctgggacaccaagcgcgagacgcctttcaccgccggcatttgcgcatcggccagccaaagccaatccgatcatacggtgcacggcctcttcttgttgcccggcgtggcgctggaagccaatgacctgaccgaatacacagccgccggcgagctgccactcgcctggaaagacttcgaggcacgcgcgaacaagcgctgccgcgatgccggacgcacgcttattgtgaaggatggcgccgaagcctatgtgaaggccctgctcacgcagcttggctcaggccgtgcccgcatcgacgagcgtagctacctacgggcctttaccaaagccctgcagcttcgcgatatcgacggcgtggataagttcgtgcgccaacatatcgtgcccacaggggatatcgacgtagccgagttcggtatccagatccagcagttcaacgaactgcgtgcgctgatcgccagcacccgacaaaacatcgaggaactcggccgcatcgaggaacgctacggccgcgccgagcgagcgattgaaagacatgcatcgctgatgggtctggcagcggaatatgactatgaggcggcggcagaggccgagtccgacgcccaggaccaactcacccttcacgcggacacgttcgaagccgccaataaacacgccgggcaggccgaactcaagctcggcaccatccgaccagagttcgaggctcttgatcaagagtgccgaacacgcccggagttggctgatcgggccaaagatgaaaaggacgccgaacgcgcccgccgcaactgcaagcgaacccaggagcaaatcaacgtccgccttcgcgctcaagccgaagggctcacgcatctggcgcagcacgagagcaacgacgagcatcgcagccgactccgtagggtcgcgcggggtctccacgacgcgcgtaccgatctagagaacaccaatcgcgaccggctgctcgaacatgtcgtggatgcagccggtctgctcaagacttcaatcaagacgctgcgtgccgatctgggcgatgcgacgagtaagcgccaggatgcacaaagccgactcaaggaggcaaaagagcggttggcggccatggagtccagtggcagcctactcggacataacagtagccgcgcggcgaacctgtttcgtgacaaaggcattcccgcttcgccgatctgcagtctgctgcgggtgacggatccggcctggcagccggccatcgaagcctacctgggtggccaactcgaagactttgttgtgcacgacgatcgggaggccgaagcggtgcgtgccatacgcgaagtgcctgcccacgaggccatatacgacgtgcgtgtggcccagccacgacatctgcagcagcatcgcgaccggacacccggccccgatgacgtcgctcgcctgatcgagtccgacaactggatcgcgctcgcctacgtgcgcgcaagcatgcgtaacgtacgcttcgccatcggcgaggcggatctatcacgccacacccgggcactgagtcaggacgggatggtctcctccggcggtggcaccgcccgcaaacgtcttccccccaagggtcagctgcgtatcggtgtccgcgtcgacgaagaggaactcgccgaggcaactcgcgagatatcacgcctccacacgatcttcagcgaggccgaacaagccgaacggaggctctcgcgcctgatcgatcagatcgaaagcggcacatcggatcaggccaaagccgaggtgctccaggatttggaacagttcagcagcgacaccgaggaactgcggctgctcgaagaccggctctcggccgccccatcgcagtcggcacaagagctacgcgaacgtcgcgacgccaagaagaaggagctcgataccgtcgacaagcagcttcaggaagcacagaaagaggcatccgtggccgaagcgaatatcaagcacaccaacgagcgagtccagacgtgcgtctcagcgcgccaagaatgtcagcgtatggtggatcaggctcaggctgaaccattctttgatgcccaactcgccgacagcgaacgtcagcgtatcgacaccgagctcggcaacgtgcaggccccgactcgtccgggcggcgagaccgaccatgccgcgcgggcaagggagctcgcggcccatgcccagggcgtccacgatcgagcggtgaccgaggcgcgagatgaattattgggctacaccgctcgtaccgaaatggactgtccaccgctgcgcacgggctggcgcccggaagctgaagacgccttggatgacgatttttccgccgattcggatgaggcgctgaaatcgtggccaacagcatggcaagcctgtatgcattgggcacgccgcgagaagcaaatcctagagtcctcaaaactggtcgatcagaaggcgcgggccgattcggcgctaaccgaggccaagaatgcgttccgacgcgatatcgcctacaagctcaacgagcaaatgcagctcatgaagacgcgattgcacgaaatgaatcgcatgctcaagagctgcaaacccttttcccaaggcgagcgctaccaattcagttacaaggcccgaccagaacacgccgacctgcgacgctttatcgaacatgttggccaggccggcgaagacgagctgcccttcggcgatgaagaagcgggcgcgtcggcgcatgcggccatggagcgccttatcgagatggccgagcagggcctgctgagcgacgacaccgcgcctacggtgctcaccgactaccgggagttctatgccttcgacctcgaaatccgggtcaatgacaagatcgtgaacctgctgagcaaccgcaccggtggcggctcgggcggcgagcatcgcacgccgttctacgtgatcgccggcgcgtcgctggcccgcgcctaccgcctcgatgaagctgaagatgacggcggcggcctgatgctgctcgacgaagccttctatagcatggatcaacagaactcgaccgcggctgtggagttcctctcccagcgcggtctgcaattgatcatggcggccccggaaaccgatcgcagcaagatcagcgcgacctgcgacacggttatggatatcggacgcgaaggcaccaccccttggatgcacatcacccatgtcaagagtgcggctcgcgagctcttagcgagcgatgatccacaccagcagccggacttgcttgaggtggagacgcgccgcgtcgaaaacgaacaaagtcgtcaaaccactcaatga

SEQ ID NO: 44785 - DNA, 1233 bp, Salinisphaera hydrothermalis C41B8
atgactagccacgcgatcgcgcacaaggctctctcaaaactgctggatgccggcacacgacgccgcatccggacggccgctggcgatacggtagccgcatccgcgatcactgtggtcttcagcgaagccaagctgccggaatatatcgaactggactccagcgaggagctcgaacgggtacatgccgagatccgggaggccgagcgcgccggggcgcttcgtatcgagtgggattctgccgccggacgctttgggcagatcagcaggattgtgctctcgaatatcgaggcgctggcctcgtttctcaacgtcacgccacagtgggtgcatatcgaacgggccatgcagctcagcaccccttggcgtgggcaacccgcagtcgacgcgatccgtgcggcttgggtgcgcaacacgaaggttcgcaacctcggtccgcgcgatgcagagcggctggtcgaggcctgtcgcgtgctggaccgagtccgacaggcgaccgatgccgccgtggagacgccggtccgacggctcagcgccgacatgttcggcgacaccaaacacatcgagaacgccttggtaccgattctcgatgagctcacccgcggcgacgagccgcccgtgagcgaagtcgaagcggtgctaccccgtatcgggctagtgaaacacccgcaaaccttgctgatcggcgggcgcgggacgttggtgctgacaaatggtcagcgcatcacactcacgccaccttacctgggcattgcacccgaccagctggcccggatcgacggcccagccccagaccatgtgctcacaatcgaaaacctcacgacattcaatgaggtcagtcgcggcttgaacgaattcaccgatgcaatggtgatatatacggcggggatgccgtcgccgtcgttacgacgcgctcttcgctgcatcgctaaatgctgcagtaaccacacgcgcttctggcattggggcgatatcgacgagggcggcctgcgaatcgcgaaaatcgttgcggcctcgattgccgaagagtccatgccggaacgcattctcagaccttggctaatggacccatgtcgcttgcccgagacggttcgccaagcccccggtagctatcgtcaaatacgcagaatggtcgcaatggccgaggagctaggttggtgtgaagtggccaccggtatcagagaaatgccaagcatggtcgagcaagaggcaataagcccacggacgccgttctga

SEQ ID NO: 44786 - DNA, 1362 bp, Clostridium celerecrescens
atgatattaatgaatgagataccggaccggttctggggattgttccgttccattaaccggtccacctacatagaagctttgttaaaaatcaatgaggaatatgaatacagcaactactttttaagccgtgaagtctgtatacaggttttagaagaatattttacggcaaaacggctggtcatctggcaggatgagctggaagatgaggcggatgccttagaaccgacagcagtcagggttttaaactggctgttaagggcaggctggctccggaaagtggatgactacgcctccatgacggtcaatatcgtaattccagattatgctgccgtcatgatcgaggcgttttttaagcttacaagcgatgaagaggatgagacccagatttatatccagaacgtttacgcaatccttttctctttaaaaaatgatcccagggccggtgtaagccttttgaatacggcttacatcaatacaaagaggctcaataagactttgcaggacatgcttcacaacatggacaaattctttgcaagcctgttggagaaaaaagcatatggggatcttttgaaagaacatctggaaggatatgtggatgaaatcgtaaaaaagaagtaccatatgttgaaaacttcggataatttctatctttacaaaaatgatattaagcgatggattggctccatgcgggaagatacggaatggctggagcagatgagccaccgcagcggccagaaagtgacggcagcggatattgcggaaaagctggatcagatcgaaagaggatttgacgatatcgaacaccgcattgccaatatggacaaggagcattcccggtatatccgcgctacagttacaaggcttaactatctgttaaatcaggaggacaacatgaaggggcttgttatcaggcttttaaatcatttgtctgaaacagaggatccggatgaggccataaaggatgcgggaggccttatgaatttatcccaggtatccattctctctgaaaaatccctttataaaaaaagaagggccaggacatgttttaaagagaatttgatgccggaggaagagtctgcagagctaaccatggaagagatcctgagtttaaaccgcttaaaaagccgctacagccggaaggaaatcgaaagctatatcgaagctcatctggaaaatggccgtatggaggtaaaggaagatacggttaattctcctgaggagtttgaaaagctgatcctggcctatgattactctaccagaaggaaaagcatgtaccaggtggaggagcaggagacggagctcattgacaacggcagataccgctatccaaagctggtatttgtaaggaggaaagaatcatga

SEQ ID NO: 44787 - DNA, 651 bp, Clostridium celerecrescens
atgacctatgaagaaagtgctggcctcatcagccagattccatattttgacgctttgggacagggagaaaaggaagaggtaagagcaggcttgagacttcttcttcagcagacctttgttctggagcataagtatgataagcgtaccaaccggtttacctataacccggaatttaaaatctgcaacaaacatctggaatttatccgggcctatctggcagtcagcggagtgtctgttctggaaaacagccagctgggcattatttatatccagggagagagcactgtgggggataagcttcccaaactggccactctttatctgctgatcttaaaactgatctacgatgaacagatggcagcagtttctaccagcgtcaacatctacaccacattaagcgagatccatgaaaagctgggaaattaccgattatttaagaaacagccctcaccgacagaaatccgccgggcaattacattgttaaaaaagtatcagattctggaaccccttgatattttagaggacttagatggggacagccgcatgatcatctatccctgtatcaatgtagtattgttcggagatgacgtgcgggccctgttagaagcacttggagaaggagacgaagacgatgacgaaccagaaatttga

SEQ ID NO: 44788 - DNA, 3393 bp, Clostridium celerecrescens
atgacgaaccagaaatttgaagccctgtcccggatactccttaataactggcattacatcagccggaaaaccttatcctttaatcaggagatcaacttctttaccggacattccggcagtggaaagtcaacggtcattgatgccatgcagattctcctttacgccaacaccgatggccggggattctttaataaggcagcgtctgatgactccgaccggagtctgatcgaatatttgcgggggatggtgaatatcggtgaaaacaatgaatttgcctatttgcggaaccagaatttctcaaccaccattgtgcttgaactgaaacgaacggatacgggagaatgccagtgcgttggaattgtctttgacgtggatacgactaccaatgagatatccagaaagttcttctggcataaaggtcctctttgggaaaacggttaccgtaccggttccaggaccatgaccattcaggaagtaactgcttatttgcagaccttataccccaaagaagattattttgcaacctcccacaacgagcggttccgcagacagttgtatgatgtatacttaggcggtcttgattcggaaaaattcccccttttgtttaagcgtgcgattcccttccgcatgaacatcaagctggaggattttgtaaaggaatacatctgcatggagcaggacatccacattgaggacatgcaggaaagcgtcatgcagtacgggcggatgcgaaagaagattgaagacacagttgttgagatcggttatttaaatggaatgagggaaaagttttctgcagttcgtgaaaaagaaggggagattagtaaaaatacatatttcttccgcaagatggaaattctggattatcaggcaaggatccaggcattaacagataagtccaggcttgccagggaggatttagaccgccaggaaaatcagaggacagcgttagaaggacagatggaagatttaaccagacagggaaatgaactgcttggacggatttcttccacgggttatgaggatcttaagaatcagctggactctgcaaaggaattatcaaaccatttaaataaaagctttaccaaatggtctcagacaggagaacggctgaaggaatggatagaggaagaggctacctccaaccagaccatatgggacatcgaagaatttgagaagaataccattgatgaagaaaagttagtccgcctgaaaaaatccattgccgaaatgagaaaggaaaccgaagaagctcaaaaagaggcagaaggaattcttcgggacattcggaaaaaagagcgccagacaagtgaagagctggcccagctaaaggccggtaataaggcataccccaaatatctggaacgtgcacggtctctgatccagcagcggcttttagaagaaaccggcaaggcggtggaggtccatgtgcttgcagatcttctggacatcagagacgagacctggagaaatgcggtggaaggctatctgggcaataataagctgtccctggtagtggctccggcttatgcagaagcagctatggcggcttacggagaactagaccggtctgagtattttaatgtggcagttctggatacagaaaaggtagggcagaattcctatgaagtagtaaaaggcggtcttgctgaggaaattacagtgagagaggcttatttacagccgtacattgacttacttttgggcagggtcgtcaagtgcacgaacttggaagagctgcgccgcagccgcattggagtgacccctgactgtatgctataccatacgttccgcctgcagcatatgaatcccgataattatacgaaatttgcatatatcggcaaggacagcgtcaggagaaggatccggcttctggaaaagaatctggtttctatggaagaggagaaaaagcctcaggaacaggttttaaaggaatgcaaacgtatcttatccatggaagacttaggagaagacacgggcgtttacctggagtggcagcaggatatggaggcctttaaggaaaagggtaaagagatcaggcggctggaacagaagtttgaaaagctgaaggcccaggatgtagaagcgtgggtgaaggaaagggaagccatcttacagctctgtgatagaaagagggcggagcagagtgcagtcgcagagctgatttttggtatcaacagcgagatcgaacgcttccgcagagaatccctgcagctgcaggaagaactggtcgcaaaagaacgggaatttgaaccggatgaggaactggaagccaaggttcatgaaatattggaaagcagagaaaattgccggtacgaccgccttaagaatgaatttttcggagaatgcaggaggtcggaagaagcccgtgatcaggcgttccaggctcttgtaggttccagaggtgagtatgcaagaaaatatcccaatcggaatttttccctgacagcaaaggataatggggaatatgaccgtcttcttgagaccatggagtgcggaaatctggaggaatataaaaagatggccgctgagcaggctaagtctgctgtccttcattttaaggatgactttatgttcaagatccgaagtgccataagggatgctcttttacgtaaagatgagctgaacaagatcatcagcaaactggatttcggcaaggataagtatcagtttgtcattggaaggaataaagggccggatgggagatattatgacatgttcatggataattccctggaggtaaatcccgcctatcttacggataccctggataaccagatgaacttattcactatggagcatgagaaccagtacggggaaatcatcaatgacttaataaatatcttcatcccaccggaaaatgccacaccggaggagatggaagaggccaaacggaacatggataagtatgcggattaccggacgtatctatcctttgatatgcagcagatcatccagaacgaggatgaggtcattaagatccgtttaagcaagatgatcaagaaaaattccggaggcgagggacagaatccgctttacgtagccttattagccagctttgcccaggcttaccggatcagtttatcacctaagatacagagaaatccaacccttcgcctggtggtgcttgatgaggcgttctccaagatggatgcggaaaaggtggcaagttgtattgagctgatcagaggactgggcttccaggctatcatcagcgcaaccaatgacaagatccagaattatgtggaaaacgtagacaagacctttgtgttcgccaatccaaataagaaatctatatccattcaggaatttgagcgggagagttttccggagctgatgcgggagcttgatgaagaggagatggaagataaccttgatttgcaggattcctga

SEQ ID NO: 44789 - DNA, 1494 bp, Xylella fastidiosa
gtgaccgagatggaccatgccaccctgaccaccttgcgtgagcggcaccccgcctggcggttactgacctcaccgcatgcacccctggtcacaagctttctgcaccgcgtgttcgtcgcaacgaacgcgcgcctgctgagcgagaccaagatcacccaggcactggaagacacgctgtatgcgctgcgtgaacacgaaggaccggaggcctacccgaagggcgccctggactacctcaatgactgggccgcacccgacaaaggctggctacgcaagttctacacctcaggcacggatgaagcgcagttcgacctcaccccggccactgaaaaagccatcctctggctgctgtcactcactgaacacacatttgttggcaccgaatcgcgcttgctgacactgtttgcgctgctggaacaaatgagcaccggtaccgagacagacccaatcaagcgcctggacgaactgcgcaagaagcgcgacgcactggacatcgaaatcacccgcgtcctggaagggcatacaccgctgctggacgacaccgcgatcaaagaccgcttccagcaattccagcaactggcgcgtgagctgctgtccgacttccgccaagtgcaagacaacttccgccagctcgaccgcaaggtacgcgagaaaatcgcactgtggaaaggcaccaagggcacgctgctcgacgaaatcatgggcgagcgcgatgccatcagcgattctgaccagggccgcagcttccgcgccttctggaacttcctgctctccagccgacgtcgcgaggaactttccgagcggctgggccaggtactggcgctgcccgcggtggcggcgctgcatccggagccgcgtacccgtcgcatccacgacgactggatagaagccggcgaacaaaccctgcgcaccatcagccaactatcgcagcaattacgccactttgtggaaagccgagcttttctggagaaccgccgcattatggacctgctacacggcattgagcgcaaagcactcggcctgcgcgacatgacaccctctggcacagtgatgtacctggatgcgatcggggcggacattcaactgccgctggagcgccccttattcaccccacgcgcaaagccgcgcctggctgatctggtccttgcggccggtacagacgacatcgacaccacccccttgtttaaccaaattgtgatggacaaagcacgcctgcgcttagccatccaacgcgcactgcgcacccaatcccagatctccctgcgcaccctgttgcaaaccgagccactgcaacagggtttggccgaactggtcgcctacctggagctggcccacaccagcaacagcagtgatccggacggcttgcgcggcatcgtcgacgaaacggtagaagagccgatccgctggcaggccaacaatacagtgggtgaaacagtcacccgcaaggcacgcttaccccgcatcatcttcacgcggcgtgccccctcgcactag

SEQ ID NO: 44790 - DNA, 705 bp, Xylella fastidiosa; identical to SEQ ID NO: 41844

SEQ ID NO: 44791 - DNA, 3435 bp, Xylella fastidiosa
atgcgtgagacctccacactcggcctaaatttcgttgccgatgacaagcgcgtcggcttccggctacagcacctagaagtagtgaactggggcaccttcaacacccgggtgtggtgctacactctgggcgggcgcagcggcctgctcaccggcgacatcggttcgggcaagtccacgctgattgacgcaatcaccaccctgttggtgccagcgcagcgcgtggcctacaacaaggccgctggggccgatgcccgcgaacgctcgttgcgctcctacgtgttgggctactacaagagcgaacgcaacgatgccaccggcaccgctaagcccgtagcactgcgcggtacgtcggactactccgtcatcctcggcgtcttccacaacgtcggctatgacaaggtcatcaccctggcccaggtcttctggctgaaggactcgcaaagccagcctgcccgactgttcgtggtggcagaacgcgcccttggcatcgccacggacttcaacaacttgggcggcgacatcaagaccctacgtaagaagcttcgtggtgcagggtgcgagctgttcgacagcttcccaccctacggggcgtggtttcgccgacgcttcggcatccaacacgagcaagcgttggagctgttccaccagaccgtctcaatgaagtccgtgggcaatctcaccgacttcgtgtgcagccacatgctagaaccctgtgatgtgggcagccgcattgaggcgttgatctgccacttcgacgacctggaccgggcgcatcaagccgtgctcacagccaagcagcaggtgaagttgctcctccccctggtcgacgacggccagaagcaccagacgcagctagccaacattcaaaccttggaagctggacgcgacacactgcggccctacttcgcacagctcaagggtgaactgctgaagcaccgcctggacgcactagcagccgaagcggaccagctagctgtggagatccagcagctgaaagaacagcgcaagaccgcagacagtaaagtcacccaactgcaacaggatctgcgagacaacggcggcgaccgcctggaaacgctggcggcagagatccagcaactggagcaaaccaaggcacaacgccaaaagaagtccgaccgctaccaaacgctactgaccaagattgacgagacagcgccagccgatgcaataggcttcttcacccagcaacagcgctttgcgcaacataccgaggaattaaacgcagccattgcgacgttgcataacgacaagagcgagaaggactttgcgctccgcaatgctcggaaagatcacaacaccctattggcagaaatcaacagcctgcaacagcgccagagcaacatcagcgccatccagatccgcatccgtcatgatctgtgtgcggcattgtccattgatgcggaggaattgcctttcgcgggcgaactcatccaggtgcgtgaggacgcacgcgattgggaaggcgccgccgagcggttgctacacagctttggcctcaccctgctggttccggacgcgcactacaaggctgtcgtcacgtgggtgaaccacaaacagttggatggccgactggtgtatttccatatgcgtccacgtaatacgacgcaggatgcagcgttacatgcgcagtcgctggtacacaaactcatcatcaaaccggagtcaccacactacacgtggctgcaacaggaacttcagcggcgctgcaacgtcgtctgctgtgacaccattgagcagttccatcgtgaggtccgcgccatcacgcaggccggccagatcaaagaccccagtggccgccatgagaaggacgaccgccatcgcattgacgaccgcagccgctacgtcctcggctggagcaatgccgacaagctgcacactttgtacgagcaacggcaacacctggaagacagcatacgcatgttgggagaagacctcggcaccattcagcaggaatgccagaaacaacaggaacggctggatgcactcaacaagctgggggaatacccggactttgcggacatcgactggatgagcctggtccgccagattgccggactcaaagaggaacaggcacagctccaagccacatctaacattttgcaaatcctgcaacagcaactcacagaggcgcagacgcaagtcaagctgctgcatggcaagtgggaaaacgcgttgcgcgaacagggcgaggtcaatagcaaacaaaaaacggcgcagcagatgtggaatcaggcccgtaacgtttgggatgatgcgccactgagccaagcgcagatcgcgctattggcttgctggcgccagcaagcgctgggggagcacctgctatcggtcgaatcttgcgacaaccacgagcagcaagttcgccaatggctacaaaaacgtatcgatgcggagaacgctcacctgagacaactaaatgaccgtattacaggcgccatgcaccgcttcaaagatcagttcaaggccgagaccgtggagatggacgcagacctggcggcgctgccagagtatgaacggatgctcaacggcttgcaggaggacgacctgccccgattcgaggcgcgcttcaaagaactgctgaacgtcaacaccatcaacgagatcgccagctttaacgcccaactcaaccgtgagcgggagacgatcaccgagcgcatcaaggacatcaaccaatcgctgcacggcattgactacaaccaggatcactacatcaaccaatcactgcacggcattgactacaaaagggggcgctacatcacgctgctggcacaacccagcccggacgctgagatccgcgacttccagcaggatctacgggcatgtaccgaaggcacgttgaccggttcggacgatgaacagtattcggacgcgaaattcctccaggtcaagcgcatcattgaccgcttccggggccgtgaagggctgtcggatgccgaccggcgctggacggccaaggtgaccgacgtgcgcaactggtttgtgttttcggccagcgagcgctggcgcgccgatgagagcgagtacgagcactacgccgactcgggcggtaaatctggcggccagaaagaaaagctggcctacaccgtgttggcggcaagcctggcctaccagtttgggctgaagtgggatgaggtgcgttcagaatcgttccgcttcgtgattattgatgaggcgttcgggcgcggctcggacgagtcagccgagtacgggctgcgcctattcgaaaagctcaacctgcaattgttgatcgtgacgccgctgcagaagattcacatcattgagccgttcgtctccagcgtgggattcgtgcacaacaagggcgggtgcgactcgcagctacgctgcctgtcgattgaggagtaccaggcggagaaaaccaatggaagcgggccgggaggcggcaccgccccatga

SEQ ID NO: 44792 - DNA, 1218 bp, Xylella fastidiosa
atgagttggaccacaccagccagtctgtacgcccaggtggaacgcctgtggaagcggggcaacttgctgcgggcgctggtcacggacacccacgccatgacgtggccgcacctcctgaagctgcgggtacccaacgctgcggatctgtccaaccgctttcaggcggtgcgtgattgggtgcaggccatcgctggcaccccgcagattcggatccaatggcgggaatggaagcaccgcgtccaagggacacaacaggttcctgcagccgtctatctggacaccctgcaagacgcgttagctttcatcggtaagacgcatgaagcgctgcagtttgaagtggtgtggcagcagaccgcagccgcgcagccagtgctcctggcgtggctgttacgacgcccgacccaggcgctggaggtggccgaccgctgggaacgtcttttagccgtggtcgcctggcttcaggcgcatcctcgtccaggcgtttacctgcgccaagtggatgtgcccggggtggacagcaaattcattgaggcgcacaaaagcgtgttgaccgagctgctggacttggcgttgccgccagagagtatcgaaacggccgccagcggcgtgcgtcagttcacgcgccgcttcggcttcctcgacaagcctgtgccgatccggtttcgtctgcttgacgccgcgctgcccggcctgccgggctgggcagggctgccggacatcagcctagacgcggctcacttcgcggcactgacgctccctatcacgcgcgtcttcatcatcgagaatgagatcaacttcctcaccttccccaaggtggccggtgcgatcgtcatcttcggcgctggctacggctgggagccgctggcacgcgctgcgtggctgcatgcctgccaactgtactactggggtgacattgatacccacggcttcgccatcctcaaccggctgcgtggctactttgggcacgtgacttctgtgctcatggaccaggacacattgttggcgcatcgcttgtactgggacgaggaatccgagccgacgcgccaggccttggagcacctcaccgcagaagaggctgccgtctacgatgacctgcgatacgatcgccaccagcccaggctgcgcctggagcaggagcggattggctttcgctgggtgtgcgatcggctggcctgcttgctctcaacagcccacgtagcaccgccccaggatgcgtaa

SEQ ID NO: 44793 - DNA, 1497 bp, Klebsiella oxytoca
atggaagaaaacacaaggcagcgtacggaaaaatatatctcagcaaaaaaccagcatccagcctggatacttcttgctacccgccgcgccccgctggtattgagctgcctgaaaacgctgtttgaaaaatcacatgatggtatcccccttgaggaagcgattcagtctcttaccggcattcttgtcgagcacgtgagtcaggaacagtatgacattaatcaggacaatccctctcttcaggccagccgtgaactgcgggaatggattaaacgccgtttaattgtcgaacgggatggccgtgtctttgctaccgatgcgctcgaggtcgcgattacgtttgttgagtcgctggataatcgtttcatgacctctacggcttcccgtttgtccaccgtacagcgagaaattgaaaacctggaaacccggcttaatcctaatccggcaaaccgggttacaaccttacgtcgtcgtattgccgaactagaacgtgaattacaggaagccgaagccgggcatattgaggtgctggaaacgcatcaggcggttgaacatattcgagaggtcttcaacttagcttccagcctgagggctgactttcgtcgtgttgaagactcttggcgcgaggccgaccgtgcgcttcggcaatccattattggtgagcaatatcatcgcggtgatatcgtagaacgcctgctcaacgatcaggacgcgctgcttaatactcccgagggaagagtcttcgacagttttcagcagcaactccgtcaatcctctgaacttaaggcgatgagtgaacgattacgtgtgatccttagccatccgtctgcttccgatgcgcttaaccgtctacagcgtcacgatttgcgctggctggttaaacgcttggtcgatgaatcgcaaaccgtactccaggctcgcgcccgaagcgagcgcgatgtccgcggttttatgaaaaccggtcttgctgctgagcaccaccgcgttggtcacctgcttaacgaatttctaaaccaggcgttaaaactcgactggcagcgccagatcgttcgcaaacaagaggttccgcttcctgctgttggtgtggcggtaacaggcatcccggctattgaacgtttacggtttaaagaggtggatgatgaagcggaacaaacgttggatctcagtaatcatgcggcggatttaacgcaaattggcgatgacttctgggatgctttcaacggcctcgatcgtgaagtgttgattcagcagacgttgcagcttctggcaaaagaaaatcgccccgttggcctggctgaactggcggtgttgttgcccccagatcacgatctcgaaacctttgccatatggattggtatggcgagagaagcgggcattgagattattgattcacagcgcgaatttgctgagcttagtgatggggaaggtcgccgctggcgatttaatctgcccactaccggtctggaaagccaggcattaatggatatcgattgggagtaa

SEQ ID NO: 44794 - DNA, 765 bp, Klebsiella oxytoca
ttgggagtaacaggtatggtgggcttttttgacagacagattaaccggagcgttgctgcaaatgcaggcagtgaaccagaaccatcggacgaagcggttgccgatgagtcggttgaggaaattgcaaccaatagcgaaatgcgaacgctgaaaaaaatacgtgaagcgactcaggaattgctcaaatacggcctgctggaagaagccagtaaacccaatctgtaccgcgttgtactgacccatccagaagaggttactcgcattctggaacctctcgatctggatatcggcattgatgagatccgcggcctgctgtatgtcaaagtcagacttgacgaaacgccagagcaggatgaatggtcccaccctctggtgagacggcaacggcttaacctggaacaatcattattagttgccatactgcgccagcattttgttgcctgggagcaggaaagtggaacaggcgccagccaggcgcagatcgctatcgacgatctcctccctcagctccagatttaccttggcgatccggggagtgaatccaaagaacgcacccggttgcttaccctattggatcaattaaagggccatgggctagtcacgtcgccggatgcgcatgagcggatcgtgattcgtccgattattgctcatcttgccgatccgatgaatcttcaggcattactggcatggctacaggaccaaattgctcaacaaacctcccctgctgattcgtcagaaaagaagagcagtgaggaggacgtatga

SEQ ID NO: 44795 - DNA, 3288 bp, Klebsiella oxytoca
atgaatcaaatagcgcgtctggctggaaaggaatcttttattctcacccgtatcgagttgttcaactggggcggttttcatggattgcatcaggcagcaatccatcaggaaggtaccgccgttattggtccaaccggcagcgggaaaacgacgctggtcgatgccttaatgacgctactctgcgccaatccccgctacaacctggcctcaaccggggggcatgaaagcgacagagatcttatctcctacgtgcgcggtgtatccggacccggcgatggcggggaggggcaatcgcatattgccagaccaggtaaaaccgtgaccggcattgccgcgacgctggagcgtgaagggcagcaggtacgtctgggagctctgctgtggtttgattccaccagctccagcgtgacggatatgaaaaggctttggcttttcagcgataaccccgagcagacgctggagcattggttgaacgtttaccatgacggcggcacacgattgctgcggcaaatggaaaaagaagtgaccgggatctggacatacccgaataaaaaacagtatctggcgcgcctgcgggactttttcgaagtgggggaaaacgcgtttacgttgctaaatcgggcggcagggttaaaacagctaaacagcattgatgagatttttcgtgagctggtattggacgatcactccgccttcgatcgcgcgacggaagtggccaatagctttgatggtctgacagaaatccatcaggagctggaaacggcgcgcaaacagcagcagtcattgcaacctgttgccctgagttgggataagtaccagaagcaagagcgacaacttgctgaaaggaaagtactggaatcactattgcccatctggtttgcacaacaggcaagccagctctggagggaaaaggtcagccatcttgaaatcgagtttggtgaggcacagatccgcgaagaacagatcctgtcgcagcttgagcaacagaaaaaacgggtagctgactgcatacagcgctattaccaagccggtggtgccaatatcgatgatctgaatgagcgcatcaaggactggcaaaaaacgctcggcagtcgggaggctctggcgcgccagtatcaacagctgatccataatctggggttgccgcctgacctgagtcagcaacagctagaggcgaatcagcatgaagccgaggcccgacgtgagcagcttgctgatgatataaagctgaagcaggaagaggtttatcaaaaaggcgcgctcaggcatcgcatgaccgaagaacttcgggaacgggaaactgatcgcgctgagatcgcgcgtcgtccggattctaaccttcccgcacattatcaggcatttcgcagcgagctggcaaaagcgctgaacgtcgatgagtctgaactgcctttcgtcgctgaactgatacaagttaaacccgaagaggcgcaatggcgcggtgcgattgagcgcgctgtggggagcaacaggctgcgtattcttgttgcgccggaatctgcacaggaagcgctgcgctgggtaaaccagcgcaacaatcgtctgcacgtgcgcctattggaggtcaagttaccgcactctcccgccaggttttttgatgatggttttacccgcaagctgttgtggaaagatcatccgtggcgagaggccgtcaaagcattactggccgaaagcgacaggcattgtgttgacagccccgaacagttgcgtgacacacctcacgctatgacggtgcaggggctaatgtctggtaaacagcgtttctatgacaaacaggatcagaaacgccttgatgaagactggctaacgggattcgataaccgcgatcgcctgaacttccttgccaaagaaatcgccgcgcttcaggagcaggttaaaaccgcaaacgcggcatttgaggttgcgaaaggcgaggtggcgcttttgcaaaatcaggccatttcattccagaaaatacaacagattgattacgatagcattgatgttcccggcgcaaagagccaattggaagcgctcaaggagcggctggagaatctgatccgcccggattccgatgccagcgtagcgaaagcaaaacttgatgaggctcaaacggttgagtctgaatttgataagcagctcagagccgccaataaagtcactaacgggctggatacagaactcacctccgccagggccgcagaacgtaaggcccagcaaaccgcgcaacaaggtatgcaggatgaagagcgagagctgtgtgccttacattttccggcggtgactctggagcaactgcctgacattcgcgatctggaacgtcaacatgagcggggaattcagcaagaaattgagggtgttaaaggtgaactgcatcagctgagtattgagttgaccaaacgtatgtctgaagccaaacgtgtggataccggggcgctcgttgaggcaggggctgatttggacgatattcctgtctatttacagcgtttgcaggagctgaccgaagaagccctgccggaaaagctcaaccgctttcttgactatctgaaccgttcatctgatgacggcgtaacgcaattgctcagtcatattgaacatgaggtgttagtcattgaagagcgtctcaatgagctcaatgaaaccatgtttcgggtagattttcagccggatcgttacctgcgtctggatacgaaaaaagttgtccatgaaagcctgcgtacgcttgaaaaagcacagcgtcagctaaatactgcccggtttgttgatgataacggtgagagccattataaggccttacaggtgctggtggcgcaactgcgggatgcctgtgaacgaaaccgcaccttgggggcgaaggcgttgctggatccccgttttcgtctggagttcgccgtatcggtgatggatcgtcagagcggaaatgtgattgagtcgcgtactggctcgcagggcggtagcggtggagaaaaagagattattgcgtcttacgtgctgaccgcatcactgagctacgcgctatgtcctgctgggagtcgttatccgcttttcggcaccattgtccttgatgaagccttctcccgcagctctcatgccgtggcgggcaggattattgccgcgcttagagaattcggcttacatgccgtatttatcacacccaataaggaaatgcgcctgctgcgtgaccatacccgttcggcgattgtcgtccaccggcgcggtcaggattcaaatatggcttcgctgagctgggaagagcttgaacaacactcccgacgacgggagaacgcgtag

SEQ ID NO: 44796 - DNA, 1149 bp, Klebsiella oxytoca
atgtattctcctgatgaactgcgtgaaaagcttgcccggcagtgggataacgcaaagctccgggccgagcgtttacttccacccggtaactggccgctctgtctgaccattggcaaaccttccgcgaaaatattcgcagagcagcctcagcgcgttttacaacacgtgcagttatggcggcgagtcgcggttgggcgtgtggactggggagaggtcagttatcgggcgagcgacggaccggtatcaatgccgctgcgctgggtcctgaatggcccttttgactggatcagcgccgcggcggatcaggcggtgagccgggagtttcgcttgctggaggtaattattgagcaggttgatcccatttttcatccgctgttggttagtcatcgttccctctggcggcataaagctccgcaggacatcatcagtgccgccaggctggcctgccgattagagccgggctgtgcaaaagggctgccgctaagactgctttccgggcaaggggtggataccaaatttattgagaataatatttcattattaacccgactgctggacgtgcgtttttccggcgaagccagcgagcaggggttaaccaccttccttgatgcttttgatgagtccagccactgggttctggttgtgccactttcgcccggcttgcttccttttaaaaaatgccgggtgacaacggcggaactgggggaaacgacattgcccgcgtcgcgtgtgctggtgattgaaaatgaacagtgtctgcatcaacttccagcgttatctgacactatcgcgatcttagggtgcggccttgacgtgcaatggttatccagctctgttctggatgaaaaacgcgttgcctattgggggtacatggatagctgggggctgctgatgttggcgagagccaggtgctgtcgcccgacgcttgacgttctgctgatgaaccgtgagttgtttgagcaatatgccagccatagcgccgttcctgaaccggtaaaagcgcagcaagcaatacctgatggcttgcttgatgaagaggtcgatttttatcgttacttgatctgcttgccacgtggtcgtctggagcaggaatttttgcctacggggatagttgaagaggcgctggtcatgtggcagaaaggattataa

SEQ ID NO: 44797 - DNA, 1530 bp, Sphingobium yanoikuyae
atgctgttcggccaactccattccgatatcttcgcgctgttcgccgggtcgaaccgctttctctacgagcgcgtgctgatcggcctctatgaaggcttctaccgttccgacctgcatttcccgacccagggtgaggtcgtccagctgatctatacgctgctgggcgacaatgcggagctgtggcgcgaggatgaaagcccggtggtgctggacaagctggccgcgcgaccgggccgccgcgtgcgccggcgcaagctggaagccgccgacgcgcaggcgaccagcgcggcgatgatgcgcgcccggcatatctacaaccggcttcaggcaaccggctggatcgaggaaagccgctatggcctgaaggtcacggtcgacatgcccgccggcgccatgcgcctggccgaatttctctgcagcctgcgcgaaggcctgtccgaccagcttggcggccttgtcatccaggtgaagaacgagctggaagcgctgcagcgcaacgcgcgggaaaatgcccctggcctgcacaaggcggcgcgcgacgccgccagcttcggccgctatctgcgcagcgtgctgagcgcgctgcgcgacatcgacaagcgggtggtggaaagcgacagcgtcggccgccggctgcgccattatttcgaggatttcgtcgagaagctgctgctgcaggattatgcggccatctcgaccacctcccacccctatcgcttccgccatcgcatcttcaccgcgctcgacgcgatcgaggattcgatcgccgacgtcgccgccatcgccgaagcctatcatgaggcccggctggcgcccgatccgtccgccgcccgcgatctggtctatgacgatctgcacaaggtgcggcgcgtgttcgaccagatcgaggaggctttcgagcgcatccagcagcatcgcagccggctggagacgcggctgcgcaacaccgtccgctatgccggacggcgcggcaacagcttcctccagcgcagcgagccgatgctgctgcaactcgaccggctgctcgcgcgcacggatggacaggatatggcgccgtccatgtccggtctgctggaaccgcgccggtcctactggtcccccgccctgctcgcccggccgcgcacctatcgttcgacggtttcgggcggcctgctggtcctgccgccgcccgatcccctgcgcgaatggcgcaagcggctggaccgggactatctggcccgccttgccgtcacgcccgaacaggtcagccgcttcctcgaacggcgcgtggcgcccttcggatcgggcgaggccagccgcttcgcgatcgagacggttgatgatttcctcacgctcgaagccctgcgcctgtccgtgctggccgccgatgccgacggccggggcaatgccatcgccaaccatctggcgccccatttccgcttctcggtcgataccggatcgaccatcgacaatgactggctgcactgcgcgggcttcaccgtctcgcgcattggcgacgccgtgaccccagagatacaagatgctcagtga

SEQ ID NO: 44798 - DNA, 669 bp, Sphingobium yanoikuyae
atgctcagtgaatttcagaccctggaggcgcgcgatccgcgccggatgcaccgcgtgacccaggcgatcagccagttgctgcgccatcagttcctgcatgtgcaggatcgcggctcatcggcgctgctcgaagtcctgctccgccccgaggtcgagcggctggtggcggattatttcgaagtcgccggctaccggctggtggtgcgcgaaagcgagggctgggccggcatcctgcccgacaccgaacagatcggccatccccgcatgcggatcgacgaaacgctggtgctgctgctgttccgccgattgtgggaagaaggcatccaggaaggcgatgtcgaacgctatggcagcgtgatggtgacgctcaatgccgcctatgacgcctatcaggacatggtcgcccgcgcccgccgcgcgacgctgggcatcaacgaattcaaggcgctggtcaccgcgctcgaccgccgggcgatcgtccatatgggcgacatcgacgatgagctggaggacatgccgatcaccatccgcgcgctgatcgccaccgtcgcgggcgaggagttcatggcccatctcgaacaattgctggccggcggcgactatcaggaaagcgagacggaggagcccgtcatcgatctggatgacgccgacgaggaggaggtcgcatga

SEQ ID NO: 44799 - DNA, 3444 bp, Sphingobium yanoikuyae
atgatgcagcttgcccatatcgcactggtgcaatggcatctgttcggtcgcgaggacctggctgtcggcggcgacaccgccgtgctgggccagaaccgctccggcaaatcgacgctgatcgacctcatccaggcggtgatgaccggcggctcgcggcgctggtatcagtttaatcgttcggccggcgaaaccggcagccgcaagtcggaacgcacgctgcgcggctattgcctcggccagctcaacgaacatgaatttctgcgccaggaatccgtcacccacatcgtgctgacgttcgacgatcccgacggcgtgcgcccgccggtgagcgtgggcctgtgcgtcgaggcgtccgcgatcgaggatgcacaggtggtcggccgctatatcgcgcccggcgtgcgggtggataccgacctgctgatcgagcatctggatggcgggcagcagcgctcggcaccctggagcctggtgcgcgaacggctggagcaggcctgcgcagcggccggcacccagctcattcgccccgatggcccgcgcaaccatatccgcgaatatatgcgccagctgttcactggccggcgccacagcgatccggatcgcttcatccgcgccttcgtcatggccctgtcgttcgaggatatgcgctcggtcgagggcttcgtgcataatttcctgctcgcccggaacgacatcgacatcggcgagctgcgcgagggcatccagcgctatcgcgacatccagaaggatgtgcatgaactggaacggcggctcgacgcgctgcgggcgctggccgaactcgtgtcccgcttcgtcaccttgctggaacgggaggatgtcgcccgtggcaccgcccgcctcgccgccatgatcgaggccggcgccgcgctgatcgccaatctgcgcgaacggcgcgacacgttggcggaattggacgacatccagcatgacatcggccgctgcgatgcggagatcgcggcactgggcgatcggcaggacagcctgctcgcccagtccgtggcagaaggcgccgccggcaagcgggccgtggtcgtcagcgaactcaaggccgtggacctggcccgcaccggcgtggtgcaacggctcgaagcccgtttccgcgcggccgcgctcggcgccagcctgctcgaccatcgcgagcggctcgcgcccctgaagctcggcgccctgttccaggcgctggaggccctgcggcagcagagcgacgggctggagccgccgacatggccgcgcgatccgttggcgatcgaggatctgatcgccagcgcccgccgcagcgccatcgatagcatcgccaagatccaggaacggcgtgatcaggcgatcgcccagcggcgcggtctgcaggacgaactggccgatctggtcgcgcgccgcgacaaggcgcgcgccggtcaggtgagcctggacgatcgcaccatccgcctgatggccgcgctggagcgggagaatatgcgcccgcgcacgctctgtcaggtggccgaaatcgtcgatccgcaatggcgcgaagcggccgaggccctgcttgggcgcgaccgcgaggcgatcctggtcgatcccgaacatgcgtcccgcgcggtcgagatcgtgcgcgccaaccgcgacggcttccgcggatgccgggtcatcaacagccgccgcctcgccgaacagccgcccggcttcgacaccgattccctcgccaccgtctttgccagcgacgatccgctggcgatcgccttcctgcgcttccgcaccggccaggtgcggctcgccggtacccaggcggaattgctggcaggcggccgcgcgatcatgcgcgatggcgcctataatagcggcatcgtggtcgaggtgctgcgcacccgcgacctcaagatcggccgggccgcagccccgctgatggaggccgaactgctcgcccggatcgaggatcggcaggcgctgatcgccgtccatgccgaaaccgagcggttccatgacgatattcatcgcaagctgctgccgctgatggccgatgtcgatccggccgaccggctcgacctgctggtcgccgcgatcgaccagcatgaggaaagccgcaccgaattgcagcaccggctggacaagatcgcgatgacggtcgacccggcaatccagcacaatctggacagagtgaaactgcaactgcgcagcgctaccgaggaaaaggaagaactgatcggccggcgcggccagcttggccaggccaggatcgaaatccagcggcggctggatgcgggcgatgcccagcccggctcctggctctgcctgcgctcgcggcgcgccctgttcaaggatcgagtgcgctcatcggccggcctctcgatcctgcgcgaggcctatcgccagcagcgcggacgcgccctgccccgactggtgcaggagatgatgaagcgcgcggacgaggcccgcgacgcctatcaggcgttgcagggcgaaattcgcgagacgctgggccattaccgcgccgatttcgacaatagcgcgcctattgccctgcccggcgcgattgcgaccgaggtgaagccctggctcgccgccaatatcgcggcgctggaggaaaatgagctgatccagtatcggcgccaggccgacgaagccgccgagcagatcggccagctgttccgcaccgccttcatccatgagctgaacgctcgcttcaacgacctgcgttcggagttggacaacctcacccgcgcgctgcggatgcggccgctccatggcgagatctacacgctccatgcccgtcccaaggaggagtttgccgcgctccaccggctggcgcgcgagagcgagcatgacgaactgaccttcgacgccctctttggccgggccgccccgcgcgacgccgaacatgcccaggcactggcggaggtcgaacggctgctcagcgacgagtccctcgatttctcggcctatcaggattaccgcaactatttcaccttcgacctgcgcatggaggatgtgaacaagggccgcaccaccagctatgacaagcgcaagggcacggcgagcggcgcggagcggcaggtgccctattatgtggtgatcggcgcggcgcttgccagcatctatcatggcgcgcgccgtcaatatgagcgggcggaactgggcctgggccttgccgtgttcgacgaggccttcagcaagatggacggccccaaccagcgcaccctgctcgaattttacgacgatatcgggctgcaggtggtgatcgctgcgccatcggaaaagcgcgccgtcgtctatgaaaatctcgacagcgtgatcgacgtgttccgccatggcgacaatgccagcgccgaagccgtccgcatcaagccccacgcccgcacccagatgcgcgccgccaacccgcagcatctggacgatgccgcgctggccgaacggctcgacctcttcgcgctcgacagcgcggaatag

SEQ ID NO: 44800 - DNA, 1497 bp, Bifidobacterium adolescentis
atggaacggctccggcccgtgtatgagaccggggtgctgcgattgctgctgcgcggcaattccatgctgtacgtcgcgctgctgcgctccacgttcgacccgctcaccggcgagctgccacgcgagatcgtcgaggaacggttctcccgcagtctgacccgacttgcggaaacgggcgattacacgcccaaggaagggcagacgtccgcggaagccgcgcacacgatcctgcagcagctgacgaaggaaggcgaaggcgattacgcgtggctcgccaattcgctcgacgtcgcctcgcaccgctacctgtaccgtctcacggcgcgcgcccaccgtgcgatcgaggcgctcgaccggctcgaggacaccacgaaaacgctgtccggcgcgcaggccaacagcatcatcatggagatcgagcatgcgcgcatgcagctgaccgccgacccccgcgaacgcatccgcctgctcgaacgcgacatcgaggagcggcaaaagcagatcgacgaattgaagcacagcgacacgttggacaagctcacctcccaacaggtgggcgacatcatcggcgtcatccacaacacgctgcgcggcgtgccgatcgacctgcgcgaactggcgctcgaggaacgcgacaacggcgacaatctgcgccgaagcatgcagtcgggctccatcagcgtggagcaggcgctcggcacctaccatgacgaataccacaggtcgttccacgaatccgacagcggccggcgtttcgaggacgcgttccaggtgatcgtcaccgacgagggacgccgcgaaatcgacgaggcggtgcgagacatcgcccagaacccgtatctcgagggcgagcccggcatcctgctcgcccaggtacgcgccgaactcaaacgcatctacgagggcatcgaggacgtgcgccggcagatccgcatatccgacgaggcggtgagccgtctggtgcgccagcagaccgacacgcattaccgcaccatgctcgacaagctccacagactgttcgtgcgggccagcgacgacgcgaagacgcaccccggctcggacgaacgcccataccgtacggacaccggcacggcgcaattccaggcattgccgtccaggcccgcgaaatcgatggcgcgcgcggccacggccggattggacgacgcgccttcgacgaacgtcgacgcgccggacctgaaggccatggtcgagatgtgcggcccgcggctgacgcacatgatcggactcatcaggcgcgatccggtcaaaacggcggacggcaggttcgtggatttcgcggcgagcttcaaccggctgccccgggaggaacggcgcgaaagcgagctgatcggcttcctaagcgccctacgcacgcaggacggaccggcaaccgtggcatggcattgcgtatccatcgacggaggcgagcgcgtgtggcgcaccaggccgatcctcaccaccgaggcggcgcttgacgagatcatcgaggagggatga

SEQ ID NO: 44801 - DNA, 840 bp, Bifidobacterium adolescentis
atgacggacaacaccgacggattcgacactggcatcggcatcgaagaggagacaggcccggaatccggcatgccgtccgaagggccggatatgacgagggacaggccggcattgttcgacggggatacgggagacatgcctcttgaggcgcgtatggccgcgatcgcgctgaaacgcgaacgctacatcgacggcagcctgtacgacagggcgtgccagtaccgtgaggccgtggaacggtcgttgaacaacgacatgctcagactggtcgacaacacgaaataccggatcatgtacgcgtcgccggtcacggacgcggagacgaacatccgctcgttgaagacgcgtgtgagcctcacccgcgaggaggccgccacgctcgcggccctgcgcatcaaggtgctggagtacgagaaccagaagacgaagccgggcgactggctcatcagcttcgacgacatccgcgcgctgctcgccacgggagcgggcttcctcacggccagcaacgacgaggagggcacggcgaagaagatcacgtccgtcatctcgcgcatgcgcacctacgggtatctcgcggaaacgggggacgagaacatgtacgtgctcacgccattggtgccgatggtgctcgaccagaagctcgccgaccggtggctcggctccgatgatacggacggcgatggtatgaaagacgcggatggcgatggttatgacgattcgtccatcggcgcggatggtggcgatacttccgattcgaccgggacggtttcgtccggcgtcgagcaggacgcgttcgatttcgattcggccgatgacgcttttgatgggggggaacactga

SEQ ID NO: 44802 - DNA, 3459 bp, Bifidobacterium adolescentis
atggaagacggcatgaaaatcgtttccgaccgttggatgctgcaaagccggcagatcgtcaactggggctcctacggcggctaccacgtgttccgcccgtccatggacgatgcgatgccggtgaccctgctcgccggcgcgagcgaatcgggcaaatccacgctcgtcgacgcgcagatctcgctgctctacccatccggcaccccctacaataaggcgtcgaattcgggacgttcggaacgcaacgactacacgtacctgcgcggcatgatcggcatcagcgacggcgaaaacggtgagaccccgatcttcctgcgcggcagggacgcggacggcaccccgcagaacatctggggcgcgatcgtcgacacatacgcgaaccgcagcgacggcggactgttgtcctgcgcaaaattcctctacctgaccgcaggcgacgggccggacggactgcgccgccaatacgtcacctggaaccagaccatcgacccgcgcctcatggaccggcaccgcgacacgtcattcacgcgaggactgatggaacagacctacccaggatgcacgacgcacgtcaacgcgcaggcgttccacgcctccatctggcaggacatgggcctaagcgccgaagcatgcaggctcctgcacaagatccaatccgccgacgcgccctccaaactcgacgacatcttcaaacagggtgtgctcgacgtgcccgaatccatccggctcgcccgcgaaaccgtcgacgactacaaccggttcagcgagaacttccacagcatggaagacaaaatggaacgcgtcgccatcctgcaggacatacaagcccgctacggcgaatacgccaaacaagccagcgaacgccgcgaatacacgcccatcgaccccgaccgcgagcaaggcgagacgacgctcgccgcatggacatggtcgcgcatggccagcgaagtacgcgccggactgccatcggcgcaacgcaaagccaaggaatcccaggacgccatcgaccggtctcagcagcgcatcgacgaactcgacacgcaaatcgaagccgtcaaagaacgcatgaacggcatcgacggcggcagcctgcagcaactcggcaaggacttcgaacgcgcacgccaggacgccgacgaggcgcgcagacaacggcacgccatcgccgaacggttcgaacgcgtcgaaggcagactccccgccgacgagcagacatggaacgccaaacgcgccgcgctcgccttgtcgctcgacacgtacgacaagcgtttggaagacgcgcgatccgaataccagcgaatggtggtggaacgtcacgcccggcagggcgaacgcgacctgttgaggcaggattaccggcgcaagatcgaacacaggacgcgcatcagcgacgacatggaccatgcgcgcacgctcatcgcacgggcgacgggcttggacgagacggaactgccgtacgtggccgaactgatggacgtggacgagggggacgagcaatggcgtctggcgatggacgtcacgtacgcgcccatcgcgcagaccattctcgtggacaagcggcatgagcaggggttcgccgcgaaggtcagcgcgatcgatccgacgcgtatgacgcggcgtgcctggcgtttcgtcgataccgacgcgcaatacgattcggcctgcaacgaggggtggatgtcgtcgaagctgcggtacaaggaggattcgccgttcgtcggatggttgaaggagcagaccgcgtcgcaacggttcgacgcgcgttgcgtggaggcgatcgacgacatggaccgggccgaacggcaggtgcaggtcgacgggcagatcaaatccggcgaccgtggattccatggcgtcaaaggcctgcgtcaggtcatcggcttcgtgaacgaacggtatctggccgaattggaacgccagcttgacggggcggaacgggcgttggaggacgccgaccgccgcggcaggcagatggccaacgccatgactctgctgcaggacgagcatgagctcgcattgaccgtcgcggatctgccatggggcaagatcgacgtggacgggctcgagacgaaggcggaacggatccgtctgcagatcgaacggatcgaaagcgatccggaactggcacaattgcaggacgagttgaaacagctgctacggcagaaggacgacgagggcaagaacaggtaccgtgccgaagcggaattggaaaacgcgcagcatgccgtccatgccgaacaggcatggctcgacatgcatggcgactccgatttcgacgatgccgcattgtccgacatggtgtcgaatctgctggccgacacgtatgagacctgtttcgacacgtcgcgtccgcaggaacggccgcagcgcatcgccggcggtttcgaccgtgaggggacggcgccgttcgacgtgcgcgtgctgcgcagaatcggcaacaccgtgcgtgcgagactccagcagatcgacgagcgtgccgtccaattgcgcgccgacacggaacgcgccatgggcgactatctgaagcaccattccacggagggcgacaccgtcatggcgagcgtggaggactatccgtatttccttgacgagctcaagaacctcaacatgctcgtcacccgcgccgcgaccgacgaggagtatgcgaacagcgtcgaaaagctgtatatgagcttccaacagctcaaccgcgcgttcaacaccgacgaggagaacgtcagggagcagctcgaccgcatcaacggcatgctcaaaggccaacagttcggcccccgcggcggcaggctctcgctccacgtggacttccacccgatcgaccggcagttcaaatcctcgttgggccgcatcatgtcgaagctcgacgattggacacgcaacgcgcgcagcaatcccatggagacgcgcaaggcgttcgcaggctgcgaaacgttcatcggcaggctccaggcggaactcggccagatccgcgacacgaacggcatcaaggaatacggtgcgcgcaacctcgatccacgcgtgcgcagctcgttctacgcgatcgtgcaccataacgatctgcccgacgaacgcatcagctccaccggcggcaagtccggcggcgcgttgcaggaactcacctcgttcgtctacggcgcggccctgatctacctgctcggcggcgacctgaccagcaagcccacctacaccacactgttcctggacgaagccctcatcaaagccgacggacgctacacgaaacgcgccctgaccgtgctgccgcgcctcggcttccagatcatcgtatccgcgccggaaagcaaaaccgccgaaatcctcagcatcgcagacaaagcgtacgtggcatacaaggatcccgcaaccggcaactcgtacctgcaggagctcgaccgcgagccggcaacgcaagccgaaacacaagacgccaccgtcgagcagacgcaacccgcgacggaggcataa

SEQ ID NO: 44803 - DNA, 1236 bp, Bifidobacterium adolescentis
atggcagcggccagaaacaccacaagcgaaacggacatccgccggaaactcgacgaatacgtcgacgcccacctcaccaggcacatgtacgacaccgacgaatcctggccactgcgcaaaaccatccgactgcccaaacaagccgaactagagcagcactacaaccaaatccgcgcccaaaacgaaaccatccgcgactgggcgcggcaacaccactgcgaaaccagcgaaaaaaccaaaatcgtctccagcggactcatccaacaaaaaagcccgctcatcgactccgtgaccatacccgacctcgacaccgccctccgcatcgccaccaaacaaacccgcgaacgctacctacgcgaacacgaccgcatgagcgcgctcgccaaagaattcggcctcgaaccggcgaacgccatgaacgtcgccaaaaccctcaaagaccacgacgacaccgacttccacctcgtcatccaagccgcccactacttcgcaaaccacgactgccacaccatgaccccacgcatggcgcccatcccaggattcagcgccaaatggctcggcacacccaactcccaacgccgcaaagcgatatgccagctcaccggacaagacaatctcaccttccaggaacgcccgaacgaactccgactacgcctcatggacgccgaacaccacgaccaacccgacctcatcgtcacccaaccatgggtccgcaaccagccaaccgacatcgaacacgccatcatcatcgaaaacaaagacacctaccaggccatgcccaccgtcgaacacgccatctgcatcctcggcaacggatacgccgcaacatcacacatcacaacactcctgccatggctcaccaccatccccaacatcatctactggggcgacatggacgccaacggactcgacatcctctccaaactacgcgccaccggcatcccatgcacatccatactgatggacaccaccgcataccggacatacgaacaatacggcacccaactcgacgccaaaaacaaacccctcaccacacaaaccccacaacccacacccggactcaccaccgaagaacgcaaactctacgaaacactctgcacaggaacagacatccaatacctacgcatcgaacaggaacgcatccccatacgcgacgccacaaccatcctgcacgaccaacaccactggccaatcgacatacccggcaacgacataccaaacaacaacaccaaatag

SEQ ID NO: 44804 - DNA, 1497 bp, Corynebacterium imitans
atgaacctggtggcagatgcgctgaaagcgaagcgtgtaggtggggagtcggcggcgttgtcgctgatgaggagtccgctgatgccggtagttgtggcattcattaagaggtacttcccgcatgggagtaaagctcgaccagtggtggaggtgtacgaaggcttatcgacggaccttcggctactgcgtgcagaaggcttcgatctggcgagtgggccacagcactacgtcagtgagtgggtgaagaaggggtggttgactcgccggacggggacgagcaggacgggggagacggtagagccgagtgaggaggcgttggcggttgttgagacactggagaggtgggatgcgccgcagagggcagtgacggcgtcgagaattgagacgatttcgcaggcgctgcacaggctggcaagggacgctgaccccacgatcgaggcccggttggcgctgttggaggagcagcgggagcgtattgagcgtcaaatagcggagacggagcgtggcgagtttgatgtgctttcgcccgtgcaggtgcgcgaacggatcggggacattctggacttggcggcggggatcccggcggacttcgcgcgcgtgcgccacgagatggaggcgctgaaccggcggctgcgcagacaactgctcgatcccgaagagcagcggggcagcgtgctggaggacattttccgcggggtggacatgattgggtcctcggatgcggggaagtcgttcaccagcttttatgaggtgctgctggatcgggagcgttcggcgcagtggcagcagtggacagaccaggtgctcgcgcacgagatgccggaggacgaaggcgggccggatgtggagatggtgcgcaagctgggggcactgttccacgacatggagcgagcaagctttgatgtgaaccaggagatgacgtccctggccaggagtttacgccactacgtcaccagtgacgagttcgcggaaaataggcgaatggtggcgttgttaagggagactcggcacgcggcggcggtggcagcgcaacagggggaggtacaggcgctgaccccaatggagaccaagctagtgcggattggcatgagcatcgggtcagtgtctgcgctgaagttgcgcaaccctggggaagagatcgttgagtatgcagtgcagcccatccaagaagtgccgttggatgaagaggcgctgcgcaacagcattcgggaatcagagattgacttcgaggagatcgacgccgcaatcgcgagggcgttgcagcgcaagacgcaggcctcgctgctggaggtcgtccacgaggctggtgggctgacgcaggggctggccagtgtggtcgggttcctttaccgggcgatggaatctgggttcgaagggggcgtcgataaggtcgagctgacctgggacgatgatggcacccactaccgcgcgaccgtgggcgactggtacttcaccgcgcccgacacaccatcaacaaacgaggcagaccatgactaa

SEQ ID NO: 44805 - DNA, 663 bp, Corynebacterium imitans
atgactaaccacgacacacacgccgacatcaaagggctctgggagggcgaccgcggcgggctgagctacgactcccggcgcgcgctcgtcgcgctgctgaaagggccgatgatcgtcgcgcacgagatgcagcacatttgggcagcaatcatttccgacgagcagacgctgcgatcccgcctcaacgatgtgttcctcgagctcgtgctcgacgaggatgcgggcatcgcgttcacgcggcccgcgaacaacggcgaagacctcaccaccccagaggggcgcactcataccatgccgtcggtgctgcgcacgaggacactcagccacgtggacactctggtggcgctgcatctgcggcaggagttgtctctggccacgccgggggatcgcgtggtgatcagctacgaggagctgcgcgagcacatccgcatgtaccggcccgacggcgagcgcaacgaaaccaagatggacaaacgcttcgacgccgcattcaaccgcatggtggaatactcgctgctcacgccgacggaaaccgacgaccgcttcgaggtctcgccggcactacgcagcatcttcgacaccgccaccgtcgaaggcatcaaggcagagtacgacgcccgcttcaaagccaccgagacaggagacgacaatgcagacgagtaa

SEQ ID NO: 44806 - DNA, 3336 bp, Corynebacterium imitans
atgcagacgagtaacattttcccaggccagttccggttgtcgcggattcaggctatcaactggggaacattcggcggcagcatcgatatcgaggtgcccagggagggcttcctcatcacgggcgggtccggaaccggcaagtccacgctcctcgacgccatgagcgccgtcctgctccccggcgacaaactccgcttcaacgccgcagcccaagccaacacaccacgcggaaaagggcgcacactggtgtcctacctgcgcggggcgtggggctcgcgcgaggaccacgccacgggcaccgtcgtgactaaaacagcgcgccccaaggcgacctataccgtggtggtgctgacctactccgacggagtcgagaaggaatacagcctggcagccctgttttacctgaaggcgcacgccaacagctccggcgatgttcagcggctctatggagtgctcgaaggccctgtcgccgcgaccgacttcgccccgtacctcagcggcgggttggacacacgcagcatcaagaagcagttcccgcagggcaagttcaacaacagccacagcgcattcgccgccacgtttcgacgtcgcctcggcatccccggcgccgaagccatggaactgctgcaccggacacagtccgcgaaagacctccaaagcctcgacgacctgttccgcgactacgtgctgcacaaacccgacacctacgagcttgccgaccaagccgtagagggcttccgggaactcgaaatcgcctaccaaaaagtccaagacaccaaggcacaaatcgacgcgctggaaccactggtgaagctaaggcaagagcgcgacgcggcggccgccaccaaggagcacgcggaggcgctgctgcggacgatgccgaaagtggtgcggcagctacgtcgagaagacgcggaggagcgcattgaggagctgaaagtcgaactcagccaggcaatcaacgcgcagcggctcgcggcggaacgtaaggagtcccaacagtccttgatcgagacgctacgggcaagcctgaacgaacagatcggctcgcgcatcgaagtgatcgacgccgagctgcaccacgcccacgaacgcctcgcgatgcgcacaaggacactcgctgacctcagcgaacgcatccttgcactcaacggcaaggcgcccgaaacgctcgaagacttcgaacagcttgaagccaccgcacggcagatccgcgacgaacatgacgagcagatcaaggagctcgacgggcgggctgaagaggtcgtcgaaaagcgaacgcaagtacagaacgaactcaaagccatcaccgacgagctggaatccctggcgagacgccaaaacaacatcagcgcgcgacacatcgcgatgcgggaacacgcctgcgccgaactcgggctgcaagccagagacctgccatttgccggcgaactcatcgacgtcaccgaccccacctgggaacccgtcatccaacggcaactgcgcgggctggccaccgtcatgctcgtaccacgcaccgtcttcgacgacgtgcggcgctgggccaacgacaacaacctcggcctgcggctccgcatgaatgccgtggacacacacgtcgagtacgctgcgccgacgaccagcgggcgatccctcgtgcgcaaaattgaggtagtggaatcacccatgcgcaattggctcaactgggagttggccacacgctacgactaccagtgcgtggacacccccgaagcactcgacgagctcaaagcgcatgagaagggtgtcaccctcgccgggctcgtaaaactggctaccaacaggcatgacaccaccacacggtgggagaaagacgaccgcttcagcctcaccgaccggcgccactggtacctcggctccaacaacgacgccaaagtcgaactgctgctcaccatgcaacaaggacagcgcaagcaagtcgaagcgcacaaacgcgtcatcgccgagatcgcgaaaacacgcaaactgcgcaacctcgagttcaactgggccaccagcatgaccagcctcacctaccaagacgtagacgtcgccggggcgcaagccaccatcgacgacctcgaagccggacgcaaggccctcagctcctcacccgaagcagccaccctgaccgcccagctcgacgcagcgcgcaccgaactgaaagccgcggaacgcgacgagcaagacgcgacgggacggagaagcgtcgcagagaacaacctgcaaaaacaacaagacctgctccaagaactcgacgaggaagaccaagccgaccccatcgacaccaccgacgaactcctcaaagaagtgcgcgccctgctgtgggaaaagaatcggcgcatcaacctcgcagtcaacgaagtgcaatccgactgccaacgcagcatcaaacgtgccgacaccaccctgcaacgtgcgacaaacagcatcgtctccacattgtccgcctacatcaaccaatggggcagcgaagccgccgacctcgccgccgacgtcaacttcctcggcgacgcactgacacgcctcggccagctcaaaggcgaacggctcggcgaattctccaaccagttccgcgacctcatcaatgacatgtccacgcgcgcactcggccaactcgcacacgccatccgcagtgcaaaagacgacatcgaacgacgcatcacccccgtcaacgcctcactcgcacagtctgaattcaaccgcggccgctacctccaaatcgacgtccgcgacgcccgcggcgacgaagccaaaacattcctccgcgacctcgacgccgccatctccggcggcctcagcaccgccgacgacgcccaatccataaagcgctaccaggcaatcaacgccatcatcaccaggctctcctccgccgaatacgccgaacagcgctggcaacacaccgtcctggacacacgcaggcacgttcggttcatcggcgtcgagtccgaacaagacggcaccatcgtcaacacctacgccgactccaccacgctctccggcggccaggcccaaaagctggtgttcttctgcctcgccgcggccctccgataccaactcgccgacgacggccacaccctccccaactacgccaccgtcgtcctggacgaagccttcgaccgcgccgaccccacgttcacacgccaaaccatggacgtcttcgcccaattcggcttccacatgatcctggccaccccgctcaaactcatccaagttctgggcaactacgtcggcggatctatcgtcttcgactacaaggaagaggccgacgagaacggcaacgtacgcggcgtctcccgctactccacgatcggaatcaccagccatgcggatgcctaa

SEQ ID NO: 44807 - DNA, 1458 bp, Massilia sp. BSC265
atggactaccatcagcttgtcctacagcggcgatcgcatcccgcgtggcgccttctcgcggcggatcacgcgcccatgatcgccagcttcctgcaccgtagctttgttgcgccgaacatgcgcacgatcccgcggcaggaactggcggcccagctcgacgaccacctgttccagcttcacgaggcggaaggccagggcctgtatccgaaaagtgctacggcctacctggacgattgggcttccgacgagcgcggttggcttcgaaaatactatccgccgggccaggatgaaccccactatgacttgacttcgcccgccgagcacgcgatcgagtggctggacagccttggccagcgcgccttcatcggtaccgagtctcgcctcatgaccgtgtttgacctgctcaagcagattgtcgatgggacggaactcaatccgcgcactcgcattgaagaattgcaaaggcgtaaggccgagatcgatgccgaggtcgccaagatcagggagggacgccttgatctgatggaacccacccaggtgcgcgaacgcttcctgcagatgacagcaactgcacgcgagctgctctccgacttccgtgccctggaccagaatttccgcgcactggaccggaacgtacgcgagcaaatcgcgacctgggacggcggcaagggtgagttgctgcagcaagtgttcggctggcgtgacctgatcgccgattctgacgagggtcgaagtttccgcgcgttctggaacctcctgatgtcgccgtcccgtcaggatgaactcagccggttactggagcgtgtcatgcagctcggaccaattcgcgagctggagccggatgggcgcatcaggcgtatccactacgactggctcgaggccggcgaggtcacgcagcgcaccgtcgcccgcctgtccgcccagttgcgccgctacctggacgaccaggcctggctcgagaaccgccgtatcatggaactgatccgcaatgtagagcagaaagccctcgccttgcgggggcaggtgccggaccgggcattcgccgaggtcgatgagccagctcccgagctcggcttgccgatggagcgcctgttgtacacgccggcattcaaggccgacattcgcaatctcaccatggaagacgccgaggtggacatcgtcaccgacgccttgtacgaacaggtgcatgtggaccaggcgcgcttgctcgcgaatatccggcgcgccctgcagacacgcgctcaggtatcgctcgccatgctcgtcgaggagcgtccgatcgagcagggactggccgagctcgccacctacctgaagcttgccacccaggaggtctcggccgtcatcgatgacgagcgcactgaattggtccactggaccgacggcgccgggcgccagcgacgggcatcgctgccactggtaattttcacgctacgcgagcacacgaccgatgaatga

SEQ ID NO: 44808 - DNA, 594 bp, Massilia sp. BSC265
atgaatgacgacgaccgcttcggccccctgctggtaaacctgttccagggggtgctgtaccgcgagcaggccgccgcgccctggcaagccctgctcgacctgcaggcgcgggtacgcgactactgtgcagtgatcggtctcgacctgattctcgatgaggcggaaggctatgcctacctgcgccagcgtcctcgatcgccggacgaagccgagctcccgcgcctgatccagcggcgtcccctcagctttccagtgagcctgatcctggtcctgttgcgaaaaaagctggccgaattcgatgccaccggcggcgacacccagctggtggtcagccgcgaggacatcgccgagcagatgcggcttttcctgcctgataccgcgaacgaggcgcgtctcctggaccgcatggaaacccacctgaacaaggtcgtcgaactcggattcctgcgccgcttgcgcggccaggaagcgcaatatgaagtacgccgtattttgaaggcctttgtcgatgcccaatggctggatgactttggtaaacgccttgacgcctacgccagccacgccgcatctgccatcggggaggagaatgcatga

SEQ ID NO: 44809 - DNA, 1221 bp, Massilia sp. BSC265
atgacagtacagcagctttccaagtggtcggggcccgacgccatcgcggccggcgtccgccagctctgggatagcggagcaatactgcgtgcgcggctcgaaggcagcagcatcttcccgcttgagttgcgcctgcggcagcctggcggcgccgagatggggcaagcgttcgaagcggttcggacctggatcggcgccctggtgggcatggctcgggaagcacgcggtttcggctacgagttggtgtggcgggacatcaatcatcgccagctcgggcgcaaccgcattccagtggctgcgcgcattccatcggaggaggacgccctgcgcctcatcgggcgcggtgccgatgtgcggcgcttcgaccggctcgcaggcatgacgctggacgcattccccatcctgcgaccgtggctgctcaggcagccgctcaagccgcttgtctatgccgacgcatgggaagctatccttgccgtcctgcgctggttcagggcgcaaccgcggcctgggatttatctccgccaactggacatcgagggtgtcgataccaaattcatcgaattgcacaaagctttggtcgccgagctgctggatgaaatcatgccgcccgagaccatcctggcgaacgcgaacggcgcacggcagttcgagtcccggtttggattgttgataaagccgaccctgatccgctttcggctgctcgatcccgattactacatcggcgggctgtcggacgtgagcattcctgtcgctcactttgctgcactcgagaccggggtggagcggattttcgtgacggaaaacgaagtgaatgcgctggcctttccaccagtaagggccggcatggtcgttttcggcggggggtacgggatagatcggctggcgcaggccggctggctgagcagcagggaggtgatgtattggggtgacatcgacacgcacggattcgcgatcctggaccgtttccgcttacatgttccccatgcacgatccatcctgatggaccgcgcgacgctcgatgcgcatcgccccctgtggggcgcggagaatgccgcggcgcgtcatacaggggaactcggccgtttgacggaggacgagcgacaactcttcgtcgagcttcgtgacaacgtccatgcagcgaatctgcgcatggagcaggaacgcataccttatgcatgggtagtcgacgcgatccgcagcgcactggaatcgccgcgttga

SEQ ID NO: 44810 - DNA, 1518 bp, Bifidobacterium angulatum
ttgggcgatattcgatctgagatggaacgtctccgcccggtatatgagaccggtgtgctgcgtctgctgatgcgtgccaattcgcagctgtacgtggcgctgctccgctcctcgttcgatccgctgaccggggaactgcccagggaagtcctcgaggagcgtttcaccagggcactgtcgcaactcgtcgaaagcggtgactacgcgttcaaagacgatcagacgctgcccgatgccgcgcatcgcattcttgtggagctttcccgcgaaggcgatggcgactatgcatggcttgcgaattccctcgacgtggcctcgcaccgctacctgtaccgtctgaccgcacgcgcacaccgggcgatcgaggcgctgtcccatcttgaagacaccacgcaggcattgtccggcgcccaggccaacagcatcatcatggagatcgaacatgcgcgcatgcagctcaccgccgacccgcataaacgcatcgaactgctgaaccgcgagatcgaggaacggcagaaggagatcgaacagcttgaacaggacggggctgtggaacagctgtcgtccaagcaggtcgaagacatcatcaacgtggtgcacaacacgttgcgcggcgtacctatcgacttgcgtgaactggcgctcgcggagcgcgacaacggcgatgcgcttcgccgccgcatgcaggccggcgcgatgtcggtggagaacatcctgagcgcataccacgacgaatatcgcaggtccttccgcgaatccgacagcggcaggcgtttcgaggacgcgttccaggtcatcgtcaccgaggaaggccgccgcgagatcgacgacgccgtgcgcgatatcgccaaaaacccgtatcttgatggcgagccgggcgtgctgctcaatcaggtcagggccgagcttgaacgcatctacgaaggcatcgaggatgtacgccaccagatgcgcgcctcggacgaggcggtgagccgtctggtgcggcagcagaccgatacgcgctaccgcaccatgcttggcaagctcaacgcgctgttcgccaagatcagcggcgaggcgaaggccaatccgaacagtgcctccaggccataccataccgataccggcgccgtgcagttggcggtattgcccacgcgcccggcaaagccgatgattcatgcggccccgccgagcctgcaggagcgtgaaagcgttccgacagtggattcgccggatctgaaagccatgatcgaggtcggcggtccgaggcttcggcacatgatggatgtgatcagacgctcgccgcgcatgcttgccgatggcagggtggatcttgccgccagtttcaatgcattgcccgaacgggaacgcagggaaagcgagattgttggtttcctcagcgcgctgcatgcgcaaagtgacgcgcagtacgtgcaatggcattgcgtatctcttgacggtacgccgcgagtgtggcgcaccaagccgatcgcggcaagcatgcagaccctcgacgaaatcgtgggggaggagtga

SEQ ID NO: 44811 - DNA, 1029 bp, Bifidobacterium angulatum; identical to SEQ ID NO: 42178

SEQ ID NO: 44812 - DNA, 3498 bp, Bifidobacterium angulatum; identical to SEQ ID NO: 42179

SEQ ID NO: 44813 - DNA, 1218 bp, Bifidobacterium angulatum
atgtcaatgtcatcaaggaacgccggcagtgtaacggagcgtgagaggcggcttgcggcacgtaccgagcaatggcttgtcggaaaggtcgaggactatctggacaagcaacggttttcggcgaatccgcagtggccgtatgagttcaacgtcaaacagccgtcgaagagcgagctgatacgggattcggacacctgcatcgcccaagcgagggccattcggtcatgggcgcaatcctacggctgccggtatggcgagaagtcccgttcgctgggggcgtattgcggcaccacgccattggtgacgcgcgtctgcgttcctggcgagcatgaggcgctggaaatcgcgggacgtcaatgcgcgcaccggtattgtgctacgcaacagcggttttcgtgtcttcgcggggaattcgatgtgtccgaggatgtgcttgccgcggtcgtatacaagctcaaagacatggacgatcttgacttcgaactggtctgtcaggccgcgcactatttcgcacggcatgacgcctccggcatgaggccgcgcgctgtggcgattccgggattctccgccaaatggctgggcggcaagggctctgtgcgtcgtaaggccatatgcctgttgctggggcgcgagtcgcttgacttcgaagagcgccctggcgagatccgcctgcgctatcttgattcggcccattgtggctatcccgatctgtatgtcactcagccgtggcgtaccgccgattgcgcgaggttcaggtatgcggtgattgtggagaacaaggacacctatcaggagatgccgcagatcgatgattgcatctgcgtcttcggttgcggaagggcggcgaatcgcatggtttcgctgcttccgtggcttgccgatacgccgcatgtcgtctattggggtgacatggatgccgacgggcttgagattctttccggcatacgtgaatcgggaatcgactgcgattccatattgatgaatatggacgtctataggcgttaccggcggttcggcaccgaatatacggaacagggcaggaggatcgagccgcgcaaagtgggtgcggtgccggggctgcgtgccgaggaacgcgaattgtacgaggcgctgtgcaccggcgaaggcgtggagtatctgcgcatcgaacaggaacgtatcccgatcgtggatgccgttgccgagctgtgcgcggctggtttcccgattgtcgtctga

SEQ ID NO: 44814 - DNA, 1521 bp, Bifidobacterium bifidum
gtgggtgatatccgacgggagatggaacggctgaggccggtctatgaaaccggcgtgctgagactgctgctccgtcagaattcgatgatgtacgtggcgctgctccgcgcggccttcgacccgttgaccggcgagctgccccgtgagaccctggaggaaagcttctcgcaaagcctgtcccggctcgtcgactccggcgaataccagctcagggaggatcagaccatcgcggacgcctcccggcgcatcctcgccgacctgacccgtgagggcgatgacgattacgcatggctcgccaactcgcatgacgccgcatcgcaccggttcctgtaccgtctcaccgcccgcgcccatcgtgcgatcgaggcgctgtcgcggcttgaggatgactcccgcacgctgtcgggcgcgcaggcgaactcgatcatcatggagatcgagcatgcgcgcatgcagcttaccgccgaccccggcgagcgcgtggcgttgctcaaccgggagatcaaggcgcgcaaacacgagatacgtcagatacgccacggtcagcggcaggcggcgctcaccgaatcgcaggtcgaggacgtgattgcagtgattcacaacacgctgcgcggcgtgcccatagacctgcgtgaactcgtgttgaccgaacgggacaacggtgacgcgctccgccgccgcatgcaggcgggcgacatgagcgtcgacgacatcctgacctcgtaccacgacgaataccgcaggtccttcagcgagtccgacagcggaagacgcttcgaggacgcgttccaggtgatcatcaccgacgagggacggcagcagatcgacgcggccctgcgcgacatcgcccacacgccgtatctggccggcgagtccggcgtcctgctcgatcaggtgcgtgccgagctttcgcgcatctatgacggcatcgaggcggtgcgtcgccagatgcgcgtatccgacgaggcgatcagccgtctggtgcgacagcagaccgatacccgataccgcacgatgctcggcaagctcaaccgtctgtatgcccatgtcaacgccgacgcgaaggcgcatcagggcgacgatgcgagaccgtaccggaccgataccgcggccggcaggttccctccgctgccgtcgcgccccgcgcgcccgatggtacgaacgaccaccccgggattgtccgtaccgcagacaccgggcgatgcgaccgcgcccgacctgcgttcgatgatcgacaacgggggaccgcggctgcggcgcatggccgcgctcatcctcgaatcgcccgtctacgcggacgacgggaacggcgccatcgacatcgtcgccagcttcaacgggctgccgaaagccgagcggaaggaaagcgagctcgtcggtttcctgggagagctcggctgcggggacggagccggtgtcgcatggcattgcatatcggcagacggaagcccgagggactggatcaccggtccagtgctcgcacaagaggatgaattgcacgacatcgtgaaggaggactga

SEQ ID NO: 44815 - DNA, 1038 bp, Bifidobacterium bifidum; identical to SEQ ID NO: 44079

SEQ ID NO: 44816 - DNA, 3591 bp, Bifidobacterium bifidum; identical to SEQ ID NO: 44080

SEQ ID NO: 44817 - DNA, 1557 bp, Bifidobacterium choerinum
atggcggatgtgaggaccgagctcgcgcagctgcggccggtgtacgagaccggcgtgctgcgcatgctgctgcataagtacgcggacgtctacatcgcgatgctgcgctcctgcttcgacccgctgaccgctgaagtgccgcaggaacgtctgctgtcgcggatgcgcgaggcgatcggcgagctggccaccgccggcgaatacgcgccgcgcgaaggcgaggacgacatgatggccgcccgccgcatcctcaaggagctcaaatccgaggacgccggcgactacgcgtggatcgccgactcgctggaccgccgccagcaccgcatcatgtgccggctcacgcagcgcgcgcaccgtgcgatcgaggcgctcgcgacgctgcagcagcgcaccgtctcgatgtccggcgcgcaggtcaactcgatcatcatggagatcgagaacgcgcgcaagcagctcaccgtgaacgtcggcgagcgcatcgagctgctggagcatgagatcgcgcagcgccagcggcagatcgacgagctcagggcgcacggcatcgaggaccgtccgacgcgcgaacaggtctccgacatcatcaacgtcgtctacaacacgttgcgcggcgtgccggtggacctgcgcgagctcgtcatcgccgaacgcgacagcggcgacgcgctgcgccgtcgcatcgacgacggcacgatgagcggcgacgagatgctcacgttctaccatgagcagttcggccgcatctacaacctcagcgacgagggtcgccgtttcaacgacgcgttccaggtgatgtacgcgccggagagccgcgccgaactcaacgaggcgttgcaggacatctcgaacagcgaatggctgcacggcgaggccgacgacctgatgagcgtcgtcaaccgcgaattcgacgacatctaccgcggtatcgacgacgtgcgccgccagatccgcgtcaccgacgaaagcatccgcctgatcgtgcgccagcagaccgacatgcagttccgcacgatgtcgcgcagcctcgcgaaactgttcacccggctgagcgacgaggctcgcacgaaatcgaaacgccgtttcgacgccggcatcgccgaggcgtcgctgccgacgctgcgccgccgcccgaggcagacgccggcgcgcgtcgtcgcgcccgcgctcgccgagacgacggtcgcgcccgccgccgacctggccgcaatcgtcgcggccggcggcccgcgcgtgcgccacatggtcggcctcatcgccgcgaatccggtgcgccgcggcgacgacgtggacatggcggcgagcttcaacgcgctgcccgccgacgagcgcagggaaagcgaggtcgtcggcttcctcagctacttcggcggcgacgacgacgcgacgaagtccgatggcgtcggcgagcatgtatggtgctgcgtcggctccgacggtcgggagcgccgctggcgcacgcgcgcgctgctcgtgccgtgcggggcgctcgacgaattcctcaaggagacggccgcggcgccgatgacggcggctgtgcgcgggcggacggcatga

SEQ ID NO: 44818 - DNA, 1203 bp, Bifidobacterium choerinum
atgacgaagccgaacgatgccgacacggacgccggcgtcgtctccgcggcgagcggcgacgactggcgtgagggggtcgaggacggggccggcgtcgccgacctcgcgaacgtgcacgcgctgttcgacggcgacatcggcgacatgccggcgccggcgcgcgaggcggcgatcgcgctcaagcgcaaccgcgcgatcagcggcgacctgtaccggcaggcgcgcgactacatggacgacgtgcgccgttcgctcaacaacgacatgctcgtgccggtcgtcgacgaatactacgaggtcatgtacgccgagcctatccgcgccgacgaatacgggctgcgctcgctcaagacgcgcgtgacgctcagcgccgaggaggccgtcgtcgtcgcgatgctgcgccgcaaggtgctcgaatacgagaacgtgggcgtcgacgcggcctcgtggatcgtctcgcgtgaggagatcgtgcaggcgctgagcgtcggcggcggtcccttcgccggccgcaacagcgaggaggcggtcgtgcagcgcgccgaccggctcatcggcgcgatgcgcacctacgggttcctcgaggacggcgacgacgacgcgatgtacgtgattacgaagctcgtgccggtcgtgctcaacgccgatcgcatcaaccgttggctcggcctggacgacgaacacggcgatggcgtggatggacacggcgacgcggatggcggtgccgtcaacggcgacgccgaccgcgacgccgttgacgtcggcggcgacggacatgtcgacgcgcaagccgcggcgccggacatggtcgccgacatggccgcgacgcgcgcgtcgcgggcgtcgtcgcatgcggattacgtggacgccgacggcaatttcggtgacatcctcggtatcatcggcgcgtccgacgtcgcactcgacgagcgcggcgaggacgatgaggacgatgatacgaccggcgcggccggcgccggcggcatcgccatcggcacggccgagatcggcgatgacgagatcgacgatgccgcagccgacaatgagacgaccgcggaaaccactgcggacgacggcgccgcggacatcgtcgttgcggacgacgactccgacgccggcggcggagcggatggaggaaccgccgccggcgacggcaaatccgcaaacgacgggagcgacatgacggaggaggtgctgttttga

SEQ ID NO: 44819 - DNA, 3582 bp, Bifidobacterium choerinum
ttgaacatgacgaccgatgacctgtactcgccgatcgagctgctgccgaggcattggatgctcaaggaacgccagctcgtcaactgggggtcgtacgacggccgccacatcttccggccgtcgatggccgaggacggcacggtgacgctgctgaccggacagagcgaatcgggcaagtcgacgctcgtcgacgcgcaggtctcgctgctgtacccagcgaacgcggcgttcaacaaggcgtcgaacgccggccgctccgaccgttccgactattcgtacctgctcggcctgcgcggcatccgcaacaacaacggccatgacgagccgctgtatctgcgcggacacgacgcgaacggcgacccctatgccgtctggggcgcgatcgtcgacgaatacgaggacacggcgaacagcggctcgctgtggatcgcgaagttcatgtggctgccggcggatggcgcgtcggagtcgatgacgaagctgtacgccgtgcgcgaggcgccgatcgacccgggactgctcgatgcgcggcgcgatgagaagttcacgatcccgatgctcaggcagctctatccgggcatcgtcgcctacaattccgcccggcagttccacgaggacgtctggaaacgcttcgggctgaccgaggccgcgtgcaggttgctgcaccgcatgcaggcgtcggacgcgccgtcgcagctcgacgacatcttccgcaagggcgtgctcgacgagccgcgcgcgatccgctccggccgcgacgccgtcgacgactacgagcagtacgcgcagaacttctcgagcatggaacgcaatcgcacgcgcgtgcgccagctcgaggcgatcgtcgacgaatacgaccagtacgaggccgccgactccggcgtgcgcgcattgcgcgcgatcgacccggaacgcgacgaggccgccgatctgcgcgcgcagtggctcgacatgcgcctgacgcaggacgtcgtcgacgtgttgccggcgcacgaggccctcgccgaacgcagcgccgaagccgtcgacacgacgcaggcacgcgtcgcgcggctcgaggacgaggtcgcctcgctcacccgtcagctcaacggttccggcggcgacgagatcgaagggctcgaacacgacctcgcgcaggcgaagcaggacatgggacgcgtcgtcgaacgcgccgagaggctcgcgccgtacttcacgaaggccggcgagaagctgcccgcgacgggcgacgaatggcggcggctcgccgacgactacatggcgcgcgaccgcgaatacgagacgtgccgcgagacgctcaaacggcggcagtacgaggccttcgacgcgcacaagcaggcgcagggacggctcgacgagctcaacagggactacacgcgcaaggaacgctcgcgcacgcgcatcacgaaggagatggacgagacgcgtgcgatgatcgcgcgcgccaccggactcaaggtgtccgaactgccgtacgtggccgagctgatggacgtcgccgacgacgccgaggactggcgtgccgcgatgaacgtcgtctacgcgtcgatcgcgccgatcctgctcgtcgaccgccgccacgaggacggcttcgcggcgaaggtctcgacgatcccgcgcgaggcgatgccgcggcgcaactggcagttcgtcgacgtcgacgacgacgcggacgccgcgccgcgcgaaggctggctctccggcagactcacgttcaacgacgagtcgccgttcgccgcatgggtgcgccggcgcgtcgccgacccgcgcaccgacgcgcgctgcgtcgaggctatcgacgacctcgacgaggacggacgccaggtgcagcgcgacggccagatcaaggacggccggcgtggcagccacggcacgaagggcatggcggcggtcatcggattcgtcaccgaacgctacctcgccgaactgcgccatgagatcgtgcaggccggcgacgcgctcgcgcacgcggatgcccgcgtcggggaactcgacgccgaggcgcgcggactcgacgccgcccacgcgctcgccgaacgactgcgcgactacgactggcaggacgtcgacgcgaacggcgtgcagctgcggattgaggagctgctcgcgaggatcgacgaactgaagagcgaccctcagatcgcgcagatcagcgcagcgctcggcgccgccaacaaggagctcgcggcggcgcgcgccgccgcatacggcgccgaggacgaccggcgatgcgcgcaggcggcgctcgccacgtcacgccagtggatcgccgaccgcaggcagcgggggagcgacgccccggccgtcgacgaggcgtgcgcgacgctgctcgaacgctgctacctcgcctatttcggcgatggcacgaaggaggcgggcgaacgcgtgcgccgtctgctcgccctcgacgaccaggcgaacggctcgcacggcggccatgcacgcgcgaacgcgacgtcggcgcggcgattcatggaactcaagacgtcggtcgccgacggcgtgcgcgccaggctcggcgaactagccgggcagcgcgacgcccgccgccgctcgtgcgaggcgagcatgcgcgcctacctcgaccagtacgcggccggcgatacgcgcatcgacgccgacgtcgagaacgcgcagtacttcatgcacgacctcgacgagctcaagccgaacatgatcagcgacgaggcggtgcacgtcgaatacttcaactcgctcaacaagatctatcaggacctcgccgagctgcagcagatgctcaaggtcgacacgcagcgcatccgcgagcagaccaacaagatcaaccggctgctcgaacgctatcccttcggcgcgcggcgcggcaggctgtcgatcgtcgtgcaggtgcgcaacccggacgccgcgttcatcgccgcacttggcaggcaggtcgagcagatgagcgcgttccgcgaaagcggcagccgcgacgtcgaacgctgcaagcggctgttcaccggatgcgcgtcgttcatcgcgcagctcaagggcagcttcgacgactacgccggcgtcggacgcggcaacacgaacctcgacccgcgccgccgttcgcgcttcttcggatcggtcgcgcaccccgacggccagatcgagcacatcaactcgaccggcggcggctccggcggctatctgcaggagctcacgtccttcgcctacggcgcggcgctgatgtatctgctcgccaacgacaacgcgacgaagccgtcctacgcgaccgtcttcctcgacgaggcgctcatcaaggccgacggccagtacacacgccgcgcgctgagcgtgctgcccggcctcggattccaggtcatcgtctcggcgcccgaatcgaagacgaacgagatcatgggatcggcgtcgaaggtcgtcgtcgcgcggaaggacccggacagtggccgcaccgtgctcgagatcgcgcgcatcgacggcgacggcaacggcggcgatggcgacagtgacgacggcagcggcggcgatggcgagacggtcgcgcacgacgttgctgccgccgaagtcgacgatgccgacgctgccgccgcacacgacggggacgacgcgtag

SEQ ID NO: 44820 - DNA, 1179 bp, Bifidobacterium choerinum
gtgggcgccgcgcgcgtcgcgcatccgcggggcacggcgacgcccgacgagctgcgcgcatgggtcgcggggatcgtcgaacgcgagatgttcgccgccgacgacccgtggccgcgcacgaaggcggtgcattggccgaaggaatcggagctcctcgccgacgtcaacgccgtgcacgacgcgaacaacgcgctcaaggacttcgcggcgcgccacggctgcggtgtgacgtgcacggcgcgccgggtcggcgcgcgcgtcatgctcgtcgaccatgtcaccgtgccggacgagcgcgtcgcactcgcgatcgccggtcatcggctgcgtcgcgaacgcgaacggacgctcgcacgcgcggcgcagctcgaggagacgtgcggcgtgacgccggaggtcgcgatgccggcggtgcgtcggctgcgtgacgagacggacgtcgatttcgcgttgttcacggcggcggccgcatggttcggcgcgcatcgcggcgacatcgcggcgatgacggcgcgcgaggtgccgcttgagggattctcggcgaaatggctcggcggcgcgcgctcgcagcggcggtcggcgatctgcacggtgctcggcgtcgacgcgctgccgctgcgcgaacgtcccgaggagctgcgctatcgccatctcgacccggcggcggccggcgaccccgaccgcatcgccgtgacgccgcagcacgagccggaacggccggtgcgacgcgcgatcatcgtcgagaacaaggacacctatcaggcgatgccggccttcgtcggcgcggtgtgcgtgttcggctccggcttcgcggcgacgcgcgtcgcgcggctgctgccgttcctcgccgactgcgacgtcgtctactggggcgatgtcgacgcggccggcttcgagatcctctcggccgtgcgcgcatcgggtatcgactgcacgagcatcctgatggatcgggcaacctatatgcgcttcatgcgctttggcacgaggctcgacgcgcgcagccacatgatcggcgcgcatgagccgcttgcgcgcacggcgatgcggctcgatgacgacgaatacgcgctgtatcgcacattgtgtgcagcgggggagtcgcaggtgccgcgcatcgagcaggagcgcatcccgatcgcgcacgccgtcgccgcgctgcgggcgattggctggtaa

SEQ ID NO: 44821 - DNA, 1527 bp, Bifidobacterium biavatii DSM 23969
atgggcgatgtcaggcgggaaatggaacggctgcgaccggtctacgaaaccggcgtgctccgcctgctgctgcgcaagcactccatgacgtacgtggcgctgctgcgcgccgcattcaaccctctgaccggcgaactgccccgcgaaatcctcgaggaacggttcgcgcaaagcctgtcaagccttatcgacgctggcgaatacgcgctggaggaagaccaggacctcatcggcgccgcgcaccagatcctcgtcgaccttacccgcgaaggcaacggcgactacgcgtggctcgccaactcgctcgacatggcttcgcaccggtttctctaccggctcaccgcccgcgcacaccgtgccattgaagcgttggaccgtctgcaggacaccaccagctcgctgtccggcgcccaggccaacagcatcatcatggagatcgagcacgcgcgcatgcagctgaccgccgatccaagcgaacgcatccgactgctcaaagcggagatcgccgcacgcgaacacgaaatcgaacagatccggcagggacggcaacgcgaccggctcagcgacgaacaggttggcgacatcatcgccgtcatccataaaacactgcgcgacgtgccgatcgacttgcgcgaactcgcgctcgccgaacgcgacaacggcgacgcgctgcgccgacgtatgcaggccggcgacatggacgtcaacgacaacctcacctcctaccatgacgcgttccgccgctcgttcagtgaatccgactccggccgccggttcaacgacgccttccaggtgatcatcaccgacgaaggacgccagcagatcgacgacgccgtcgcggccatcgctgcaacaccgtatctggccggcgaatccagcgtgctgctcgaccaggtcaccgccgaactcgaacgcatctacgacgggatcgaagcggtccgccagcagatacgcgtctccgacgaggcgatcagccgactcgtccgccagcagaccgacaccagataccgcaccatgctcgtcacgctcaaccgcctgtacaccacgatcaatgcggcggcgagaacgcatccgaacgacgatacgcgtccctaccgcacggacgtgggcgacgtcacgttcgccgggctgccgacccggccggcacgatcgatgtcccgcgcggccgtgcccggcctcgacgagcatgccacgccggttaacatcccagaaccggacatccgctccatgatcgtcggaggaggcccgcgcatacggcacatggtccggctcatcatgcgcgacccggtcaccgtgagcgggccgaacggttccgaactcgtcgatatcgccgccagcttcaaccggctgccggccgacgaacgacgggaaagcgaaatcgtcggcttcctgtccgcgctcgcatcggtcgaaggcgacgatacggtctggcattgcatctcgctcgacggcacgccgcgcgactggacaacgagacgggtcacggccggcatagacgaactcaacgagacgatcaaggaaggatga

SEQ ID NO: 44822 - DNA, 717 bp, Bifidobacterium biavatii DSM 23969
atgggcgacgacaacgcgaccgcagcactgttcgaaggcgacaccggcgacatgagcgcccctgcccgcatggccgccatcgcgctcaaacgcgaccggtacatcagcggaaccgcctacgacaccgcaatggacaacctcgaccaggtgacccgttcgctcaacaacgacatgctcgaactcgtcgttaacgaacgctaccggattatgtacgcgaccccagtccccgacgccgaccagaacccccggtcgctcaagacgcgcgtcagcctacgccgcgaggaggcggcgctgcttgcgttcctgcgcatccgcgtcctcgaatacgagaacctgcacacgcccgcagacgaatggttcgtcagcttcgaggagatccgcgcggcgctcgccaccggcgccggctatctggcctcacgcaacgacgaggagggcgtgctcaagctgatcggcgcgattgtctcgtccctgaccacgtacgggtatctggaacgttcggccgacgacgagacgatgctgcgcatcaccgcgctcgtacccgtcgtattggaccgcgatcttgcgcagacatggctggacggccgggacgagatcgacgacgaagatgcggacgctggttcggacgctccggccggcgacggaggaattgacgatgcgaacggcgcggccggcatggacgacgcggacgatgatgccggcgacaaggaaggggagtga

SEQ ID NO: 44823 - DNA, 3495 bp, Bifidobacterium biavatii DSM 23969
atgacggacaccatgagcgaacccacgatgccggacggcgtgcgcgacattcagatcgttcccgaccggtggatgatggaaagccgacagctcgtcaactggggctcctacgacggataccatgtgttccgcccgtccacggacgacaagctgccggtgacattgctcgccggcgccagcgaatcgggcaaatccacgctggtcgacgcgcagatctccctgctgtacccgtccggcacgccgttcaacaaggcgtcgaactccgggcgctccgaacgcagcgactacacgtacctgcgcggcatgatcggcgtgggcgacactgacgacgcgccgatgtacctgcgtggcaccgacgcggacggcatgccgcacagcgtatggggcgcgatcgtggacacgtaccgcaacgccaccaccgggcagacgctctcctgcggcaaattcctctacctgatgccaggcgagggccgcggcgacgtgcgccgccagtatgtcacctggaaccgcaccatcgacccacgcctcatggaccagttccgcgacggcccgttcacatccacccagctcaaggcaacctacgagggctgctcgatcttctcgaacgcgaacgcgttccacgcccgcatctggggcgtcatgggcctgaccgaagaagcatgccgactgctgcacaagatccagtccgccgacgcgccgtcacggctggacgacatcttcaaacagggcgtgctcggcgtgcccgcggcgatcggcaaagccgaggacctggtcggcgactacgagcggtacgccgccaacttcaacagcatggaggagaaggctcgtcgcatgcagatgctgcagggcatccgccaatcccacgaacaatacgaccaggcgcaggcgaacgtacacgcgttcgacgtcgtcgacccgaacggcgaacggggccgcgcagccatccgccgctgggcgctagcgcacatggccgaagaagtgaccgcccaactgccgcacgacgaatacgaacgcgaccggcatatgcaggacgccgccgcggaacacgcgcacggcgacgaaatcaccgcgcgcatcgacgcggtcaaagcgcagatccaaggcgtcgacggcggcagcctcgcccggctcgaactcgacctgacccaagcccggcagaccctgcacgccgtaagcgacagccacgatcggatcgcccgtcaattcgcgaccatcggcgaaaccatccccgacacccgcgacgcatggcaggaacggcaggaacaggccgcacgattcgtcacggactacgagcggcgccgcacgcagctcgaccacgaccagtatgaagccgcatccgcgcgctcgcaagccaacgacgaactgaaccgcctcacccgcgactacgaacgccaacgcacccaacgcacgcgcatctcccagcagatggacgaagaacgcgccatgctgtgccgagccaccggcctgagtgccgaagaactgccctacgtcgccgaactcatggacgtgcgagaggacgaagagacatggcgcaccgcgatgaacgtcgcctacgggccgatcgcccgcacaatcctcgtcgaccagcgccacgaacagggattcgccgcacgcgtcagcaccatcgacccgcatctcatgtcacggcgaacctggcggttcgtggacacgagccgcgactacggacatacgaacaccgccgcagtccacacaggcgacgagccttggctgtctggtaaactgcgctaccgggaagactccccgttcgccggatggctgcgcgaacaaaccgccgacaaacgatacgacgcggtgtgtgtcgacgccatcgacgacgcggacgaacagacccgccaagtccagtgcgacggccagatcaaatccggacgccacggccagcacggtatcaaggacatccgccaggtcatcggattcgtcaaccagacatatctcgacgaactgctccggcaggcacaggacgccaaaaccgcgttcgccgaagctgaccgatcgtacgagacgatccgacagcaggccgaacgattgcgtcgcgaactcgcgctcgccgagaacctgaccgaaacagactgggacagtgtcgccgtgcaggaggccgaacagcgcatcacgcgcatcgaacaggacatcgacacgatccgccgcgatccgaaactcgccgaactcaccgccacgcgggaacggctggaacaggagctcgaacgcagcaacagccgccggttcaaggcgcagaatgccgcggactcatgcgcgcaggcggtcgacgcggcccgcgcatggctggaacgcaacgcggtggccgacaatgcgacaacggacgggtcggctcggatcgtgttcggcgacgacgtggcggaacgcctgggcgccgcatatgaacgccagttcgcaggccagaccgatccggccacgcgcgcgcatctgatcatcggcgccgggcgaacggacgtggccgacgacatgcggttcgagaacatgatggtcgaccagatcggcaaggagatcgactcccgccgcaccatgctcgccgaacaggccgacgcggcgcgcaagacactcgaatcgcagatgcaggcgtatcgcgacgtgtacgcgaaggacgacgacgcgttgaccgccaccgtcgccgactaccgctactacgagcaggagctggacagtctgtcgcatctggcggccagcgacgcgaccgaagctgaatacgccaactgcctgcacaaactgtactgggacgccctcaccctgcaacgcacgctcaaatccgacgaggcgaccatcaaggagcagctgtcgcgcatcaactcgatgctcaccgggcagcaattcggtcccaagggcggccgcctgtcgctgaacgtcaccgtgcgtcctcccgaacgcgcgttcggcatggccttgcgacgcatgagcgaaacgctcaccgcatgggagcagcagcccgacgctgatgtgatcgccctgcgcaagacgttcggatcctgccgtccgttcatcgacatgctgcacgaccagctcgatcaggtcaaggactccggcggcatcaaacaatacggtgcacgcgatctcgacccgcgcgcccgatcctcgttctacgcgaccgtgcaccacacggatgggccagacgaacgcatcacctccaccggcggtcgttccggcggcgcattgcaggaactcacctcgttcgtctacggtgcggcgctcatctacctgctcggcgaaggcagcgtgaccggggagccgtcgtatacgacgctgttcctcgacgaggcgctcatcaaggcggacggccgatacaccaagcgcgcactcatggtgctgccgcggctcggattccaagtgatcgtctccgcgcccgaaagtaagaccggcgaaatcctcgacgtgtccaccaaggcgtacgtcacctacaaggacccggacaccggacacaccacgctgcgcgaggccagcctcgacacgaccggcgcgggggagtga

SEQ ID NO: 44824 - DNA, 1194 bp, Bifidobacterium biavatii DSM 23969
atgcgcacggtcagggacatcgcggcgatgatcggccgacggctgtcggcaagcagatacgcggacggcgacgcgtggccgtacacggtgtccgtgcagctgccgtccagacaaagcgatctcgaggatgcggcgcttgccgtgcacaccgacggcaacgtgcatgccaacaataaggcgattcgtgactgggcggcgaggaccggctgcgagacgaccgtgcagcgtcggctcatcggcaacgtgacggtcgaactgatctcgaacgtcatcgtcggggatgagaccgtcgcgctacgggtcgtggaccgtgcgaccgcggctgattatcgtcgtgcgaggcggcgactcgaacggattcatgagcggttcggtcacatcccggcaacggatgcgctgaccgccgcacggatgacggatgcggaggacgacgtcgatttcgaactactgctgcacgtcgccgcatactgcgcctcgcacgacatcgccggtctgcggccgcgtgcggtgccgcttgccgggttcagcgcgaaatggctggatcgcaaggccacgaagcggcgcaaggcggtggaactgctgtgcggcaaatcatcgctggcattggacgagcggcctcgggaactgcggttccggcatctcgacccgacgcgcgtgctgctgccggatgcggtggccgtccggccgtgggacgacggcgtggcattggggattcgctgcgtggtgatcgtggagaacaaggacacgtaccagctgatgccgccgatccgggacggattatgcgtgttcggctccggcaaggccgcggctgacggcctgacgctgctgtcgtggctgttcgacgagcgtgctgcgaacgttcacatagtgtactggggcgacatggactcggctggattcgagatactgtcggccgtccgacagctggggatcgactgtgactcactgttcatggaccgtacggcgtacgaccgatacggcatgttcggcacgaacgatggccccgacggcaagcctctcgcacgtcaacagccgaaaccgctttccgggctgcgtgacgacgaacgagaactgtacgaggcgctgtgcacgggggaggacgtagcatacctgcggcttgagcaggagcgtattccgatccccgacgcggcggctgcgttgcatgacatggggattcccgtggtaacggattga

SEQ ID NO: 44825 - DNA, 1509 bp, Bifidobacterium gallicum DSM 20093 = LMG 11596; identical to SEQ ID NO: 42315

SEQ ID NO: 44826 - DNA, 789 bp, Bifidobacterium gallicum DSM 20093 = LMG 11596; identical to SEQ ID NO: 42316

SEQ ID NO: 44827 - DNA, 3468 bp, Bifidobacterium gallicum DSM 20093 = LMG 11596; identical to SEQ ID NO: 42317

SEQ ID NO: 44828 - DNA, 1392 bp, Bifidobacterium gallicum DSM 20093 = LMG 11596
atggctgactccggtgaccaaaagatgcgctcgcagttcccggacttggaacgtgtacgtacgcaagcgaaccgtgatctgataaggaatttatctgacacaatggtgccttggcctcgacgcataccattccgttggccgacacaagccatactggaatcgcacgccagcgcatgttatgcacatgagcgtagtgtgcgagaatattgcacgcgccaagggcttatgcgaagcgaagtgaccaagcgcatcggcggccgttccgtaagcttaactggtgccattatcatcccggatcaggaagcggcactgcgggttgctgatgtcgcaatacggaagcaatacgcacagggaatgactcgcatacgccagttgcacgatcagcttgccgtcagtgatcagacagctaggcgcgttatacacctcatgcgaaccgagagtgatattgactttttgttgcttatccaagcgacccaatgtgtcagtaatgtgctgaaggaaatgggatacagacttgattccggattccttgatattggctgtgaagactgcgcttcaactactactgtgccacgatgtgcacctcatgtgcaatgtgtcactgatgagcagggcaaaacatcacgggtgattcatttgccgtggtccgctcgggaactgccgctcgcaggatttagtgcgaaatggttaggttcgcaatcatcagttagaagacgagccttgactgcattgcttggtttggatggaatacagttcgtggaacggccgggggaattgcgattacgatatcttgctaacgagtatgaactgttaatcagcaaaccgtggacaccagacacggatcaccaagtggatatggtgattattgtcgagaacaaagatacctatcagcacatgccaaatatgccacagtttggtcgaggtgttgttgtgtttggacaaggacgcgtagcgcaaaaactggtatcacaactgctaccttggatcacgcaagtgcctgtggtgtattggggtgatatggatgccgatggtttggaaattctggacggattacgtgggtctggggtgtgcgcctattcagtgcttatggacgaaaatgcgtatgcggaatatgcggatttcgctacagcgctagatgcggcgagccgacctatcgtattacatgcgcccaagcagactccatcattgacgccagatgaacgtgatttgtatgtagctttatctgagggaggctcacattccgaggcgcctcgcatagagcaggagcgtattccgttagacgtggcttgccgtgcgattgctgcgattatgcgcaatatgcagaaggaaaatggcatgcgccctgatgaagatgcagattgttgtgtggatgatcagacgggggataggtag

SEQ ID NO: 44829 - DNA, 1632 bp, Bifidobacterium longum subsp. longum; identical to SEQ ID NO: 42476

SEQ ID NO: 44830 - DNA, 675 bp, Bifidobacterium longum subsp. longum; identical to SEQ ID NO: 42399

SEQ ID NO: 44831 - DNA, 3549 bp, Bifidobacterium longum subsp. longum; identical to SEQ ID NO: 42478

SEQ ID NO: 44832 - DNA, 1185 bp, Bifidobacterium longum subsp. longum; identical to SEQ ID NO: 42479

SEQ ID NO: 44833 - DNA, 1563 bp, Bifidobacterium pseudolongum subsp. pseudolongum
atggcagatgtgcgcacggagctcgccgagctgcagcccgtctacgagaccggtgtgttgcgcatgctgctgcacaaatactccgacatctacatcgccatcctgcgcgcgtgtttcgatccgctcactgcggaagtgccacaggatcgcctgcttgccgcgatgacccgctgtgtgggcgaactcgtggcagacggctcctaccgggtgcgcgagggcgagacggacctcgaggccgcacggcggatcctcaaggagctcaaagcggaaaacgaaggcgactatgcgtggatcgccgattcgctcgaccggcgccaacaccgctggatgtgccgtctgacgcagcgcgcgcaccgcgcgatcgaggcgctcgccgcgttgcagcagcgcaccgtgtcgctctccggtgcacaggtcaactcaatcatcatggagattgagaacgcgcgcaaggagctcaccgtcaacgtgcatgagcgcatcgaactgcttgagcgggaaatcgaggagcgccgcacgcagatcgcccaattgaagcgcgatggcgtgcaggagcgcccgacccccgaacaggtctccgacatcatcaacgtcgtctacaacaccttgcgcggcgtaccggtggatctgcgcgaacttgtaatcgccgaacgcgacaacggcgacgcgttgcgccggcagatggacaacgggtcgatgggcagcgacgacatgctcgcctactaccacgaggaatacgaacgcacctaccaccagagcgacgaagggcggcggttcaacgacgcgttccaggtcatgttcgccaccgacaggcgtgcgcagctcgacggggcgctcgccgacatcgccggcagcgcatggctgcatgacaaggcggacgacctcatggccgtcgtggggcgcgaactcgacgatatctacagtggcatcgacgcggtgcgtgaccagatccgtttgaccgatgaaagcgtcaaactgcttgtgcgccagcacaccgacatgcagttccgtaccatgtcacgccagcttgccgcgctgttcaccacactgtccgggcgtgccacggccaaggaccatacgcggtatggcatcgggctgtccaccgccacgatgccgacgctcgccacgcgtgcccgtgaaacacccgtgaaaaccaaggcccccgcgttgcggatgcatacggacgccgatgcctccgcgcttgacctgcatggcatcgtcgccgtgggcggaccccgcatcgcccacatggtcgccctcatcgcggagcatccggtcatgcgtgaaggcgcggtagacatggcggccagtttcaaccacctgcccaaggctgagcgcagggaaagcgagatcgtggggttcctgagctatctcggtggaacggaatcaggcgaaagtacttggcattgcgtggcgcccgacggggccgagcgagcatgggtcacgcgtgatgtgctggtgagtccagacgagcttgacgagttcctgcaggagtcaacgcgcactgggcaaggcgcggcaccacatcgggaaaggacacggcatgacacaaccgacgaatga

SEQ ID NO: 44834 - DNA, 774 bp, Bifidobacterium pseudolongum subsp. pseudolongum
atgacacaaccgacgaatgacgaccagggtatcgtctccgcatcggtcaccgcccaggagggccatgtggccgaacagtccgtcgacgaaatgggcgtggcggatgtctcgaatccgttcgcgctgttcgacggcgatgacggcgacatgcccgaacccgcgcgcgaggcggccatcgcgctcaagcgcaaccgcgcgataaccggtgagatgttccggcaggcgatggaccatatcggccatgtgaagcgttcgctgaacaacgacatgctcgtgccggtcatcgacacattctatgaggtgatgtacgccgagccagccgcccccagccaggtgcgcatccgttcgctgaagaaccgcgcgtcgctgagcgcgcgcgaagccgtgctgctcaccgcattgcgccgcaaagtgctcgaatacgagaacgtggggatggacgcgagccaatgggtcgtctcgaaagaggagatcgtgcaactcatgtcgaccggagccgggccactcgccggccggaacagcgaggagtcggtgaaccggcaggtggagccgctcatcaacgcgatgcgcaccaaccagttccttgtggatgtagaaggcgaggagggcatctaccgcatcaccatcctggtgccggtcgtgctcaacacacagcgcatcggcagctggatggccacgaatgacgacctccagcccacgccggcggaccaggacgaacccggcaccacccccgagaacgatgcccaagccgcaaagcaggaggagctatggtga

SEQ ID NO: 44835 - DNA, 3462 bp, Bifidobacterium pseudolongum subsp. pseudolongum
atggtgaacgcgcgcatgtccgaagacctctacgggcagattgaactcaacccgccgcactgggtgctgcaggaacgccagctcgtcaactgggggtcgtacggcggctaccacaccttcaacccctccacgatgttcgacggcacggtcacactgctcaccgggcaaagcgaatccggcaaatccacgctcgtcgacgcgcaggtctcgctgctgtaccccacgggcgccgccttcaacaaagcgtcgaacgccggccgttccgaccgcagcgattactcgtacctgcgcggccagcgcggcatccgcaacgacaacggccatgacgaaccggtgttcctgcgcggcatgaccgacgatggcgagccgtatgcggtgtggggcgccatcgtggaccggtatgaagacacgaccggcggcggcacgctgtcgatcgcgaagttcatgacgctgcccgccggcggcagaagcgaggacgtcgacaagttcttcctcgtgagtcgcgacccgatcgacccgcggctcatggacgactaccgcgacgacgtgttctcggtgccgctgttcaaacgcgtctaccgcaccgcaaccgtctaccggcaggcgaacctgttccacgaagacgtgtggaaccggttcgggctcaccgaatccgcgtgccgcctgctgcaccgcatgcaggcgtccgacgcgccgagccagctcgacgacatcttccgcaaaggcgtgctcgacgaaccatccgcgctccatcgcggccgcgcgctcatcggcgattacacgcagttcagtgagaacttcaccgcgatcgaacacaatctgcgccgcgtggacctgctcgaacgcatggcggacaagcacatccgctacatggatgagcgcaagcgcatggagaccttacgcgccgtggatcccgagcgcgcgggcagcgccgaggcgcgtaaggcgtggcttggcgcacgcgtgcacgaatgcatcgcgcgcgtcgcccccacatacgaacagggggtggccgaaaaccagaccaaggtcgcatccgcgcaacgcgagacagaccggctcgacgccgaactcgagacgatccgcgagcagaagaacggccatggcggcgaccgcctgcagcggttgcaggaacagctgcgcgacgccgagcgcgaacgcgagcgcatgtccgcgcgcatcgaacgcctcgtgccacagttcacaaaggccgggcgcacggtgcctaggacggcgaacgcatggcaggcgctcgccgaggaggccgtcggagtcagggacgcatacgatgaacggcgcgaggagctcgacgcgcttggttacccattgcaggagcggtacagcgcgatgcgtcgagaggttgaggaactgcaggcggacatcgagcgcaaacgccgctcgcgcacgcgcatcaccaaggagatggcggaggcgcgcacgatgatggcgcgcgcggccggtctcgaaccggagcaactgccgtatgtggccgagctcatggatgtgcagggcggtgaggagcagtggcgcacggcgatgaacgtcgtctacgcgtcgctcgcgcccgtcatcctcgtggacaagcagtatgagcgcggttttgcacgcgcgatcagccgaattccgcatgcatcgatggcgcgccgcaactggcagttcgtggatgtgcagcaggactaccacggcgagccgcgcgaaggctggatgtctggcaaactcacgttcaacgaggaatcgccgttcgctggttgggtgcgggcgcgcgtggcggatgcgcggtcggacgcacggtgcgtgacgcatatcgacgacagcgacgtgcgcacacgccaggtgcaggaggacggccagatcaaagacggcgcgcacggcagccatggcaccaagaacatcagccaggtcatcggttttgtgaccgaagcgtacctgcgtgaacttgccgatgagcttgagcggcttgaacggacgatggaccgcgccaacggggagatcgagcgcatcagcgcgcgcaaagccgagctcgaggcgcagcgcgaccttgcgcaagcggtgttggcggtggattggaacgacatcgacgtgcagaccgccgacacgaacatcgcgatgctgcatggggagatcgaacgcatcctcgccgacccggcactcgccgaactcgacaagcgtgagcgggagtgcaaagacgcgctcgccggcgcgcgcaaacgcctcgcgcgcgccgaggacgagctcgcgggggcgaaacatgcgagcagggcggcgcgcgcgtggctcgaggcgcacggcgacgagcggccgccggcgctcaatgaggcatgcacagcgctgctagagcaggccttcgatgggtatttcggtacggggaccactggcgaggagcgggcggcgcgcatgctcgggctcgatgccggctcgcgtgcgcccgggcacggcgcagccgccggcacagcggtgaacgcgacactgcacgcgctcggcaagcacgccgagaaagcagtgcgcgcacggctcgaggaactgcgcggtgtgtgcgaggcgcgcaaaagcgagtgcgagacggccatggccgcgtacatcgaacagttcatggcgaacgacgaccgcgtgagcgcggacgtggagaacttccaggtgttcgagcacgatctgcgcgaactcaacgcgagcacaatccgcgcgtccgcggacgaggagtatttccacagcctcgagaagatccaccaggacctcatgcagctcaacacggcgttggacgccgaccggtcgaagatcctcgagcagatcggcaagatcaaccgtctgctcgaacgctatccgtttggtgcgcggtgcggccggctctcgatcgagccgcaggtgagcaagtcggacccacagttcctcgccgcgttgcgcgcgcggcttgcggacctcaatgcctaccagcagcaggggcgcaaagacatcgaacagtgcaagcagctgttcgcggcatgcgctccatttgtggagctcgtcaaggcgagcttcgacgagttcgcagccaacaagcggggcaacgcgaacctcgatccgcgccgccgctcccggttcttcggtgaggtcaccgaccccgatggcactgtggaacgcatcaactcgaccggcggcgggtcgggcggctacctgcaggaactcacatcgttcgcgtacggcgccgcactgatgtatctgctggcgaacgacaatgcgaccgaaccctcgtatgccaccgtgttcctggacgaggcgctcatcaaggccgacggccagtacacgcgccgtgcgctgagcgtgctgcccggattgggtttccaggtgatcgtctcggcgccggaggcaaagaccggtgagatcatggcctcggcgtccaaagtcgtggtggcgcgcaaagaccccgaaaacgggctgaccgaattgcgcgcagcggtgctgggggccggcgatgacgacgccagctga

SEQ ID NO: 44836 - DNA, 1128 bp, Bifidobacterium pseudolongum subsp. pseudolongum
atgacgacgccagctgacatcgcgggcgccatcacgcgccgcgtggagaggcggctgtactgcacgcaggagaactgtccccatgcgttccccgtgcgcttggggtctcagcgggcgctcgaagccgatcccatcaccacattcgacgcggacaacgccatgcgcgcatgggccgaacgccacggctgccggatcgagaccgtgacgcggcgcgtgggcacgcccgtcgacctcgtcgcccgcgtggtcgtgccggatgaggccacggcgttgcatgccgccgggcgtgaggtgcgcgcacggcgtgaactggtggttgcgcggatgcgcatggtgtgcgcacggttcggcgtggacgggacgcaggcgatggcggtcgtgaagatgctgagcggcgaatccgatgtggatttcgagctgttcgtgcgcgccgcgcagtggttcgccacgcaccgcgatctaatcgcgggtatgaccgcccgcgaggtgccgttgccgggattttccgcgaaatggctcaaagcatcgcggtcgaggcgccgacgtgcgatctgcacactgctcggctggagcgaactgccgctgcgtgaacgcccaggcgaactgcgctaccgttacctcgacgaagcatgcgcggcgtggcccgaacgccttgccactgcaccggtgtccgcgcccgaaacaccaatcgataccgtgctggttgtggaaaacaaagacacctaccaagccataccggccatgccgtgcacgatgggggtgtttggttccggttttacggtgacacgcctgcgcacattgctgccatggtgtgcgggtgacggcgtgcgcatggtgtattggggagatatggacgccgatgggttggagattctcgcccggctgcgtgcgaccggcgtggcatgcgcaagtctgtgcatggaccgtgagacctacgacgcctatgagccattcggcaccacattggatgcgcatggttcgctgattccgccgcgtgattccaaagaaggcttgtgcctgacggatgaggaatatgcgttctaccgggcgctgtgcacaggcgcactgccatacccccgcgtggagcaggaacgcatccctatcgcgcaggcccttgcccgcctttga

SEQ ID NO: 44837 - DNA, 1497 bp, Bifidobacterium ruminantium
atggaacggctccggcccgtatacgaaaccggcgtgctgcgattgctgctacgaggcaattccatgttgtacgtcgcgctgctgcgctcgacgtttgacccactcaccggcgaactgccgcgcgaaatcgtggaggaacgcttcgcgcgcagtctggcaaggctcgcggaaaccggtgactatacgcccaaggacgggcagacgaatgcggaggccgcgcatgcgatcctgtcccaactgacgaaggaaggcgaaggcgactatgcctggctcgccaattcgcttgacatcgcctcgcaccgatacctgtatcgtctcacggcgcgtgcccaccgcgccatcgaggcgcttgaccggctcgaggacaccactaaggcgctgtccggcgcgcaggccaacagcatcatcatggaaatcgaacatgcgcgcatgcaactgacggccgacccgcatgaacgcatccgcctgctggaacgcgacatcgaggagaaacaaaagcagatcgacgagctgaagcacagcgacacgttggacaaactcacctcgcaacaggtgggcgacatcatcggcgtcatccacaacacattgcgaggcgttccgatcgatctgcgcgaactcgcgctcgaggaacgtgaccatggcgacagcctgcgccgcagcatgcaatcgggaaccatcagcgtggagcaggctctcggcacctaccatgacgcatatcaccgatcgttccacgaatccgacagtggtcgacggttcgaggacgcgttccaagtgatcgtcaccgatgagggccggcgtgaaatcgacgatgcagtacgcgacatagcgcaaaacccgtatctggaaggcgagccgggcatcctgcttgcacaggtgcgcgccgaactcaaccgcatatacgaaggtatcgaggacgtacgcagacagatccgcatatccgacgaggccgtgagccggctggtacgccagcagactgacacgcattaccgcaccatgctggacaagctccacagattgttcgtgcggaccaacgacgatgcgaagaaccatcctggttcggcggaattcccgtatcatacggacaccggcatggcgcagttccaggcgttgccgtcgcgtccggcgaaatcgatggcgcgtgccacaaccgccggcctgcaggatgcgcccacagcggaaatcgacgcgcccgacctcaaaaccatggtcgagatgtgcggaccaaggctgacgcatatgatttcgctcatccgccgtgatccggtgagaacgtcggacggcatgttcgtggatatcgcagcaagcttcaacaggctgccacgcgccgaacggcgtgaaagcgagctgataggattcctcagcgccatgcgggcgcaggacggctcggcgagcgcggcatggcattgcgtatcgattgacggtggagaacgtgtatggcgcaccagaccggttctcgccagcgaatcgacgcttgacggcatcatcgaggagggatga

SEQ ID NO: 44838 - DNA, 831 bp, Bifidobacterium ruminantium
atgacggatgatatcgacgaccaggatgtcggcgccgagacgatggacggcggggaaaccggatatccatcggaggagcccacaacaccgcagaccatgccggcgctattcgacggcgataccggcgacatgccgctcgaagcgcgcagggccgcgatcgcgctcaaacgcgaacggtacatcgacggcagcctgtacgagcgtgcgtgcgaataccgtgaggccgtggagcgctcgctgaacaacgacatgctcagattggtcgacaacacgaaataccggatcatgtacgcgtcgcccgtcactgattcggagacgaacatccgcgcgctgaaaacgcgtgtgagccttacccgggaagaggctgccacgctcgcggccctgcgtatcaaggtgctggaatatgagaaccagaaggccgaacccggcgactggctcatcagtttcgacgacatccgcgcgatgctcgccacaggtgcgggattcctcgccgccagcaatgacgaggagggtacggcgaagaagatcgcctccgtcatctcgcgtatgcgcacctacgggtatctcgcggacgccggcgagacgaacatgtatgtgatcactccgctggtgccgatggtgctcgaccgcgaccttgccgacgaatggcttggctccgggaagatggatgacgctggcggcatggacgataccggtaccgaaggcttgtccgattttgacgatgaaaatgacatggccgattcgaatgggattccggcatccgatgttgaacaggatgcgttcgatttcggcatggccgacgatttctttgatggagaggaaaaccgatga

SEQ ID NO: 44839 - DNA, 3459 bp, Bifidobacterium ruminantium
atgacagaagacggcatgaaaatcgtttccgaccggtggatgctgcgaagccggcagattgtcaactggggctcctacggcggctatcacgtgttccgtccctccatggacgcggatatgccggtgaccttgctcgccggcgccagcgaatcggggaaatccactctcgtcgacgcccagatctctctcctatatccctccggcacgccctacaacaaggcgtcgaactccggacgctccgaacgcaacgactacacgtatctgcgcggcatgatcggcataagcgacggcgacgacggcgagaccccaatcttcctgcgcggcagggacgcggacggcaagccgcagaacatctggggcgcgatcgtcgacacctatgtgaaccgcagcgacggcggcatactgtcctgcggcaagttcctgtacctgaccgccggcgacgggccggacgggctgcgccgccagttcgtcacgcacaaccagctcatcgacccgcggctcatggaccagcatcgagacacgccattcacccgaggtctgatggagcagacctatccgggatgcacgacccatgtcaacgcggccgcgttccacgcctccatctggcaggacatgggactaagcgccgaagcctgccggctcctgcacaagatacaatccgccgacgctccgtcgaaacttgacgacatcttcaagcaaggcgtcctcgatgtgccggaatccatccgtctcgcccgtgaaaccgtcgatgactacaaccggttcagcgagaacttccatagcatggaggaaaaagctgcccgggtcgccatcctgcagaacatccagacacgctacggcgaatacgccaaacaactcagcgaacgacgcgaatacgagcccgtcaaccctgatgacgagcatggggagaccacacttgccgcgtggacacgctcgcgcatggccagcgaggtgcgctccggactgcccgcggcacaaagcaaggcgaaggaatcgcaggaagccctcaacctttcgcagcagcgcattgacgatctcaacgcgcagatcgaagccgtcaaggagcgcatcagcggcatcgacggcggcagtctgcagcagcttggcaaagatctcaaacgcgcgcgtcaagacgccgacgaggcccgtcgccaacggcatgacatagccgaacgattcgaacgaatcgaaggcaaactgcccaccgacgagcatgcgtgggatctaaaacgcgccgcgctggccgaatcgaacgacacatatgacgaacggttggaggaagcgcaggccaaataccggcagctggtgggggagctgcatgacaggcagcgcgaacgcgacgtgcttcaacgggattaccgacgcaagcttgaccacaggacgcgtatcagcgacgagatggacgatgcgcgcgcgctgatcgcgcaggcgaccggattggatgagacgcagctgccgtatgtggcggaattgatggatgtggacgagcgtgacgaacggtggcgtctggcgatgaacgtcacgtacgcgccgatcgcgcagaccatactcgtagacaaacggtacgagcagggattcgcagcgaaggtcagcaccattgatccgacacgtatgacgcgtcgcacgtggcgtttcgtcgacacggatgcacggtacgattccgctagcaacgagggatggatgtcgtcgaagctgcgatacaaggaggattcgccgttcgtcggatggttgaagcagcagacgtcctcggatcgtttcgatgcgcgttgcgtggacgccatcgatgacatggatcgcgacgagcgccaggtgcaggtcgatgggcagatcaaatccggcgatcgtggattccatggcgtcaaaggcatgcaccaggtcatcggtttcatgaacgaacgctacctggccgagttgaagagccagctcgacgaggccggacaagccgcggaggacgccgaccgtcgcagccggcagatgtccaacgcgatcgccctattgcaggacgagcatgaacttgcccgtgtcatagccgacatgccgtggagcaaaatcgacgtggacgggcttgaaacgaaagcggagcagatccgtcggcagatcgaacggatcgaaagcgatcccgagctggggcaattgcaggatgagctgcaacgtcttcgccggcagtcggacgtcgaaggcaagaacaggttccaggccgaggccgacctggaaagcgcccagcgtgccgtccatgccgagcaggcttggctcgacgcgtacggtgactcggatttcgacgattccacgttgtccgacatggtatcgaatcttctggccgacgcgtacgagaactgcttcggcacgtacgtgcatgcgcaggatcgtccgctactcatcgccggtggtgccgacagtgagggatcgatgccattcgacaaacgtatgatgcgcaacatcggacgcgtcatacgtaagcgaatccaggaaaccgacgagcgggccaacacgctacgcaccgacacggaaagtgccatgagtgaatatctcaggcgtcataccgccgaagacgacaccgtcacggcaagcgtggaggactaccggtattacctcgacgagctcaacatgctcaacatgctcgtcacccgcgccgcaaccgacgaggagtatgtcaacagcgtcgaaaaactgtacatgagcttccagcagctcaaccgtgcgctcaacaccgacgaggaaaacgtcagggagcagctcggccgtatcaacggcatgctcaaggaccaacagttcggcccgcgtggaggcaggctctcgcttggcgtgaagttcggagacgtcgaccggcagttcagaagatcattgggcgacatcatgtcgaaactggatgattggacacgcaacgggcgtgacaatcccatggagacccgcaaggcgttcaagggctgcgagccgttcatcggcagactgcaggatgagctcaacagcatccatgacacgaacggcatcaaggagtatggcgcccgcaacctcgatccccgtgtgcgcagctcgttctacgcgaccgtgcatcatgatgacgcgcccgacgaacatatcagctcaaccggcggcaaatcaggcggtgcgttgcaggaactcacctcgtttgtctacggcgcggccctgatttatctgcttggcggcgatctgacaggcaagcccacctacaccacgctgttcctggacgaagcccttatcaaagccgatggacgctacaccaagcgcgccctcaccgtgctgccgcgactcggcttccaaatcatcgtatccgccccggaaagcaaaaccgcggagatcctcagcatcgccaacaaggcgtacgtggcgtacaaggatccgtccacaggcaactcgtacctgcaggagctcgaccgcgaaaacgcacagggcgagtcgcaggagccaaccgacaaaaccacaccattgacggaggagtag

SEQ ID NO: 44840 - DNA, 1218 bp, Bifidobacterium ruminantium
atggcaaaggccaggaacgccaaggacggcatgagcatccgtcgggagctcgacgaatacgtcgacgctcacctcaaccggcacatgtacgacaccgaagtttcctggcccctgcgcaagaccatccgtctgcccaaacaagccgaactggaggacaactacgcgcgcgttcgcgcccaggacgacgtcatccgcgactgggcgaaccggcatcaatgcgaaaccagcgaaaagaccaaaatcgtttccagcggaatcgtccgacagaaaagccagcttgtcgactcggtgatcatacccgacctcgacacggctctccgtatagcgacaagaaccacgcgcgaacgctatctacgtgagcgccaacgcatgcgagaactcgcagacgaattcggcatcagccaagacagcgcgttgaatgtcgccaaaacactcaaggatcatgatgacgtcgatttccgtctcgtcatccaagccgcacactatttcacccgacacgactgccacaccatgaccccacgcatggtgccgattcccgggttcagcgccaaatggctcggcactcccaattctcagcgccgcaaagcgatatgcatgctcaccggacgggacaacctcgacttccaggaacgccccggcgaactccgactacgattcatggacgccgagcaccacggccaacccgacctcatcatcacccaaccatggatccacaacagaccaaccgacatcgcacacgccatcatcatcgaaaacaaagacacctaccaggccatgcccaccgccgcacacgccatctgcatcttcggcagcggatacgccaccctgaaacgcatgacaaccctcctgccatgggtcacagacattcccgacatcatctactggggagacatggacgccgacggactcgacatcctctccaaactccgccaaaccggcatcccatgcgcatccctgctgatggaccctgccgcctaccgggcctatgaacgatacggcaccatgctcgacacgaaaaacaagccactcaccacgcgagagtccaaacccacgccccagctcacctccgaggaacgcggactctacgaaatgctctgcaccggaaccaatgcgacatacctgcgaatagaacaggaacgcatacccattgcggacgccgcggccattctgcatgaccaataccaatggcccatcgccatgcccgatgacaccatatag

SEQ ID NO: 44841 - DNA, 1509 bp, Bifidobacterium scardovii
gtggccgatgtgagacgggaaatggaacggctgcgcccggtctacgaaaccggcgtgctccgtctgctgctgcgccagcattccatgacctatgtggcgctgctgcgcgccgcgttcgacccgctcaccggcgagttgccgcgcgagacgctcgaggagcgcttcgcgcagagcctgtccgcgctggccgacgccggcgaatacgcgctgcgcgaggaccagaccttcgccgatgcggcgcaccgcatcctcgccgacctgacgcgcgagggcgaaggcgactatgcatggctcgccaacgcccacgacgccgcctcgcacagattcctctaccggctcaccgcccgcgcccaccgggccatcgaggcgctgggccggctcgaggacgagtcgcgcaccctctccggcgcgcaggccaacagcatcatcatggagatcgagcacgcgcgcatgcagctgaccgccgaccccggggagcggatcaggctgctcaaccgcgagataaaggaccgcaagcacgagatcaagcgcatccagcagggccagcagcacgccacgctctccgaagcccaggtcgaggacgtcatcgccgtcgtgcacaacacgctgcgcggcgtgccgatcgacctgcgcgaactcgtgctcgccgaacgcgacaacggcgacgccctgcgccggcgcatgcaggccggcgacatcagcgtcgacgagaacctgacccgctaccaggacgaataccgccgctccttcagcgaatcggattccggccgccgcttcgaggacgccttccaggtgatcatcaccgacgagggccgccagcagatcgacgaggcgctgcgcgacatcgcgaaaaccccgtacctggccggcgaatccggcgcgctgctcggccagatccgcgacgagctcgcgcgcatctacgacggcatcgaagcggtgcgccaccagatgcgcgtctcaaacgaggcgatcagccggctggtcggccagcagaccgacacccgctaccgcaccatgctcaccaggctcaaccggctgtacgccgccgtcagcgcggacgccagagcgcatcccggcgacggcgcacgcccctacgcgaccggcactgccgacgggccgatcgcgcccctgccgatgcgcccggcgaaatccatgacgcgggccgcgacgcccggcctgcacgacacgccggcgcccggcgccgcggtcgacctgcgcgtcctgatcggcaacggcggcccaagactgcgccgcatggccacgcagatccggcgcgacccggtgatgcgcggcgggctcgtcgacatcgccgccagcttcaaccgcctgccggaaacggaacgccacgaaagcgaactcgtcggattcctcggcgggctgcgcggcgccgacggcgccgacgccgcggtctggcactgcgtatccctcggcggcgaaccgcgcgactggaccaccagggcggtgctggccgacccggacgaactggacgacatcgtggaggaaggatga

SEQ ID NO: 44842 - DNA, 822 bp, Bifidobacterium scardovii
atgaccatgagcgacgacaacccatacgcgctgttcgaaggggaccgcggagacatgccggccgacgcgcgccgcgccgccatcgcgctcaagcgcgaacgctacatcgacggcacgctctacgagctcgcgctcgaccactacgacgccgtcacgcgctcgctcaacaacgacctgctcgaaccggtcatcaacgaacggtaccgcatcatgtacgccgcgcccgtggccggcgaggacgtgaccctgcgctcgctgaaaacccgcgccagcctcaagcgcgaggaggcggcgctgctcgccttcctgcgcatccgcgtgctcgaatacgagaacatgcgcgtggccgccgacgaatggatcgtcagcctcgaggagatccgcgcggcgctcgccaccggcgccggccacctgtccgcgcgcaacgacgaggagggcgtgctccgccagatcggcgcgctcatctccgcgatgaacacatacggctacctcgaacggctggacgacgacaccatgctgaggatcacgccgctcgtgcccgcggtgctcgaccgcgaactggccgacgcatggctcggcgtcgccgcggccgacgaggacgacgagaccgatgggcccggatccgacccgtcgcgcgacggcaccgacgacgggcccgatgacggggacgccgagcccggcgggaccggcgaacccggcggcgggccggacggcggcaacgggcggcgctcgccgggcatggtcgacgagccgctgttcggcgatgacgcgctcgatgacgatgcgctcggcggcgaggccgccgacggggaaggggaatga

SEQ ID NO: 44843 - DNA, 837 bp, Bifidobacterium scardovii
atgacgatggcggccaaggacatgcagatgatcgcggaccggtggatgatggaatcccgccggctcgtcaactggggatcctatgagggataccacgaattccgcccctccacggacggccgtctgccggtgacgctgctcgccggcgccagcgaatcgggcaagtccacgctggtcgacgcgcagatctccctgctctacccgaccggcaccccgttcaacaaggcgtcgaactccggccggtccgaacgcagcgactacacgtacctgcgcggcatggtcggcgtcggcaacaccgacgagggcgaccggccgatctacctgcgcgggctggacgacaacggcgcgccgcaggccgtctggggagcgatcgtcgacacctaccgcaacacgacgaccggccaagtcctgtcctgcggcaagttcctgtacctgatgcccggcgacaagggcagcgaggtgcgccgccaatacgtcgcatgggaccggcccatcgacccgcgggccatggaccggttccgcgaatcggcgttcacgccctcgcagctgaaaacggcctaccccgaatgcctcaccttccccagcgccgaggcgttccacacccacatctggagcgtgatggggctgagcgccgacgcctgccggctgctgcacaagatccagtcggcggacgcgccctcgcggctcgacgacatcttcaagcagggcgtgctcggcgtgcccgaggccctcgacctggcgcgctccaccgtggaggactacgagcgctacgacgagaacttccgccgcaccatggagcagaaggcccggcgcatggacgccctgcaggcatccaac

SEQ ID NO: 44844 - DNA, 1518 bp, Bifidobacterium stercoris JCM 15918
ttggcggatgtaagacgggaaatggaacggctccggcccgtgtatgagaccggggtgctgcgattgctgctgcgcggcaattccatgctgtacgtcgcgctgctgcgctccacgttcgacccgctcaccggcgagctgccacgcgagatcgtcgaggaacggttctcccgcagtctgacccgacttgcggaaacgggcgattacacgcccaaggaagggcagacgtccgcggaagccgcgcacacgatcctgcagcagctgacgaaggaaggcgaaggcgactacgcttggctcgccaattcgctcgacgtcgcagcccaccgctacctgtaccgtctcacggcgcgcgcccaccgtgcgatcgaggcgctcgaccggctcgaggacaccacgaaagcgctgtccggcgcgcaggccaacagcatcatcatggagatcgagcatgcgcgcatgcagctgaccaccgacccccgcgaacgcatccgcctgctcgaacgcgacatcgaggagcggcaaaagcagatcgacgaattgaagcacagcgacacgttggacaagctcacctcccaacaggtgggcgacatcatcggcgtcatccacaacacgctgcgcggcgtgccgatcgacctgcgcgaactggcgctcgaggaacgcgacaacggcgacaatctgcgccgaagcatgcagtcgggctccatcagcgtggagcaggcgctcggcacctaccatgacgaataccacgggtcgttccacgaatccgacagcggccggcgtttcgaggacgcgttccaggtgatcgtcaccgacgagggacgccgcgaaatcgacgaggcggtgcgagacatcgcccagaacccgtatctcgagggcgagcccggcatcctgctcgcccaggtacgcgccgaactcaaacgcatctacgagggcatcgaggacgtgcgccggcagatccgcatatccgacgaggcggtgagccgtctggtgcgccagcagaccgacacgcattaccgcaccatgctcgacaagctccacagactgttcgtgcgggccagcgacgacgcgaagacgcaccccggctcggacgaacgcccataccgtacggacaccggcacggcgcaattccaggcattgccgtccaggcccgcgaaatcgatggcgcgcgcggccacggccggattggacgacgcgccttcgacgaacgtcgacgcgccggacctgaaggccatggtcgagatgtgcggcccgcggctgacgcacatgatcggactcatcaggcgcgatccggtcaaaacggcggacggcaggttcgtggatttcgcggcgagcttcaaccggctgccccgggaggaacggcgcgaaagcgagctgatcggcttcctaagcgccctacgcacgcaggacggaccggcaaccgtgacatggcattgcgtatccatcgacggaggcgagcgcgtgtggcgcaccaggccgatcctcaccaccgaggcggcgcttgacgagatcatcgaggagggatga

SEQ ID NO: 44845 - DNA, 840 bp, Bifidobacterium stercoris JCM 15918
atgacggacaacaccgacggattcgacactggcatcggcatcgaagaggagacaggcccggaatccggcatgccgtccgaagggccggatatgacgagggacaggccggcattgttcgacggggatacgggagacatgcctcttgaggcgcgtatggccgcgatcgcgctgaaacgcgaacgctacatcgacggcagcctgtacgacagggcgtgccagtaccgtgaggccgtggaacggtcgttgaacaacgacatgctcagactggtcgacaacacgaaataccggatcatgtacgcgtcgccggtcacggacgcggagacgaacatccgctcgttgaagacgcgtgtgagcctcacccgcgaggaggccgccacactcgcggccctgcgcatcaaggtgctggagtacgagaaccagaagacgaagccgggcgactggctcatcagcttcgacgacatccgcgcgctgctcgccacgggagcgggcttcctcacggccagcaacgacgaggagggcacggcgaagaagatcacgtccgtcatctcgcgcatgcgcacctacgggtatctcgcggaaacgggggacgagaacatgtacgtgctcacgccattggtgccgatggtgctcgaccagaagctcgccgaccggtggctcggctccgatgatacggacggcgatggtatgaaagacgcggatggcgatggttatgacgattcgtccatcggcgcggatggtggcgatacttccgattcgaccgggacggtttcatccggcgtcgagcaggacgcgttcgatttcgattcggccgatgacgcttttgatggggggaaacactga

SEQ ID NO: 44846 - DNA, 3459 bp, Bifidobacterium stercoris JCM 15918
atggaagacggcatgaaaatcgtttccgaccgttggatgctgcaaagccggcagatcgtcaactggggctcctacggcggctaccacgtgttccgcccgtccatggacgatgcgatgccggtgaccctgctcgccggcgcgagcgaatcgggcaaatccacgctcgtcgacgcgcagatctcgctgctctacccatccggcaccccctacaataaggcgtcgaattcgggacgttcggaacgcaacgactacacgtacctgcgcggcatgatcggcatcagcgacggcgaaaacggtgagaccccgatcttcctgcgcggcagggacgcggacggcaccccgcagaacatctggggcgcgatcgtcgacacatacgcgaaccgcagcgacggcggactgttgtcctgcgcaaaattcctctacctgaccgcaggcgacgggccggacggactgcgccgccaatacgtcacctggaaccagaccatcgacccgcgcctcatggaccggcaccgcgacacgtcattcacgcgaggactgatggaacagacttacccaggatgcacgacgcacgtcaacgcgcaggcgttccacgcctccatctggcaggacatgggcctaagcgccgaagcatgcaggctcctgcacaagatccaatccgccgacgcgccctccaaactcgacgacatcttcaaacagggtgtgctcgacgtgcccgaatccatccggctcgcccgcgaaaccgtcgacgactacaaccggttcagcgagaacttccacagcatggaagacaaaatggaacgcgtcgccatcctgcaggacatacaagcccgctacggcgaatacgccaaacaagccagcgaacgccgcgaatacacgcccatcgaccccgaccgcgagcaaggcgagacgacgctcgccgcatggacatggtcgcgcatggccagcgaagtacgcgccggactgccatcggcgcaacgcaaagccaaggaatcccaggacgccatcgaccggtctcagcagcgcatcgacgaactcgacacgcaaatcgaagccgtcaaagaacgcatgaacggcatcgacggcggcagcctgcagcaactcggcaaggacttcgaacgcgcacgccaggacgccgacgaggcgcgcagacaacggcacgccatcgccgaacggttcgaacgcgtcgaaggcagactccccgccgacgagcagacatggaacgccaaatgcgccgcgctcgccttgtcgctcgatacgtacgacaagcgtttggaagacgcgcgatccgaataccagcggatggtggtggaacgtcacgcccggcagggcgaacgcgacctgttgaggcaggattaccggcgcaagatcgaacacaggacgcgcatcagcgacgacatggaccatgcgcgcacgctcatcgcacgggcgactggcttggacgagacggaactgccgtacgtggccgaactgatggacgtggacgagggggacgagcaatggcgtctggcgatggacgtcacgtacgcgcccatcgcgcagaccattctcgtggacaagcggcatgagcaggggttcgccgcgaaggtcagcgcgatcgatccgacgcgtatgacgcggcgtgcctggcgtttcgtcgataccgacgcgcaatacgattcggcctgcaacgaggggtggatgtcgtcgaagctgcggtacaaggaggattcgccgttcgtcggatggttgaaggagcagaccgcgtcgcaacggttcgacgcgcgttgcgtggaggcgatcgacgacatggaccgggccgaacggcaggtgcaggtcgacgggcagatcaaatccggcgaccgtggattccatggcgtcaaaggcctgcgtcaggtcatcggcttcgtgaacgaacggtatctggccgaattggaacgccagcttgacggggcggaacgggcgttggaggacgccgaccgccgcggcaggcagatggccaacgccatgactctgctgcaggacgagcatgagctcgcattgaccgtcgcggatctgccatggggcaagatcgacgtggacgggctcgagacgaaggcggaacggatccgtctgcagatcgaacggatcgaaagcgatccggaactggcacaattgcaggacgagttgaaacagctgctacggcagaaggacgacgagggcaagaacaggtaccgtgccgaagcggaattggaaaacgcgcagcatgccgtccaggccgaacaggcatggctcgacatgcatggcgactccgatttcgacgatgccgcattgtccgacatggtgtcgaatctgctggccgacacgtatgagacctgtttcgacacgtcgcgtccgcaggaacggccgcagcgcatcgccggcggtttcgaccgtgaggggacggcgccgttcgacgtgcgcgtgctgcgcagaatcggcaacaccgtgcgtgcgagactccagcagatcgacgagcgtgccgtccaattgcgcgccgacacggaacgcgccatgggcgactatctgaagcaccattccacggagggcgacaccgtcatggcgagcgtggaggactatccgtatttccttgacgagctcaagaacctcaacatgctcgtcacccgcgccgcgaccgacgaggagtatgcgaacagcgtcgaaaagctgtatatgagcttccaacagctcaaccgcgcgttcaacaccgacgaggagaacgtcagggagcagctcgaccgcatcaacggcatgctcaaaggccaacagttcggcccccgcggcggcaggctctcgctccacgtggacttccacccgatcgaccggcagttcaaatcctcgttgggccgcatcatgtcgaagctcgacgattggacacgcaacgcgcgcagcaatcccatggagacgcgcaaggcgttcgcaggctgcgaaacgttcatcggcaggctccaggcggaactcggccagatccgcgacacgaacggcatcaaggaatacggtgcgcgcaacctcgatccacgcgtgcgcagctcgttctacgcgatcgtgcaccataacgatctgcccgacgaacgcatcagctccaccggcggcaagtccggcggcgcgttgcaggaactcacctcgttcgtctacggcgcggccctgatctacctgctcggcggcgacctgaccggcaagcccacctacaccacgctgttcctggacgaagccctcatcaaagccgacggacgctacacgaaacgcgccctgaccgtgctgccgcgcctcggcttccagatcatcgtatccgcgccggaaagcaaaaccgccgagatcctcagcatcgcagacaaggcgtacgtggcatacaaggatcccgcaaccggcaactcgtacctgcaggagctcgaccgcgagccggcaacgcaagccgaaacacaagacgccaccgtcgagcagacgcaacccgcgacggaggcataa

SEQ ID NO: 44847 - DNA, 1236 bp, Bifidobacterium stercoris JCM 15918
atggcagcggccagaaacaccacaggcgaaacggacatccgccggaaactcgacgaatacgtcgacgcccacctcaccaggcacatgtacgacaccgacgaatcctggccgctgcgcaaaaccatccgactgcccaaacaagccgaactggagcagcactacaaccaaatccgcgcccaaaacgaaaccatccgcgactgggcgcggcaacaccactgcgaaaccagcgagaaaaccaaaatcgtctccagcggactcatccaacaaaaaagcccgctcatcgactccgtgaccatacccgacctcgacaccgccctccgcatcgccaccaaacaaacccgcgaacgctacctacgcgaacacgaccgcatgagcgcgctcgccaaagaattcggcctcgaaccggcgaacgccatgaacgtcgccaaaaccctcaaagaccacgacgacaccgacttccacctcgtcatccaagccgcccactacttcgcaaaccacgactgccacaccatgaccccacgcatggcgcccatcccaggattcagcgccaaatggctcggcgcacccaactcccaacgccgcaaagcgatatgccagctcaccggacaagacaacctcaccttccaggaacgcccgaacgaactccgactacgcctcatggacgccgaacgccacgaccaacccgacctcatcgtcacccaaccatgggtccgcaaccagccaaccgacatcgaacacgccatcatcatcgaaaacaaagacacctaccaggccatgcccaccgtcgaacacgccatctgcatcctcggcaacggatacgccgcaacatcacacatcacaacactcctgccatggctcaccaccatccccaacatcatctactggggcgacatggacgccaacggactcgacatcctctccaaactacgcgccaccggcatcccatgcacatccatactgatggacaccaccgcataccggacatacgaacaatacggcacccaactcgacgccaaaaacaaacccctcaccacacaaaccccacaacccacacccggactcaccaccgaagaacgcaaactctatgaaacactctgcacaggaacagacatccaatacctacgcatcgaacaggaacgcatccccatacgcgacgccacaaccatcctgcacgaccaacaccactggccaatcgacatacccggcaacgacataccaaacaacaacaccaaatag

SEQ ID NO: 44848 - DNA, 1530 bp, Bifidobacterium thermacidophilum subsp. porcinum
gtgagcgacgtgagggcgcaactggaacggctgcggccggtctatgaaacgggcgtgcttcgactgctgctgcgcaaccacgcgatgacgtatgtcgccctgctgcgcacctgtttcaaaccgttgaccgccgaactgcccaaagagacgcttgaggtgcggctcgccggcgcgcttgaggagcttgcgcacgacggcgaatggcagttcaaagatggcgaaaccgcgcaggacggcgcccatcagacgcttgtcgaactcactcgagaaggcgaaggcgattacgcgtggctcgcgaactcgtatgaccccgcttctcaccattatctgtaccgtttgactgctcgcgcccaccgcgcgatcgacgcgctgtcccagcttgaggacacgacccgcgcactgtccggtgcccaggcgaattccatcattatggaggtcgagaacgcccgcaaacgcctgaccgtcgatccaagcgagcgcatcgccctgcttgagtccgaagtcaaggaacgcgagcgggaaatcagccggctccgcaacggtgaatccgtggagtccctgagtgacaaggatgtcgaggatatcatcgccgtggtgcacaacactttgcgcggcgtgccggtcgacctgcatgagctcgcgcttgaggaacgcgacaacggcgacgcgctgcgccgacgtatgcaggagaactcaatgagcgttgacgagattcttactgcataccatgagcgctaccgccgctcgatgcgcgagtcggacagcgggcggcgtttcgaggacgcgttccaggtgattgtgaccgacgagggccggcggcaaatcgatgatgcggtgcaggatatcgcaaaaagcccgtacctgcacggtgagccgaatcagctgctcaatcaggtgcgggcggaattgaagcggatttacgaaggcatcgaggatgtccgccatcaggtgcgcgtctcggacgaagcggtgagccgtctggtccggcagcgcagcgacacccggtatcgcacggcgttagacacgttcaaccggctgttcgcgacaatcagccaagagatcaaggccggcgcgtcttctcccagcccgtattcgtttgatgtgggcgacgccacgctgcttgcgctgcctacacggccggcacgcccgatggctttcgccgcgccgccgagtctggatgccgtgtcgtcggttcaggatgatgacaatcccggcttcgccgatgtggatttgcgcgcgatggtcgaggcgggcggaccacggttgcggcatatgctgtcgctgatcatgcaagacccgatcatgcgcgacgggcgggttgacgtcgcggcgagtttcaaccagttgagcgattcggaacgccgcgaaagcgaactggtcggtttcctgggggctttgcgcgtggacgataacgggcagttctcgacatggcgatgcgtgtccgcggacggtacgacacgcgcatggcgtacacggccggtacttgcagacgttggcgtgttgcatgagattatcgaagaggacgcatga

SEQ ID NO: 44849 - DNA, 897 bp, Bifidobacterium thermacidophilum subsp. porcinum
atgaccgacgaacttgatgacatgatggccgccatgggcactgctcgcatggacggcgacgccgatgccatggtggatgcccatgaagacggctccggcgagaccgacggtgtgtcgaatgccggcagggacactgacaccataggggatatcgaccctgcggacaatccacatgcgctgttccccggggacacgagcacgatggacgccgacgcacgcgcggtcgccatcgcgctgaaacgtgaccggttcatcaccggtgacgcgtatgagacggcgttggaccatgtggacgaggtacgccgctcgctcaacgacgacctgcttgaactggttgatgttccgcgataccaagtgatgtacgccagaccggtcacagcggacggattggggatgcgatccttgaaaacccgggcgtcgctgacgcgcgaggaggcggcgatgctggctctgctgcgcattcgcgtgctcggctatgagagctcgcgcgaatcatccaaagactggatcatcagcacggacgacatccgcgccgcgctgaccacaggcgccggctggcttgccgcacgcaacgacgaagaaggcgtgatgaaacgcatcggcatcgcgatttcacggtgcgtgacctacggatatctcgcccccgttgaagacaccgatgacatgtatcgcatcacgccgctggtccctgccgtactcaccaccgagcttgccgaacagtggctgggcgaaaacgagaacagcgccgctggcagtgcggatgaccccgaagaagacgtccagataaccgcgaataccgatacgtctgatattgccgacacgacatacacgaataccgctgacggtttgaatgccggcgctaccgccgcccaaaccggcgaagaaacgaggttgtga

SEQ ID NO: 44850 - DNA, 3609 bp, Bifidobacterium thermacidophilum subsp. porcinum
atgaccgacgaagcgctgatggccgaccactggatgcttgccagccgccaactggtcaattgggggtcctacgagggctaccacgtgttccgcccgtccatggacccggacatgccgatcaccttgctcgcgggtgccagcgaatccggcaaatccacgctggtggacgcgcagaattccctgctctaccctgctggcacggcgttcaacaaggcctcgaattccgggcgttccgaacgcagcgactacacgtatctgcgtggcatgaccgccgtggcggatgacgcggagggcggcacggccgtctatctgcgcggttcggccgaggacggcacgccgagtgcggtgtggggcgcgattgtggacacctatgtcaaccgtatgggcggcgagatgctctcatgcgcgaagttcctgtacctgtcccccggcgacgagcgcggcaacgtacggcgccaatacgtgtcctggaaccatgaaatcgacccgcgaaagatggacggctaccggtcctcaccgttcaccgccgaccaattgcgcaaggtgtatccggggtgcgcggtgtattcgaacgcggaaaacttccatgaatccgtgtggacacgcatgggattgaaagccgcagcatgccggttgctgtacaaaatccagtcggcggatgcgccttcgcggcttgacgatattttcaagcagggtgtgctcgatgtcccgaacgccctgaccaaggcgcgcgaggcggttgaggattacgaccggtatgccgagaacttccgcagtatggaagaaaacgcccgacagatggacgccttgcgtgaaatccgcgacgaacacgccgaatacgataaggcggccaggcaggcgcgtgatctgcaggtcaccgatccgcaagatgacgccggattgaccaccttgcgctcgtgggtgttctcccggttggcgtccgcggtacgcgaccagctgccgcaagatcgccgcgagctggagaggcagcaggagcaatgtcgcaaagccgatacgacagtcgaaaacgtgcaacgcgaactcggcgaagtcaccgagatgatgcacggcgccggcggcgacaccctgacccatctggaaaacgagcatgagcaggcgttgcaggagctggaacggatgcgtcataccgtcgggcgcatccgacaggcgttcgctcgggcggacgagccgatgccccaatccgaggcatcgtgggaacagcgccggcaggaagcccaggatttcattgaggacgcgaacgtgcaacgcgatgagctccagcgacagcgggacgcttgcgtggtccgccgcaaaggcatcaccgaccgtcttgacccgatcaagcgcgatttcgaacggcaaagccgcaagcgcacccgtatcacgcaagacatggaagacgaccgcgcggcgattgcgcaggcgaccgggctgagcgagcgcgatcttccctatgtcgccgagctgatggacgtgcgcaaaggcgaagagcggtggcgtaccgcgatgaacgtggcttatggccccattgcgcagatcattttggtcgaccgccgttacgagcggggattcgcccgaaaagtcagcaccatcgacccgtcaaccatgttccgccgcacttggcaattcattgatatcgacgatatcgactatcaaagcggcgccaaagaacacggggaggacggcgagcacgacgaccggctgtccggaaaactgcggttccgcgaggattctccattcttgggatggctgcgcgagcaaactacatcccggcggcttgacgcgctgtgtgtagaacatatcgacgacgccgacaccgcccggcaaatccaaccggatgggcaaatcaaagccggccagcgtggctcgtatggcaccaaaggcatcaaccaggtcatcggttttgccgacgaagcgtacctgcgcgggctcaaacagcaaatcgaccgcctgtccgaacagctcaggcagtgcgagttggatggggaggacatcaagcgccagcaaagccatctggacgaactgcgtaccttgtcgtcgcaaatcgccgatctttcttggacggaggtcgacgaagccggcaccgaagcgaatgtggaacgccttgagcgcgacatcgacacgctacgcaacgacccgaaactcgcccagctcgccgagcgacgcgaccaactccagcacgcgctgcgggacgcgctggactcgcaggcgaacgcccggttcgccgccaccaacacacagcaggccgtcgacgccgccgaagcgtggctgactgaacgcgcggggcagatcgccgacaccgcggaacagccgacgctaccggataccgtcaccgaactgctgtccaccgcgtacagcgcggcgaccggttctgtggccggcgaactggcccatatgactgttctgccagggcaacccggaatccgccgattcgacgagcgggtgctcggcatggtaggcaacgcaatcaccaagcgcatcagcgaggcgtccactcaagccaacaaggcacgggcatccgtcgaacggcgcatgtccgactatcttgcccgctgggccgccgacgacacgaccgtcacccccacggtggacgactaccggtattacgaggacgagttgagagacctgtccaaaatcgtggcgaaggcggctacccctgaggaaatcgccaacagcgtggacaagatgcaacgcgacttcaatgagctgagtatgagcctcgagaatgaccagcgcgaggtgcgtgaacagctcgaccgtatcaactccatgctgcgcgaccagcagttcgggccacgccacggcagtctcaccctcgacgtcaccatcaggccacgcagcgcagccttcaacggcacgttacgccggaccatcgggcgactcaacagctggcaggcggaacagccctccggcggcgcgtccgacagccgcaccgcaaagcgggcgttcgacagctgcaaaccgatggtcgaactgttgcgtagcgagctgggcaaagtgcgtgataccgcgggaatccgccaatatggtgcccgcgatctcgattctcgcgcccgcagctccttctacgcggtcgtccaccatgatgacggccccgacgaacgcatctcctcgaccggcggcaaatccggcggtgccttgcaggagctcacatccttcgtgtacggagctgcgctcatctacctgttgggcggcgacatcagcggacaccccacctacaccacgctgttcctcgacgaagcgctcatcaaggcggacggccggtacacgcagcgcgcacttgcggtgctgccacggctgggattccaagtcatcgtatccgcgccggaaagcaaaaccggcgaaatccttgagatggcgacgcgcggctatgtggtgctgaaagacgagcggctccattcgcatctgcaggaactcgatctggtcggcgcacatgcggacggcggaccattcgagcagcgcaatccgtcagctggcaaatcgtcgacaggcacggcggcttccagcattccggctgatgccgggaacgccgacgataccgtggaaaccagcaatgttacaagcagcggcgattccacagcctcaagcagcggaaagccacagtcatga

SEQ ID NO: 44851 - DNA, 1239 bp, Bifidobacterium thermacidophilum subsp. porcinum
gtgaacgcccggacagcgcccacggaaatccgcgatgccgtcaccagatatctgcaacggcgtcgatatgatgccgaaccgcgatggccgttggttttctccgtgcggtggccggaccagcgcacgctgaccgcccaagcgcccgactggcatagggccaacaatgcgttgcgcgaatgggcgcagcgtcaaggttgcccggttacgaacaagcaccggctgatggtcacgccggtggagttgatcgacacggttacggttgcggatgagcagaccgcgttgcgcatcgcggaccggacgagcgcccggcactaccgcaaggcgcgccagcgcatcgacctgttggccgacgagtgctcgattcctcgcgacaccgcggcatccgtggcgaaaatgctggacagtgaatcagatgtggatgtcacactggtgattcgcgccgcgcagttcttcggcacgcacgatgcaaccgggttgactccacggcaagtcccgctcgccgggttcagcgcgaaatggcttgatcagacgcatcgccgcaacgtcatctgcaccttgtgcggcaaggattcgctgggattgtctgatcgcccgccggagttgcgtatgcgctggcttgacccggcctactcgaacgaaccggaaatgatgatcaccaggccgtggcggcccggtggcgagcacgatatccgctatgtcatcatcgtggagaataaggatacctaccaatccatgcccgacatcgcgcacggattgtgcgtttggggagccggtaaggcgattttggcatcaatcgcgctgctactgccgtggcttaccaccgcaagaccggacgacggggatgattccagtccgcaggtcgtctattggggcgatatggacgccgacggcctggaaatcctcgacgccgtacggcacaccggagtacgctgccaatcgctgttcatggatttagaagcctatcagcgctactcatggttcggtaccaatctcacctcaaccagtacaccgctcacttcgcgcgaacccaaggcgacgcccacacttgacttcggcgagcgtgagctctatctgctcacatgcggcgaggccgtcgggcaatccggcgaatccggtttgtccgacggtccaacccatctgcgcgtcgagcaagagcgaatcccgctcattgacgcggccgaagcgcttcgctcgcttggatggccgatcgccgccaataatgacaaggagacacaatga

SEQ ID NO: 44852 - DNA, 1530 bp, Bifidobacterium thermacidophilum subsp. thermacidophilum
gtgagcgacgtgggggcgcaactggaacggctgcggccagtctatgaaacgggcgtgcttcggctgctgctgcgcaaccatgcgatgacgtatgtcgccctactgcgcacctgtttcaaaccgttgaccgccgaactgcccaaagagacgcttgaggtgcggctcgccggcgcacttgaggaacttgcgcacgacggcgaatggcagttcaaagatggcgaaaccgcgcaggacagcgcccatcagacgcttgtcgaactcactcgagaaggcgaaggcgattacgcgtggctcgcgaactcgtatgaccccgcttctcaccattatctgtaccgtttgactgctcgcgcccaccgcgcaatcgacgcgctgtcccagcttgaggacacgacccgcgcactgtccggcgcccaggcgaattccatcattatggaggtcgagaacgcccgcaaacgtctgaccgtcgacccaagcgagcgcatcgccctgcttgagtctgaggtcaaggaacgcgagcaggaaatcagccggctccgcaacggtggatccgtggagtctctgagcgacaaggatgtcgaggatatcatcgccgtggtgcacaacactttgcgcggcgtaccggtcgacctgcatgagctcgcgcttgaggaacgcgacaacggcgacacgctgcgccgacgtatgcaggagaactcaatgagcgttgacgagattctttctgcataccatgagcgctaccgccgctcgatgcgcgagtcggacagcgggcggcgttttgaggacgcgttccaggtgattgtgaccgacgagggccggcggcaaatcgatgacgcggtgcaggatatcgcaaaaagcccgtacctgcacggtgagccgaatcagctgctcaatcaggtgcgggcggaattgaagcggatttacgaaggcatcgaggacgtccgccatcaggtgcgcgtctcggacgaagcggtgagccgtctggtccggcagcgcagcaacacccggtatcgcacagcgttggacacgttcaaccggctgttcgcaacaatcagccaagagatcaaggccggcacgtcttctcccagcccgtattcgtttgatgtgggcgacgccacgatgcttgcactacctacacggccggcacgcccgatggctttcgcagcgccgccgagcctggatgccgtgtcgtcggttcaggatgatgacaatcccggcttcgccgacgtggatttgcgcgcgatggtcgaggcgggcggaccgcggttgcggcatatgctgtcgctgatcatgcaagacccgatcatgcgcgacgggcgggttgacgtcgcagcgagtttcaaccagttgagcgattcggaacgccgcgaaagcgaactggtcggtttcctgggggctttgcgcgtggacgataacgggcagttctcgacatggcgatgcgtgtccgcggacggtacgacacgcgcatggcgtacacggccggtacttgcagacgttggcgtgttgcatgagattatcgaagaggacgcatga

SEQ ID NO: 44853 - DNA, 897 bp, Bifidobacterium thermacidophilum subsp. thermacidophilum
atgaccgacgaacttgatgacatgatggccgccatgggcactgctcacatggacggcgacgccgatgccatggtggatgcccatgaagacggctccggcgagaccgacggtgtgtcgaatgccggcggggacactgacaccataggggatatcgaccctgcggacaatccacatgcgctgttccctggggacacgagcacgatggacgccgacgcgcgcgcggtcgccatcgcgctgaaacgtgaccggttcatcaccggtgacgcgtatgagacggcgttggaccatgtggacgaggtacgccgctcactcaacgacgacctgcttgaactggttgatgttccgcgataccaagtgatgtacgccagaccggtcacagcggacggattggggctgcgatccttgaaaacccgggcatcgctgacacgcgaggaggcggcgatgctggctctgctgcgcattcgcgtgctcggccatgagagctcgcgcgaatcgtccaaagactggatcatcagcacggacgacatccgcgccgcgctgaccacaggcgccggctggcttgccgcacgcaatgacgaagaaggcgtgatgaaacgcatcggcatcgcgatttcacggtgcgtgacctacggatatctcgcccccgttgaagacaccgatgacatgtactgcatcacgccgctggtccctgccgtgctcaccaccgagcttgccgaacagtggctgggcgaaagcgagaacagcgccgctggcagtgcggatgaccccgaagaagacgtccagataaccgcgaataccgatacgtctgatattgccgacacgacatacacgaataccgctgacggtttgaatgccggcgctactgccgaccaaaccgtcgaagaaacgaggttgtga

SEQ ID NO: 44854 - DNA, 3609 bp, Bifidobacterium thermacidophilum subsp. thermacidophilum
atgaccgacgaagcactgatggccgatcactggatgcttgccagccgccaactggtcaattgggggtcctacgagggctaccacgtgttccgcccgtccatggacccggacatgccgatcaccttgctcgcgggtgccagcgaatccggcaaatccacgctggtggacgcgcagaattccctgctctaccctgctggcacggcgttcaacaaggcctcgaattccgggcgttccgaacgcagcgactacacgtatctgcgtggcatgaccgccgtggcggatgacgcggagggcgggacggctgtctatctgcgcggttctgccgaggatggcacgccgagtgcggtgtggggcgcgattgtggacacctatgtcaaccgtatgggcggcgagatgctttcatgtgcaaagttcctgtacctgtcccccggcgacgagcgcggcagcgtacggcgccaatacgtgtcctggaaccatgaaatcgacccgcgaaagatggacggctaccggtcctcaccgttcaccgccgaccaattgcgcaaggtgtatccggggtgcgcggtgtattcgaacgcggaaaacttccatgaatccgtgtggacacgcatgggattgaaagccgccgcatgccggttgctgtacaaaatccagtcggcggatgcgccttcgcggcttgacgatattttcaagcagggtgtgctcgatgtcccgaacgccctgaccaaggcgcgcgaggcggttgaggattacgaccggtatgccgagaacttccgcagtatggaagaaaacacccgacagatggacgccttgcgtgaaatccgcgacgaacacgccgaatacgataaagcggccaggcaggcgcgtgatctgcgggtcaccgatccgcaagatgacaccggattgaccaccttgcgctcgtgggtgttctcccggttggcgtccgcggtacgcgaccagctgccgcaggatcgccgcgagctggagaggcagcaggagcaatgtcacaaagccgatacgacagtcgaaaacatgcaacgcgaactcggtgaagtcaccgagatgatgcacggcgccggcggcgacaccctgacccatctggaaaacgagcatgagcagatgttgcaggagctggaacggatgcgtcataccgtcgggcgcatccgacaggcgttcgctcgggcggacgagccgatgccccaatccgaggcatcgtgggaacagcgccggcaggaagcccaggatttcattgaggacgcgtacgtgcaacgcgatgagttccagcgacagcgggacgcttgcgtggtccgccgcaaaggcatcaccgaccgtcttgacccgatcaagcgcgatttcgaacggcaaagccgcaagcgcacccgtatcacgcaagacatggaagacgaccgcgcggcgattgcgcaggcgaccgggctgagcgagcgcgatcttccctatgtcgccgagctgatggacgtgcgcaaagacgaagagcggtggcgtaccgcgatgaacgtggcttatggtcctattgcgcagatcattttggtcgaccgccgttacgagcggggattcgcccgaaaagtcagcaccatcgacccgtcaaccatgttccgccgcacttggcagttcattgatatcgacgatatcgactatcaaagcggcgccaaagaacacggggaggacagcgagcgcgacaatcggctgtccggaaaactgcggttccgcgaggattctccattcttgggatggctgcgcgagcaaaccacatcccggcggctagacgcgctgtgtgtagaacatatcgacgacgccgacaccgcccggcaaatccaaccggatgggcagattaaagccggtcagcgtggttcgtatggcaccaaaggcatcaaccaagtcatcggtttcgccgacgaaacgtacctgcgcgggctcaaacagcaaatcgaccgcctgtccgaacagctcaggcagtgcgagttggatggggaggacatcaagcgccagcaaagccatctggacgaactgcgtaccttgtcatcgcaaatcgccgatctttcttggacggaggtcgacgaagccggcaccgaagcgaatgtggaacgccttgagcgcgacatcgacacgctacgcaacgacccgaaactcgcccagctcgccgagcgacgcgaccaactccagcacgcgctgcgggacgcgctggactcgcaggcgaacgcccggttcgccgccgccaacacgcagcaggccgtcgacgccgccgaagcgtggctgactgaacgcgcggggcagatcgccgacaccgcggaacagccgacgctaccggataccgtcaccgaactgctgtccaccgcgtacagcgcggcgaccggttctgtggccggcgaactggcccatatgactgttctgccagggcaacccggaatccggcgattcgacgagcgggtgctcggcatggtaggcaatgcgatcaccaagcgcatcagcgaggcgtccactcaagccaacaaggcacgggcatccgtcgaacggcgcatgtccgactatcttgcccgctgggccgccgacgacacgaccgtcactcccacggtggacgactaccggtattacgaggacgagttggaagacctgtccaaaatcgtggcgaaggcggctacccctgaggaaatcgccaacagcgtggacaagatgcaacgcgacttcaatgagctgagtatgagcctcgagaatgaccagcgcgaggtgcgtgaacagctcgaccgtatcaactccatgctgcgcgaccagcagttcgggccacgccacggcagtctcaccctcgacgtcaccatcaggccacgcagcgcagccttcaacggcacgttacgccggaccatcgggcgactcaacagctggcaggcagagcagccatccggcggcgcttccgacagccgcaccgagaaacgggcgttcgacagctgcaaaccaatggtcgagctgctgcgtagcgagctgggcaaagtgcgtgataccgcgggaattcgccagtatggcgcccgcgatctcgattctcgcgcccgcagctccttctacgcggtcgtccaccatgatgacggccccgatgaacgcatttcctcgaccggcggcaaatccggtggggcgttgcaggaactcacgtccttcgtgtacggggctgcgctcatctacctgttgggcggcgatatcagcggacaccccacctacaccacgctgttcctcgacgaagcgctcatcaaggcggacggccggtacacgcagcgcgcacttgcggtgctgccacggctgggattccaagtcatcgtatccgcaccggaaagcaaaaccggcgaaatccttgagatggcgacgcgcggctatgtggtgctgaaagacgagcggctccattcgcatctgcaggaactcgatctggtcggcgggcatgcggacggcggaccattcgagcagcgcaatccgtcagctggcaaatcgtcgacatgcacggtggcttccagcattccggctgatgccggaaacgccgacgataccgtggaagccagcgatgtcacaaacagcggcgattccacagcctcaagcagcggaaagccacagtcatga

SEQ ID NO: 44855 - DNA, 1263 bp, Bifidobacterium thermacidophilum subsp. thermacidophilum
atgaccggcatacgcgcacgcggcgtgaacgcccgaacagcgcccatggaaatccgcgatgccgtcacgagatatctacagcggcgtcgatatgatgccgaaccgcgatggccgttggttttctctgtgaggtggccggaccagcgcacgctgaccgcccaagcgcccgactggcatagggccaacaacgcgttgcgcgaatgggcgcaacgtcaaggttgcccggttacgaacaagcaccggctgatggtcacgccggtggagttgatcgacacggtttcggttgcggatgagcagaccgcgttgcgcatcgcggaccgggcgagcgcccggcactaccacaaggcgcgccagcgcatcaacctgttggccgacgagtgctcgattcctcgcgacaccgcggcatctgtggcgaaaatgctggacgacgaatcggatgtggatatcacactggtgattcgcgccgcgcagttcttcggcgcacacgatgcaaccgggttgactccacggcaagtcccgctcgccgggttcagcgcgaaatggcttgatcagacgcatcgccgcaacgtcatctgcaccttgtgcggcaaggattcgctgggattgtctgaccgcccgccggagcttcgtatgcgctggcttgacccggcctactcggacgaaccagaaatgatgatcaccaggccgtggcggcccggtggcgagcgcgatatccgatatgtcatcatcgtggagaataaggatacctaccaatccatgcccgacattgcgcacggattgtgcgtttggggagccggtaaggcgattttggcatcaatcgcgctgctactgccgtggcttaccaccgcaagaccggacgacggggatgattccagtccgcaggtcgtctattggggtgatatggacgccgacggcctggaaatcctcgacgccgtacgacacaccggggtacgctgcaaatcgctgttcatggatttagaagcctaccagcgctactcatggttcggtaccaatctcacctcaaccagcacaccgctcacttcgcgcgagcccaaggcgacgcctacacttgactttggcgagcgtgagctctatctgctcacatgcggcgaggccgtcgggcaatccgacgaatccggtttgtccgacggcccaacccatctgcgcgtcgagcaggagcgaatcccgctcattgacgcggccgatgcgctccgctcgcttggatggccgatcgccgccaataatgacaaggagacacaatga

SEQ ID NO: 44856 - DNA, 1575 bp, Bifidobacterium animalis subsp. animalis; identical to SEQ ID NO: 42953

SEQ ID NO: 44857 - DNA, 810 bp, Bifidobacterium animalis subsp. animalis; identical to SEQ ID NO: 42954

SEQ ID NO: 44858 - DNA, 3462 bp, Bifidobacterium animalis subsp. animalis
ttgagcgagacttccgacatctatgcctcgattgaactcatgccgccgcattgggcgctcgcctcgcggcaattggtgaattggggttcctatgacggctaccatgtattcgaaccctccaccgccggcgacgatacggtgacgttgctcaccggccagagcgaatcgggaaaatccacactcgtcgacgcgcaggtctcgttgctctacccggcgaatgccgtattcaacaaggcctcgaacgccggacgctccgatcgcagcgactactcatacctgttgggactgaggggaatccgcagcaacaacgggcacgatgagccggtttacctgcgcgggcgcagcgggaagggcgagccgtacgcggtctggggtgcgatcgtcgaccactatgtcgacaccgccaacagcggcgcgttatggattgccaagttcatgtatctgcctgcggagggcacgtcggagagcatggtgaagctctatgtggtctccagctatgcaatcgacccgcggctcatggatgcacatcgcgaggagcgcttctcggtgccgctgatcaagcaggtgtacccgggcgtcaccgtgtacaactacgcgaagcagttccacgaagacatctggaaacgattcggcctcactgagtccgcgtgccgtctgctccaccgcatgcaggcctccgatgcgccctcccagctcgatgacatcttccgcaaaggtgtgctcaatgagccgcgcgccgttgagttcggcaagctcgccatcgacgattacgaacagttcgccgagaatttctcgagtatggagcgtacgcgtaagcgggtgcggcaactggaggcgatcgcctccgagttcgccgagtatgagtccgccgaacgtggtgtgcgcgagctttccgccatcgccccccagcagggcgatagcgcacggattcgcacccaatggcttgacgatcgcattcatgccgacatcaccgaagtactgcccgaatatgagcagtatgccacggagtgcagtgccagtgcacaggccgccaaagagcgggcggagcagatgcgggaacaggtcgactcgctcaataggcagcttcagggtatgggaggcgacgagataggccgcctggaagaccgcattcgcgatgcacagcggcgccaacgcgaagtgttgggacgcagggagctgttggcctcccgattcagtgcctctggcgaagcattgccggaaagtcgcgggcagtgggatgcattggtggccgaatacacgcaactcgaatcggaataccagcagcgtaaaaccgaattgcacgggttgcagtacccattgatcgacgcccagaagaaagccgaacagcgaatcaaggcactcgagaaggacttggaacgcaaacgccagtcgaagacgcgcatctccagcgatatggacgaggcccgcaatatgattgcgcgcgccaccggcctgagcccgcaggagctgccttatgcggcggagctcatggacgtgggcgaggagaacgaggagtggcgcaccgccatgaacgtggcataccggtcgctcgcaacggtgattctggtcgacagtcgccatgagaacggcttcgcagcgaaagtctcgcagatttcccaggaggcgctcccacgacgcaactggcggttcgtcgacacgagcgtccatgtggaggctgaggagcgtgaagggtggctgtcgagcaagctcacgttcaacgtggaatctccgttcgtcgattggcttcgtgcccgggtgaccgaggcacggtacgacgcatggtgcgtggaggcgatcgacgacaccaatgagacgacgcgccaggtgcagcgtgacggacagatcaaggaaggtcggaagggcagccacggcaccaagaacatgcctgccgtcatcggattcgtcaccgatgcctatctgcgcgatctggaggcagacattgccgaggcgcacaagacgcgggatgccgcaactcgcgatctcgaacagtacgacgtgcaactcaacgcgcttgagcaacgccatagtctggcccagacgctgcaggaccatgcatggaacgacatagatgcatacggtgtggaagaggaaatcgccagcctccaacaacgcgtcgacgaactcgagcagaaccccgaactggcacagctcaatgccacgctgaaagtccagcagcaggaaatggccaaggcgaacagtgcatgctatgccgcggaagacaaactcaagcgggcgaatgcggcggtgaggtcgacccggcagtggctggaagcgtatgaccggcgcacgcaatccgtggaacgccggcatttgaacgaggcatgcggtcggctgcttgaacagggatatctggcatacttcggcgagagcacacaatcggcgaacgaacgaatgggcagaatactcggtttggacgggcaatccggcacctcactgggcggccatgtacgcgagaacgaggcctgcgccaaacacgtacgcgaactgctcggcacactcgcccaaaccgtaggcaggcaggtgaaggaactggctacacagcgcgacaaccggaaacagtcatgcgaggcaagcatgcgctcgtacctcgaccaatatgcgtcaggcgacgaacgagtgagcgccgacgtggagaacgagcggtacttcaggaaagacctggaggagctcaaaccaggggtgatcggcgacgaggcgacgaacgtggaatacatgaactcgctcgacaagatgctccaggacctcgtgcagttgcagacgatgctcaaacttgaccagcagaggatcaccgaacagatcggcaaaatcaaccatctgcttgaacggtacccattcggtgcgcgaggcggtaggctgtcgatcgtcgtgcaggtgcacaggcccgatgcgaagttcaccacggcactcaccgggcaaatcggccgcatcaatgcgttcaaggcaaacgacgagcatgacgtggagaggtgccgaaagctgttcgccggccttgcgggactcatcgagatgttgcgcggcagcttcgacgaatatgcgggcaacggacgtggtaacgcgaacctcgacccacgcaaacgctcacggttcttcgggtcggtgacgaacccggatggcgtggtggaatcgatcaactccaccggcggcggatcgggcggctacttgcaggagctcacgtcgttcgcctacggcgcggcgctcatgtacctgctcgccaacgacaacgcaaccgaaccctcgtatgccaccgtcttcctcgacgaggcgctcatcaaagccgacggccagtacacgcgccgcgcattgagcgtgctgccgggactcggcttccaagtgatcgtttcggcaccggaatcgaagaccggcgagatcatgggttcggcttcgaaggtcattgtggcacacaaggaccaggccagcggcaggacgacgctgatgcagggagatctgctggggggacgctga

SEQ ID NO: 44859 - DNA, 1221 bp, Bifidobacterium animalis subsp. animalis; identical to SEQ ID NO: 42956

SEQ ID NO: 44860 - DNA, 1527 bp, Bifidobacterium thermophilum
gtgagcgacgtgagggcgcaacttgaacagctgcggccggtctacgaaacaggcgtgctccggctcctgttgcgcaatcatgcgatggcgtatgtcgcactgctgcgcacctgtttcaaaccattgaccgccgaactgcccaaagaaaccctcgaagcgcggcttgccggcgcgatcgaggagctttcccgcagcggcgactggcaactcaaggatgacgaaaccgcgcaggacagcgcccatcagacgcttgttgaactcacccgtgaaggcgaaggtgattacgcgtggctcgcgaattcgttcgaccaggcctcgcaccactatctgtaccggctgaccgcccgcgcccatcgcgcaatcgacgcgctgtcccagtttgaggacgccacgcgcgccttgtccggcgcccaggcgaattccatcatcatggaggtcgagaatgcccgcaaacgtctgacggttgatcccagcgagcgcatcagcctgctcgaagcggaaatccgtgaacgtgagcaggagattgacaagcttcgcggcggcaaggcggtggagtcgttaaccgaccaggatgtcgaggatatcatcgctgttgtgcacaacaccttgcgtggcgtaccggttgatttgcatgagcttgcgcttgaggagcgcgacaacggcgacatactgcgccgacggatgcaggagaactcaatgagcgttgacgagattcttaccgcataccatgagcgctatcgccgctcgatgcgcgagtcggatagtgggcgtcgttttgaggacgcattccaggtgattgtcaccgatgagggtcgtcggcagattgatgacgcaatgcaggatatcgcgcgaagcccgtatttgcgcggcgggtcgaatctgctgctcaatcaggtgcgagcggaactgaagcgtatttacgagggtatcgaggatgtccgccatcagattcgcgtgtccgatgaggcggtgagccgtctggtccggcagcgtagcgacacgcggtatcgtacggctttggacacgtttaaccgcttgtttgccgcaatcagccgcgatatcaaggatggtgagatgtccccgagcccgtattcgcttgacgtgaatgcggccacactgtccccgttgccgacgcgtccggcacgtccgatggtgtttacggcaccgccgagtctggacagcctgtcaccggaaaccgatgatgccactaggttcgccgagacggatttgcgggcgatggttgaggcgggtggcccacgattgcgccatatgctgtcactgattgtgcgcgacccgattatgcgcgacgggcgtgtggatgttgcggcgagtttcaaccagctagatgcttcggagcgacgggaaagtgaactcatcggctttctaggtgcgttgcgtgtggatgacgccgggcagttcgcacggtggcgttgcgtttcgccgaatggtacgacacgcgtgtggcgtacccgtccggttcttgccgacaccgatacgctgctcgagattatcgaggaggacgcatga

SEQ ID NO: 44861 - DNA, 705 bp, Bifidobacterium thermophilum
atgcctgacgcggttacggaagatatgcccgcgccctcggcagatgtgaccgccgatcctgcggataatccgcatgcgctgtttcccggggatacgagcacgatggatatcgacgcgcgtacggttgccatcaagctcaaacgcaatcggttcatcactggtgacgcttacgagatggcgctcgaccatgtggacgagatacggcagtcgttgaacaatgatctgctggaactggtggatattccgcgatatcgggtgatgtatgcccgtccggtgttggcggaagacttgggggcgcgcgctttgaaaacccgcgcatcgttgacacgcgaggaagcggcgatgctggcgctgctgcgcatccgtgtgctcgggtatgagagcgcacgcgaaccgtctgaaaactggattatcagcgttgatgagatccgtgccgccctgaccacgggcgccgggtggctcgccgcccgcaacgatgaggaaggcgtgatgaaacgtatcaacagtgcgattacgcggtgcaccagcaacgggtatcttgccgctgtcgaaggcactgacgacatgtaccgtattacgccgctggtgccggccgtgctcaccaccgaactcgccggacagtggctgaatgatacgcgaagcgggaacgatcagcatcaatcggatgataccgtacgcgacgatgaggaaacgaggctctcatga

SEQ ID NO: 44862 - DNA, 3495 bp, Bifidobacterium thermophilum
atgaccgacgacgcactcatggccgaccattggatgcttgccagccgccagctgatcaactgggggtcgtacgagggctaccacgtgttccgcccctccatggatccaggcatgccgatcacgctccttgccggggcgagcgagtccggcaaatccacgctggtggacgcccagaactccctgctctaccctgccggcacggcattcaacaaggcttcgaattccggacgttccgaacgcagcgattacacgtatctgcgtggtatgaccgccgtggccgacgacacggacggcgggacagccgtatatttgcgcggttcggctcaggacggatcgccgaccgcggtgtggggtgccatcgtggacacgtacgtgaatcgtatgggcggggagacgttgtcctgcgcgaaattcctgtacctgtcccccggcgacgagcgcggtaatgtgcgccgtcaatacgtgtcatggaaccatgagatcgacccgcgtaagatggacggctaccgctcttcgccgttcaccgccgaccagctgcgcaccgtctatcccggctgtgcggtgtattcgaacgccgagaatttccacgaatccgtgtggacgcgcatggggttgacggcggccgcctgccggctgctgtacaaaatccagtcagcggatgccccctcgcggcttgacgacattttcaaacagggtgtgcttgacgttcctcacgcgttgaccaaagcacgcgaagcggtggaggattacgaccggtacgacgagaacttccgcagtatggaagaaaacgcccgccaaatggacgctttgcgtgaaatccgtgacgaatacgccgaataccacgccatgcaagagcaggcgagagacctcagcgtcgccgatccgcaggatgacgccggacggcgcacactcaacacgtgggtgctgtctaaactggccgtcagcgtgcgtgaacagttgccgcaggaccgcaccacgctcgagcaccagcaagagcagtaccgcaaagccgaaacggcagtcaacgcgttgcagcgtgagctcgaccatatcaaggatgcgatgcacgacaagggcggtgacacgctcgcccgcatggaaaacgactatgcgcaagcgcagaaggaactcgatcaggtacgccatacggcaatccgtcttcgtcaagccttcagcaaggtggacgagcccatgccccagtccgaaacgtcatgggggcaacgccagcaggaagcgcaggatttcatcgacaacgccgaccggcaacgcgatgacctgtggcgacagcgggaagcgtacgtgacccgccgcaacaccatcaccagtcagcttgaccccatcaagcaggatttcgagcggcagagccgcaaacgcacccgcatcacgcaagatatggaagacgatcgcgccgccatcgcacaagcgaccgggctgaccgaacgcaatctgccgtacgtcgccgagctcatggacgtgcgcaaagacgacgaacagtggcgtaccgccatgaatgtggcatacgcgcccatcgcgcaaaccattctggtcgaccgccggcacgaacaggggttcgcacgcaaagtcagcaccatcgacccgtcaaccatgtccaggcgcacatggcagttcatcgacatcgacaccacccgcgacaacgaccagaccgccacaaccgacgaaagcagattgtccgggaagctgcggttccgcgaggattccccgttcctcgggtggttgcgcgagcaaaccacgtcacgccggcttgacgcactctgcgtccaaaccatcgatgacgggaacaccgcacggcaaatccaaccggacggacagatcaaagccggccaacgcggctcatacggcaacaagaacatccgcaatatcatcggtttcgccgatgaaacgtatttgcaagggctcaaacgccagatcgaccgactgaccgaacagctcaggcaatgcgaactggatggccaggacatcaaacggcagcaagaccatatggacgagctgcgggcactatccacccaaatcgtcgacctgccgtgggcacaaatcgacgaagccggcgtcaccgcgaaagtagagcgtcttgaacgcgatatcgacgcgatgcgcaacaacccggaactcgccaaactcgtcgaacggcgcgaacagacacagcatgcgctcgacaatgcgatgacatcccaagtgaacgccaaattcgaggtggatcgcacgcagcagatcatcgacgccaccgaaacgtggctgcgcgagcacgccgagcatatcgtcgaacccgccgccttgccgccactgcccgacaccgtcaccgacacgctcaattcaacctacgatgcggcaaccggcacggcaggagacaatctcgctcatatcaccgtcatgccatcccgttcgggcactcggcggttcgatgaacgcgtactgggagccgtcagcagcgctctggccaaacgcattggtgaggcatccgcacaagccgccaaaacgcgtaccgcagtagagcggcggatggccgactacctgtcccgctgggacgccgacgacacgaccgtcacccccaccgtggacgactaccggtattacgaagacgagttggccgacctctcacagattgtggcgcacgcggccacgccggaggaaatcgccaacagcgtacgcaaaatcgcgcttgacttcgacgagctgagcatgaatctcgacgatgaccagcgcgaagtacgcaaccagcttgaccgtatcaacgagatgttacgcggccaacagttcggcccccgtcatggcagcctcacgcttgacgtcaccatcaagccgcaaagcacgacattcagcggtacgctgcgccgcatcatcgggcagctcaacgcatggcaggcggagcagcccaccggaggcagtacggacggcagcgaagcacggcgcgcattcaacagttgcaaaccgatgatcgacctgctgcgcagcgaactgagtaaagtccgcgacaccgcgggaatccgccagtatggcgcccgggatctcgattcccgtgcccgcagctccttctacgcggtcgtccaccatgatgacggtccggatgaacgcatctcctcgaccggcggcaaatccggcggtgcgctgcaggagctcacgtcgttcgtgtacggcgccgcactgatctatctgctcggcggcgatatcagcggccaccccacctacaccacgctgttccttgacgaagcgttgatcaaggcggatggccggtatacgcagcgcgcactcaacgtgctgccccagctgggattccaggtcatcgtgtccgccccggaaagcaaaaccggtgaaatcctcgagatggcaacacgcggctacgtggtgatgaaagacgagacccagcattcgcatttgcaagagcttgacttggtcggcgcacatgcggatggcggagcgttcagcggaccttcggcagactctgccgggcctgcggggcatccggccgaggcgcactga

SEQ ID NO: 44863 - DNA, 1233 bp, Bifidobacterium thermophilum
atggcaggctcacgcgcacgcggtgtggatgcggagaaggcgcctgaggcgatccgcagcatcgtcacgacatatctggcgcgacaccggtacgatgccgtgccgtcgtggccattgatgttcgccgtacgatggccggatcagcgcacgctgaccacccaagcgcccgactggcatcgggccaataacgcattgcgtgagtgggcacggcgatgtgggtgtgcgaccacggaaaagaaccggcttatggtcacgcctgtggcgttgattgacacggtcggcgtaatcgacgaggctacagcgctgcgcgtggtcggcgagcaggcggcacgacggtatcgcaaggcgcgtgagcgcatcgaccggctggtcgtcgaactcgatgtttcacgtgaaacggcatcggttgtagcgaatatgctggaccgtgaatccgatacggatttcaccttagccatccaagccgcacggtttttcgccacacatgacgtctcaggcatgaccccgcggcaggttccactcgccggattcagcgccaaatggctcgatcagacgcacgccaagcggcgtggcgcaatatgcgcgttatgcggcaaagattcactgggactatccgaacgaccggtggaattacgcatgcgatggctcgacccgacggacgcggacaagccggagatgatggttaccacgccgtggcagccgggcggcgagcgtgatatccgctacgtcatcatcgtggaaaataaggatacatatctgggtatgccggccgtcagggacggactgtgcgtgtggggcgccggcagggcgatcgaagcatcgatatcactgctgccatggctgggcatgtccggcgaacgcggccgcgaaacgcacgtcgtgtattggggcgatatggatgccgacggcctggaaatcctcgatgccgtgcggcaagccggggtgcgctgccggtcgctgttcatggatgcggaagcttatcggcgctactcgtggttcgggacgaatctcaagccggaaggcactcctatcgctacgcgcgaacccaaagcgacacccatgctcgaccccagtgaacgcgaactgtaccagatggcctgcggcgccgacccttccagccgccccgaccatcttcgtgtcgaacaggagcgcatcccgcttgccgatgccgccaacgcgctacgctcattaggctggccgattatcaaccatcaacaccaggagacacgatga

SEQ ID NO: 44864 - DNA, 1527 bp, Bifidobacterium boum
gtgagcgacgtgagggcgcaacttgaacagctgcggccggtctacgaaacaggcgtgctccggctcctgttgcgcaatcatgcgatggcgtatgtcgcactgctgcgcacctgtttcaaaccgttgaccgccgaactgcccaaagaaaccctcgaagcgcggcttgccggcgcgatcgaggagctttcccgcagcggcgactggcagctcaaggatgacgaaaccgcgcaggacagcgcccatcagacgcttgttgaactcacccgtgaaggcgaaggtgattacgcgtggctcgcgaattcgttcgacccggcctcacaccactatctgtaccggctgaccgcccgcgcccatcgcgcaatcgatgcgctgtcccagcttgaggacaccacacgcgccttgtccggcgcccaggcgaattccatcatcatggaggtcgagaacgcccgcaaacgtctgacggttgatcccagcgagcgcatcagcctgctcgaagcggaaatccgtgagcgtgagcaggagattgacaagcttcgcggcggcgaggcggtggagtcgttaaccgaccaggatgtcgaggatatcatcgctgttgtgcacaacaccttgcgtggcgtaccggttgatttgcatgagcttgcgcttgaggagcgcgacaacggcgacgtgctgcgccgacggatgcaagagcattcgatgagcgtggatgagattctcaccgcgtatcatgagcgctaccgtcgctcaatgcgcgaatcggatagtgggcgtcgttttgaggacgcattccaagtgattgtcaccgatgagggtcgtcggcagattgatgacgcaatgcaggatatcgcgcgaagcccgtatttgcgcggcgggtcgaatctgctgctcaatcaggtgcgagcggaactgaagcgtatttacgagggtatcgaggatgtccgccatcagattcgcgtgtccgatgaggcggtgagccgtctggtccggcagcgtagcgacacgcggtatcgtacggctttggacacgtttaaccgcttgtttgccgcaatcagccgcgatatcaaggatggtgagacgtccccgagcccgtattcgcttgacgtgaatgcggccacgctgtccccgttgccgacgcgtccggcccgtccgatggtgtttacggcaccgccaagtctggacagcctgtcaccggaaaacgatgatgccaccaagttcgccgagacggatttgcggacgatggttgaagcgggtggcccacgattgcgccatatgctgtcactgattgtgcgcgacccgattatgcgcgacgggcgtgtggatgttgcggcgagtttcaaccagctggatgcttcggagcgacgggaaagtgaactcatcggctttctgggtgcgttgcgtgtggatgatgccggacagttcgcgcggtggcgttgcgtttcggcgaacggcacgacacgcgtgtggcgaacccgtccggttcttgccgacaccgatacgctgcgcgggattatcgaggaggacgcatga

SEQ ID NO: 44865 - DNA, 753 bp, Bifidobacterium boum
atggccgatgatattgccgatatgatggctgatttgggtgcatcgaacatgtctggcgcggttacggaagatatgcccgcgccctcggcggatgcgaccgccgaccctgcggataatccgcatgcgctgtttcccggggatacgagcacgatggatatcgacgcgcgtacggttgccatcaagctcaaacgcaatcggttcatcactggtgacacttacgagatggcgctcgaccatgtggacgagatacggcagtcattgaacaatgatctgctggaactggtggatattccgcgatatcgggtgatgtatgcccgtccggtgttggcggaagacctgggggcgcgcgctttgaaaacccgcgcatcgttgacgcgcgaggaagcggcgatgctggcgctgctgcgcatccgtgtgctcgggtatgagagcgcacgcgaaccgtctgaaaactggattatcagcattgatgaaatccgtgccgccctgaccacgggcgccgggtggcttgccgcacgcaacgatgaggaaggcgtgatgaaacgtatcaacagtgcgattacgcggtgcaccagcaacgggtatcttgccgctgtcgaaggcactgacgacatgtaccgtattacgccgctggtgccggccgtgctcaccaccgaactcgccggacagtggctggatgatacgcgaagcgggaacgatcagcatcaatcggatgataccgtacgcgacgatgaggaaacgaggctctcatga

SEQ ID NO: 44866 - DNA, 3495 bp, Bifidobacterium boum
atgaccgacgacgcactcatggctgaccattggatgcttgccagccgccagctgatcaactgggggtcgtacgagggctaccacgtgttccgcccctccatggatccgggcatgccgatcacgctccttgccggggcgagcgagtccggcaaatccacgctggtggacgcccagaactccctgctctaccctgccggcacggcattcaacaaggcttcgaattccgggcgttccgaacgcagcgattacacgtatctgcgtggtatgaccgctgtggccgacgacacggacggcgggacagccgtatatttgcgcggttcggctcaggacggatcgccgaccgcggtgtggggcgccatcgtggacacgtacgtgaatcgtatgggtggagagacgttgtcctgcgcgaaattcctgtacctgtcccccggcgacgagcgcggtaatgtgcgccgtcaatacgtgtcatggaaccatgagatcgacccgcgtaagatggacggctaccgctcttcgccgttcaccgccgaccagttgcgcaccgtctatcccggttgcgcggtgtattcgaacgccgagaatttccacgaatccgtgtggacgcgtatggggttgacggccgccgcctgccggctgctgtacaaaatccagtcggcggacgccccctcgcggcttgacgacattttcaaacagggtgtgcttgacgttcctcacgcgttgaccaaagcacgcgaagcggtggaggattacgaccggtacgacgagaacttccgcagcatggaagaaaacgcccgccaaatggacgctttgcgtgaaatccgtgacgaatacgccgaataccacgccatgcaagagcaggcgagagacctcagcgtcgccgatccgcaggatgacgccgggcggaacacgctcaacacgtgggtactgtctaaactggccgtcagcgtgcgtgaacagttgccgcaggaccgcaccacgctcgagcaccagcaagagcagtatcgcaaagccgaaacgacagtcgacgcgttgcagcgtgagctcgaccacatcaaggatgcgatgcacgacaagggcggtgacacgctcgcccgcatggaaaacgactatgcgcaagcgcagaaggaactcgatcaggtacgccatacggcaatccgtcttcgtcaagccttcagcaaggtggacgagcccatgccccagtccgaaacgtcatgggagcaacgccagcaggaagcgcaggatttcatcgacaacgccgaccggcaacgcgatgacctgtggcgacagcgggaagcgtacgtaacccgccgcaacaccatcaccagtcagcttgaccccatcaagcaggatttcgaacggcagagccgcaaacgcacccgtatcacgcaagatatggaagacgatcgcgccgccatcgcacaagcgaccgggctgaccgaacgcgatctgccatacgtcgccgaactcatggacgtgcgcaaaaacgacgaacagtggcgtaccgccatgaatgtggcatacgcgcccatcgcgcaaaccattctggtcgactgccggcacgaacaggggttcgcacacaaagtcagcaccatcgacccgtcaaccatgtcccggcgcacatggcagttcatcgatatcgacaccacccgcgacaacgaccagaccgccacaaccgacgaaagcagattgtccgggaaactgcggttccgcgaggattccccgtccctcgggtggttgcgcgagcaaaccacgtcacgccggcttgacgcactctgcgtccaaaccatcgatgacgggaacaccgcacggcaaatccaaccggacggacagatcaaagccggccaacgcggctcatacggcaacaagaacatccgcaatatcatcggtttcgccgatgaaacgtatctgcaagggctcaaacgccagatcgaccgcctgaccgaacagctcaggcaatgcgaactggatggtcaggacatcaaacggcagcaagaccatatggacgagctgcgggcactatccacccaaatcgtcgacctgccgtgggcgcaaatcgacgaagccggcgtcaccgcgaaagtagagcgtcttgagcgcgatatcgacgcgatgcgcaacaacccggaactcgccaaactcgtcgaacggcgcgaacagacacagcatgcgctcgacaatgcgatgacatcccaagtgaacgccaaattcgaggcggatcgcacgcagcagatcatcgacgccaccaaaacgtggctgcgcgagcacgccgagcatatcgtcgaacccgccgccttgccgccactgcccgacaccgtcactgacacactcaattcaacctacgatgcggcaaccggcacggcaggagacaatctcgcccatatcaccgtcatgccatcccggtcgggcactcggcggtttgatgaacgcgtgctgggagccgtcagcagcgctctggccaaacgcatcggcgagacatccgcacaagccgccaaaacgcgtaccgcagtagaacggcggatggccgactacctgtcccgctgggacgccgacgacacgaccgtcacccccaccgtggacgactaccggtattacgaagacgagttggccgacctctcacagattgtggcgcacgcggccacgccggaggaaatcgccaacagcgtgcgcaaaatcgcgcttgacttcgacgaactgagcatgaatctcgacgatgaccagcgcgaagtacgcaaccagcttgaccgcatcaacgagatgttgcgcggccaacagttcggtccccgtcatggcagcctcacacttgacgtcaccatcaagccgcaaagcacgacattcagcggtacgctgcgccgcatcatcgagcagctcaacgcatggcaggcggagcagcccaccgcaggcagcgcgaacggcagcgaagcacggcgcgcattcaacagttgcaaaccgatgatcgacctgctgcgcagcgaactgagtaaagtccgcgacaccgcgggaatccgccagtatggcgcccgggatctcgattcccgtgcccgtagttccttctacgcggtcgtccaccatgatgacggtccggatgaacgcatctcctcgaccggcggcaaatccggcggtgcgttgcaggagctcacgtcgttcgtgtacggcgccgcactcatctatctgctcggcggcgatatcagcggccaccccacctacaccacgctgttccttgacgaagcgttgatcaaggcggatggccggtatacgcaacgcgcactcaacgtgctgccccagctgggattccaggtcatcgtgtccgccccggaaagcaaaaccggtgaaatcctcgagatggcgacacgcggctacgtggtgatgaaagacgagacccagcattcgcatttgcaagagcttgacttggtcggtgcacatgcggatggcggagcgttcgacggaccttcggcaggctctgcccggcctgtggggctgccggccgaggcacactga

SEQ ID NO: 44867 - DNA, 1233 bp, Bifidobacterium boum
atggcaggctcacgcgcacgcggtgtggatgcggcgaaggcgcctgaggcgatccgcagcatcgtcacgacatatctggcgcgacaccggtacgatgccgtgccgtcgtggccattgatgttcgccgtacgatggccggatcagcgcacgctgaccactcaagcgcccgactggcatcgggccaataacgcgttgcgtgagtgggcacgacgatgtgggtgcgcgaccacggaaaagaaccggcttatggtcacgcctgtggcgttgattgacacggtcggcgtaaccgatgaggctacagcactgcgcgtggtcggcgagcaagcggcacgacggtatcgcaaggcgcgtgagcgcatcgaccggctggtcggcgaactcgatgtttcacgtgaaacggcatcggttgtagcgaatatgctggaccgtgaatccgatacggatttcaccttggccatccaagccgcacggtttttcgccacacatgacgtctcaggcatgaccccgcggcaggttccactcgccggattcagcgccaaatggctcgatcagacgcacgccaagcggcgtggcgcaatatgcacgttatgcggcaaagattcactgggactatccgaacgatcggtggaattacgcatgcggtggctcgacccggcggacgcggacaagccggagatgatagtcaccacgccgtggcagccgggcggcgagcgtgatatctgctacgtcatcatcgtggaaaataaggatacatatctgggtatgccggccatcagagacggactgtgcgtgtggggcgccggcagggcgatcgaagcatcgatatcactgctgccatggctgggcacgtccggcgaacgcggccgcgaaacgcacgtcgtgtattggggcgacatggatgccgacggcctggaaatcctcgatgccgtgcgacaagccggggtacgctgccggtcgctgttcatggatgcggaagcttaccggcgctactcgtggttcgggacgaatctcaagccagaaggcactcctatcgctacgcgcgaacccaaagcgacacccatgctcgaccccagtgaacgcgaactgtaccagatggtctgcggcgccgacccttccagccgccccgaccatcttcgtgtcgaacaggagcgcatcccgcttgccgatgccgtcaacgcgctacactcattaggctggccgattatcaaccatcaacaccaggagacacgatga

SEQ ID NO: 44868 - DNA, 1497 bp, Bifidobacterium catenulatum DSM 16992 = JCM 1194 = LMG 11043; identical to SEQ ID NO: 42323

SEQ ID NO: 44869 - DNA, 840 bp, Bifidobacterium catenulatum DSM 16992 = JCM 1194 = LMG 11043
atgacggacaacaccgacggattcgacactggcatcggcatcgaagaggagacaggcccggaatccggcatgccgtccgaagggccggccatgacgagggacaggccggcattgttcgacggggatacgggagacatgcctcttgaggcgcgtatggccgcgatcgcgctgaaacgcgaacgctacatcgacggtagcctgtacgacagggcgtgccagtaccgtgaggccgtggaacggtcgttgaacaacgacatgctcagactggtcgacaacacgaaataccggatcatgtacgcgtcgccggtcacggacgcggagacgaacatccgctcgttgaagacgcgtgtgagcctcacccgcgaggaggccgccacgctcgcggccctgcgcatcaaggtgctggagtacgagaaccagaagacgaagccgggcgactggctcatcagcttcgacgacatccgcgcgctgctcgccacgggagcgggcttcctcacggccagcaacgacgaggagggcacggcgaagaagatcacgtccgtcatctcgcgcatgcgcacctacgggtatctcgcggaaacgggggacgagaacatgtacgtgctcacgccattggtgccgatggtgctcgaccagaagctcgccgaccggtggctcggctccgatgatacggacggcgatggtatgaaagacgcggatggcgatggttatgacgattcgtccatcggcgcggatggtggcgatacttccgattcgaccgggacggtttcgtccggcgtcgagcaggacgcgttcgatttcgattcggccgatgacgcttttgatggaggggaacactga

SEQ ID NO: 44870 - DNA, 3459 bp, Bifidobacterium catenulatum DSM 16992 = JCM 1194 = LMG 11043; identical to SEQ ID NO: 42325

SEQ ID NO: 44871 - DNA, 1242 bp, Bifidobacterium catenulatum DSM 16992 = JCM 1194 = LMG 11043
atggcagcggccagaaacaccacaggcgaaacggacatccgccggaaactcgacgaatacgtcgacgcccacctcaccaggcacatgtacgacaccgacgaatcctggccgctgcgcaaaaccatccgactgcccaaacaagccgaactagagcagcactacaaccaaatccgcgcccaaaacgaaaccatccgcgactgggcgcggcaacaccactgcgaaaccagcgaaaaaaaccaaaaatcgtctccagcggactcatccaacaaaaaaagcccgctcatcgactccgtgaccatacccgacctcgacaccgccctccgcatcgccaccaaacaaacccgcgaacgctacctacgcgaacacgaccgcatgagcgcgctcgccaaagaattcggcctcgaaccggagaacgccatgaacgtcgccaaaaccctcaaagaccatgacgacaccgacttccacctcgtcatccaagccgctcactacttcgcaaaccacgactgccacaccatgaccccacgcatggcgcccatcccaggattcagcgccaaatggctcggcgcacccaactctcaacgccgcaaagcgatatgccagctcaccggacaagacaacctcaccttccaggaacgcccgaacgaactccgactacgcctcatggacgccgaacaccacgaccaacccgacctcatcgtcacccaaccatgggtccgcagccagccaaccgacatcgaacacgccatcatcatcgaaaacaaagacacctaccaggccatgcccaccgtcgaacacgccatctgcatcctcggcaacggatacgccgcaacatcacacatcacaacactcctgccatggctcaccaccatcccccaacatcatctactggggcgacatggacgccaacggactcgacatcctctccaaactacgcgccaccggcatcccatgcacatccatactgatggacaccaccgcataccggacatacgaacaatacggcacccaattcgacgccaaaaaacaaacccctcaccacacaaacccccacaacccacacccggactcaccaccgaagaacgcaaactctacgaaacactctgcacaggaacagacatccaatacctacgcatcgaacaggaacgcatccccatacgcgacgccacaaccatcctgcacgaccaacaccactggccaatcgacatacccggcaacgacataccaaacaacaacaccaaatag

SEQ ID NO: 44872 - DNA, 1497 bp, Bifidobacterium cuniculi
atggcggacgtaagagaggagctcgcgcagctgcggccggtctatgacaccggcgtactgcgcatgctgctgcacaagtactccgacatctacgtggccatgctgcgcgcctgcttcaccccgctgaccgcggaagtgccccaggagcggctgctggcggacatgaccgacgccgtcggtgagctcgtggcatccggcgactaccggctgcgcgacggcgaggacgacgccatggcggcccggcgcatcctcaaggaactcaaggcacaggacgaaggcgactacgcctgggtcgccgactccttcgaccgccgccagcaccggctcatgtgccgcctgacccagcgtgcccaccgcgccatcgaagcgctcgccagcctgcagacacgcaccgtctccctgtccggcgctcaggtcaactcgatcatcatggagatcgaacacgcccgcaagcagctcaccgtcgacgtcgaagaacgcatcgagctgctcgaacaggaaatcgcggagcgccgccggcagatcgacgaactcaaggcgcacggcatcgaacggcagcccaccgccgaacaggtcggcgacatcatcaacgtcgtctacaacacgctgcgcggcgtgcccgtcgacctgcgcgaactggtgatcgccgaacgcgacaacggcgacgcgctgcgccggcgcatggactcgggcaccatgagcggcaacgacatgctcgacttctaccacaacgactacgaacgcacctaccgcgacagcgacgagggacgacgcttcaacgacgccttccaggtgatgtacgcgccggaaagccgcgagcagctcgacgacgccctcgacgacatcgcacacagcgagtggctgcacggcgaagccgacgagctcatggccgtcgtctcccacgaacttgaggacatctacggcggcatcgacgccgtgcgcgaccagcagcgcgtcaccgacgacagcgtcaagctgctcgtacgccagcagaccgacatgcgcttccgcacgatgtcacggcagctgtcgcgcctcttcgccggcctcggccggcgtgcacgcggcaaggagcgcttcgactgcgccatgggcgacgtgacgctgcccacgctgcccatgcgggtgcgcgagacgacgcgcagtgcacggccgccggccctgcgcgaggcggatgacggcacgtccgcgctcgacctgggccgtatcgtggccatcggcggcccgcgcatcgcccacatggtcagcctcgtggccgccacccccgtccacgccggcgagctggtggacgtcgccgccagcttcaacgcgctggatgccgaggaacgccgcgaaagcgaactcgtcggcttcctgagctacctggcgcccgacgccgaagccgacgactggtccacctggcgctgcgtgggtgccgacggcaccgaacggctctggcgcacccgccccctgctggtgagcgaggcacatctcgacgacttcctggaggagacatga

SEQ ID NO: 44873 - DNA, 762 bp, Bifidobacterium cuniculi
atgacggacgacaccaacgaagcactcgcgcacgacgcgctggccggcgacgacgaacggccggccgtggtcgacggcagcggcatcgccgacctgaccggcatccacgccctcttcgaaggcgacagcggcgacatgcccatccaggcacgcgaagccgccatccagctcaaacgcaaccgcgccatcgacggtgccctgttcgaccaggccatggaccacctcgccgacgtgcggcgctccctgaacaacgacctgctcgacctgctcatcgacgaacactaccgcgtgatggtcgccgtccccgtcagggccgacggctatgccgtgcgctccctgaagaaccgcgcatccctcaacgcacgtgaggcatccctcctggccgcgttgcgccgcaaggtgctcgaatacgagaacgtggacgtgccgtccgaaggctgggaggtctcccgcgaggagatcgtgcaggtgctgtccaccgggtccggcttcctggcaggccgcaacagcgagcaggccgtgcacgagcaggtcgaccggctcatcggcaccatgcgcaccaacgggttcctcgaggaccgcggcgacgggctctacctggtcaccagcctcgtgccgatggtgctcgacccggcgcacatcgacctgtggctcggtgcgctcgacgcgcccgacgacgacggggaggcaccgccggccgacgcggacgaggccgacgacgatggcgaagtcaccgaggagaaggacgagacactgtggtaa

SEQ ID NO: 44874 - DNA, 3438 bp, Bifidobacterium cuniculi
gtggtaaacgaggaactcttcgcccagatcgaactgtcgccggcccactggcagctggccgaacgccagctcgtcaactgggggtcctacgacggctaccacgtcttcaggccggcgcccggcgacggcgagcgcgtcaccctgctcaccggccagagcgagtcaggcaagtcgacgctcgtcgacgcgcaggtgtccctgctctacccgacgggagccgccttcaacaaggcctccaacgcgggcaggtccgaccgcagcgactacacctacgtacgtggcctgcgcggcgtgcgcaacgaccgcggccacgacgaacccgtctacctgcgcggcacggacggcgacggcaacccgtacgccgtgtggggcgccatcgtcgacacctaccatgacgacgccaacgacggcaccctgtccatcgccaagttcatggccatccccgccgacggcagcccgcaggacatggtcaagctgtacgcggtggcgcccggcggcctcgacccgcgcctcatggacggcgtgcgcgacgagccgttgacggccgccgtgctcaagcgcgtctatccggacgcccgtgtctaccggcacgcccgccagttccacgaggacgtgtggcggcggttcgggctgaccgagtccgcgtgccgcctgctgcaccgcatgcaggcgtcggacgcgcccagccagctcgacgacatcttccgcaagggcgtcctgcaggagccgcgcgccttgcagctgggacgccacgctgtggatgactacgggcagtaccgggagaacttcacgagcatcgaacgcaaccgcgagcgggtcgccatgctcgagacgatggccgacgaataccagcggttcgaggaggccgacggcgacgtgcgcgcgttgggcgccatcgaccccatgaacggggcgccggccgtcaaggcgcgcgacgcgtggctcgaccggcggatcgacgaggatctggagcgcatggtgccgtcctacgcgcaggccatggacgctgccgccgccaaggtcgcgcagctggagacggagcagacggacctgcaggccgcctacgacgaggcgcgcgaacagctgcgcggggccggcggcggcgacctcgaacgcctgcaggagcagctcagggacgtccagcgggaacgctccctggtcaaccagcggcgtgaacgtctcctggcgcgcttcgccaaggtgggggaagagttccctgccgacgcgccaggctggcaggagtttgccgaccggtgcgcggcgtacctggaggacgagcgcgaacggcgcgaccagcttgaccatgagcggttcagcctcatggagtcgcgcagcaggctcagggaggaactcaaggaactcgaggacgactacgcgtaccgcaaggcgcacggcacgcgcatcagcaccaccatgaagcaggcgcgcgaactggtcatgcaggccaccggactgggggaggacgagctgccctacgtcgccgagctcatggacatcgacgacgaggactggcgcgtcgccatggacgtcgcctacgcgcgcattgcgcaggtcattctcgtcgaccggcgccacgaggacggcttcgcacgcaaggtcagcaccatcccgcaccagctcatggcgcgccgcaactggcagttcgtggacacgtccgtgcagccggacgtgcgggagcgcgacggctggctgtccggcaagctgcgggtgaaggagtcgccgtttgccggctgggtgcgcgagcgcatcgccgccgacgacgtcgacgcgcgctgcgtgcaggccatcgacgaccgggacacgacccgccaggtgcagcccgacggccagctcaaggcaggcatccgcggcagccacggcaccagggggctcgaaccggtcatcggcttcgtcaccgaggagtacctgcgccagctcgaggcgcgcatcggacaggtgcgtgcgcagctggaggagctggagggacggctggccgacctcgaccggcagcatgacctgctcgaggcgtggcgtgtcctcgccgccgccgtcaccgacgacagttgggacgcggtggacgtggccagcagggacgcgcgggccgcgcacctcgaggagcgcatcgccgccatccgcgacaaccccgagctcgccgccctcgaacagcgctgcgaggactgtgcgggcaagctggccaccctgggccgtcggctcgccaaggcccgcaacgaacgcgccgacgcccagcgcgccctgcacgccgccgaaggctggctggccgaggcatccggccacggcgaccccgcgctcaacaaggccagcagccaggtcctcgccgaagcctacggttccttcttcggcaccgactccagcgtggaggaacgcgtcggcaagatcctcgccgtcgacggcggcgccgccggcagcgcccacgcgccggccgacggacgcgccgccagcccggtcgtgcgcagcctgcgcgaacggctcgcccaggccacgcgggcgacgcgcgaggaacgcgaacgcgcccgccagctgctgcgcaagacctgcgaagcgaccatgcaacgctatctggagcgctatctgccgcaggagacgcgcgtggccgccgacgtcgacaacgaacggttcttcgaacgcgaactggccgagctgcagcccaacaccatcagccagcgcgaggcggaccgcgaatacttcaactcgctggacaaggtgcgccaggacctcatgcagctgcggcgcgccctcaaggaggaccgggcgcacatcaagacacaggtcgccaagatcaacggcctgctcgaacgctaccccttcggcgccagccacggccagctgcgcatcgtcgtgcaggtgcgtgccgccgatccgaagttcatggccacgctgcagcgcgtcatcgacgacctcaacaccttccgccaccaaggcggcggcgacgtggaccgctgccgtgagctcttcgcgcaggccgcgcccctcatcgacgccatcaagggcagcttcgacgaatatgcgcccaacggccgcggcaacgagaacctcgacccgcgccgccgttcgcgcttcttcggcgaggtgctccgccccgacggcgccaccgaacgcatcaactccaccggcggcggctccggcggctacctgcaggaactgacttccttcgcctatggcgcggcgctcatgtatttgctggcggacgacaacgccaccgaaccgtcctatgccaccgtcttcctcgacgaagccctcatcaaggccgacggccagtacaccaggcgcgccctgagcgtgctgcccggcctgggcttccaggtcatcgtgtccgcaccggaatcgaagaccgcggaaatgatgggagcggccagcaaggtcgtcgtcgcgcgcaaggaccaggccagcggcctgaccacgctgcacgaggccgtgttcgagaccgcggacggcgactga

SEQ ID NO: 44875 - DNA, 1137 bp, Bifidobacterium cuniculi
atgcgttcgccgcgggaactggcctccctggtcgaggcgcatctggggcgtcacctgttcgacgtggccgacccgtggccgctgacgctcaccgtgcagctgccgtcggcacgtgcgctcgaggacgacccggcgggcgcggcacgcaccaaccgggagatccttgcatgggcggatgcacacggcgtggccacgcgcctgacggtgcgccgcatgggcggcacgccgctcgaactggtctcgcacgtcaccatccccgacgaggacgtcgcccagcgggtggtggggcgcgccatgcgcgggcgccggtgcagggtgctggcgcgggcggcccgtatccgcgcattgggatggccggtgggggaggagtgcgtgatgcgggtggtgcgctggacggaggatgcggacgacctcgacttcgacctcctgatggcggcggctgtctggttccacggccacctgggggcggtggcgtcgatgaccgcgcgcgaagtgcccttggagggtttcagcggcaaatggctgggcggcgtgcgttcgttgcaccgtcgtgccctgtgtgcactgctcgaggtggacgggttgccgttgcgcgaacgcccggaagaagtgcgctaccgctatctcgacccggccgccgccggctgggcggagcgcttggccaccgaggtgcaggaggcgcccgagctgccggtggcgcgcgccatcgtcgtggagaacaaggacacctacctggccatgccggccatggcggggacggtctgcgtgttcggcgccggcttcgcggtgggcgctgcggtgcgtctcctgccgtggctggccggactcgacgtggcctactggggtgacctggacgcggcgggcttcgagattctcgcctcattgagggcggcgggtctggcggcacgcgccgtgggcatggacctggccacctatgaacgcttccgggcctacgggacggcgctgggtgagcgggggacgcccatcaaggcgtcggaacccaaggaagggctggacctgaccgacgacgaatatgccctctatggggccctgtgccgccaggaacttggggtgccccgtgtggagcaggagcgcatcccgttggattgggtgatgtcggtcccccaaccccgctag

SEQ ID NO: 44876 - DNA, 1518 bp, Bifidobacterium kashiwanohense JCM 15439 = DSM 21854
ttggcggatgtaagacgggaaatggaacggctccggcccgtgtatgagaccggggtgctgcgattgctgctgcgcggcaattccatgctgtacgtcgcgctgctgcgctccacgttcgacccgctcaccggcgagctgccacgcgagatcgtcgaggaacggttctcccgcagtctgacccgacttgcggaaacgggcgattacacgcccaaggaagggcagacgtccgcggaagccgcgcacacgatcctgcagcagctgacgaaggaaggcgaaggcgactacgcttggctcgccaattcgctcgacgtcgcagcccaccgctacctgtaccgtctcacggcgcgcgcccaccgtgcgatcgaggcgctcgaccggctcgaggacaccacgaaagcgctgtccggcgcgcaggccaacagcatcatcatggagatcgagcatgcgcgcatgcagctgaccgccgacccccgcgaacgcatccgcctgctcgaacgcgacatcgaggagcggcaaaagcagatcgacgaattgaagcacagcgacacgttggacaagctcacctcccaacaggtgggcgacatcatcggcgtcatccacaacacgctgcgcggcgtgccgatcgacctgcgcgaactggcgctcgaggaacgcgacaacggcgacaatctgcgccgaagcatgcagtcgggctccatcagcgtggagcaggcgctcggcacctaccatgacgaataccacaggtcgttccacgaatccgacagcggccggcgtttcgaggacgcgttccaggtgatcgtcaccgacgagggacgccgcgaaatcgacgaggcggtgcgagacatcgcccagaacccgtatctcgagggcgagcccggcatcctgctcgcccaggtacgcgccgaactcaaacgcatttacgagggcatcgaggacgtgcgccggcagatccgcatatccgacgaggcggtgagccgtctggtgcgccagcagaccgacacgcattaccgcaccatgctcgacaagctccacagactgttcgtgcgggccagcgacgacgcgaagacgtaccccggctcggacgaacgcccataccgtacggacaccggcacggcgcaattccaggcattgccgtccaggcccgcgaaatcgatggcgcgcgcggccacggccggattggacgacgcgccttcgacgaacgtcgacgcgccggacctgaaggccatggtcgagatgtgcggcccgcggctgacgcacatgatcggactcatcaggcgcgatccggtcaaaacggcggacggcaggttcgtggatttcgcggcgagcttcaaccggctgccccgggaggaacggcgcgaaagcgagctgatcggcttcctaagcgccctacgcacgcaggacggaccggcaaccgtggcatggcattgtgtatccatcgacggaggcgagcgcgtgtggcgcaccaggccgatcttcaccaccgaggcggcgcttgacgagatcatcgaggagggatga

SEQ ID NO: 44877 - DNA, 840 bp, Bifidobacterium kashiwanohense JCM 15439 = DSM 21854
gtgacggacaacaccgacggattcgacactggcatcggcatcgaagaggagacaggcccggaatccggcatgccgtccgaagggccggctatgacgagggacaggccggcattgttcgacggggatacgggagacatgcctcttgaggcgcgtatggccgcgatcgcgctgaaacgcgaacgctacatcgacggtagcctgtacgacagggcgtgccagtaccgtgaggccgtggaacggtcgttgaacaacgacatgctcagactggtcgacaacacgaaataccggatcatgtacgcgtcgccggtcacggacgcggagacgaacatccgctcgttgaagacgcgtgtgagcctcacccgcgaggaggccgccacgctcgcggccctgcgcatcaaggtgctggagtacgagaaccagaagacgaagccgggcgactggctcatcagcttcgacgacatccgcgcgctgctcgccacgggagcgggcttcctcacggccagcaacgacgaggagggcacggcgaagaagatcacgtccgtcatctcgcgcatgcgcacctacgggtatctcgcggaaacgggggacgagaacatgtacgtgctcacgccattggtgccgatggtgctcgaccagaagctcgccgaccggtggctcggctccgatgatacggatggcgatggtatgaaagacgcggatggcgatggttatgacgattcgtccatcggcgcggatggtggcgatacttccgattcgaccgggacggtttcgtccggcgtcgagcaggacgcgttcgatttcgattcggccgatgacgcttttgatggaggggaacactga

SEQ ID NO: 44878 - DNA, 3459 bp, Bifidobacterium kashiwanohense JCM 15439 = DSM 21854
atggaagacggcatgaaaatcgtttccgaccgttggacgctgcaaagccggcagatcgtcaactggggctcctacggcggctaccacgtgttccgcccgtccatggacgatgcgatgccggtgaccctgctcgccggcgcgagcgaatcgggcaaatccacgctcgtcgacgcgcagatctcgctgttctacccatccggcaccccctacaataaggcgtcgaattcgggacgttcggaacgcaacgactacacgtacctgcgcggcatgatcggcatcagcgacggcgaaaacggtgagaccccgatcttcctgcgcggcagggacgcggacggcaccccgcagaacatctggggcgcgatcgtcgacacatacacgaaccgcagcgacggcggactgttgtcctgcgcaaaattcctctacctgaccgcaggcgacgggccggacggactgcgccgccaatacgtcacctggaaccagaccatcgacccgcgcctcatggaccggcaccgcgacacgtcattcacgcgaggactgatggaacagacctacccaggatgcacgacgcacgtcaacgcgcaggcgttccacgcctccatctggcaggacatgggcctaagcgccgaagcatgcaggctcctgcacaagatccaatccgccgacgcgccctccaaactcgacgacatcttcaaacagggcgtgctcgacgtgcccgaatccatccggctcgcccgcgaaaccgtcgacgactacaaccggttcagcgagaacttccacagcatggaagacaaaatggaacgcgtcgccatcctgcaggacatacaagcccgctacggcgaatacgccaaacaagccagcgaacgccgagaatacacgcccatcgaccccgaccgcgagcaaggcgagacgacgctcgccgcatggacatggtcgcgcatggccagcgaagtacgcgccggactgccatcggcgcaacgcaaagccaaggaatcccaggacgccatcgaccggtctcagcagcgcatcgacgaactcgacacgcaaatcgaagccgtcaaagaacgcatgaacggcatcgacggcggcagcctgcagcaactcggcaaggacttcgaacgcgcacgccaggacgccgacgaggcgcgcagacaacggcacgccatcgccgaacggttcgaacgcgtcgaaggcagactccccgccgacgagcagacatggaacgccaaacgcgccgcgctcgccttgtcgctcgacacgtacgacaagcgtttggaagacgcgcgatccgaataccagcggatggtggtggaacgtcacgcccggcagggcgaacgcgacctgttgaggcaggattaccggcgcaagatcgaacacaggacgcgcatcagcgacgacatggaccatgcgcgcacgctcatcgcacgggcgacgggcttggacgagacggaactgccgtacgtggccgaactgatggacgtggacgagggggacgagcaatggcgtctggcgatggacgtcacgtacgcgcccatcgcgcagaccattctcgtggacaagcggcatgagcaggggttcgccgcgaaggtcagcgcgatcgatccgactcgtatgacgcggcgtgcctggcgtttcgtcgataccgacgcgcaatacgattcggcctgcaacgaggggtggatatcgtcgaagctgcggtacaaggaggattcgccgttcgtcggatggttgaaggagcagaccgcgtcgcaacggttcgacgcgcgttgcgtggaggcgatcgacgacatggaccgggccgaacggcaggtgcaggtcgacgggcagatcaaatccggcgaccgtggattctatggcgtcaaaggcctgcgtcaggtcatcggcttcgtgaacgaacggtatctggccgaattggaacgccagcttgacggggcggaacgggcgttggaggacgccgaccgccgcggcaggcagatggccaacgccatgactctgctgcaggacgagcatgagctcgcattgaccgtcgcggatctgccatggggcaagatcgacgtggacgggctcgagacgaaggcggaacggatccgtctgcagatcgaacggatcgaaagcgatccggaactggcacaattgcaggacgagttgaaacagctgctacggcagaaggacgacgagggcaagaccaggtaccgtgccgaagcggaattggaaaacgcgcagcatgccgtccaggccgaacaggcatggctcgacatgcatggcgactccgatttcgacgatgccgcattgtccgacatggtgtcgaatctgctggccgacacgtatgagacctgtttcgacacgtcgcgtccgcaggaacggccgcagcgcatcgccggcggtttcgaccgtgaggggacggcgccgttcgacgtgcgcgtgctgcgcagaatcggcaacaccgtgcgtgcgagactccagcagatcgacgagcgtgccgtccaattgcgcgccgacacggaacgcgccatgggcgactatctgaagcaccattccacggagggcgacaccgtcatggcgagcgtggaggactatccgtatttccttgacgagctcaagaacctcaacatgctcgtcacccgcgccgcgaccgacgaggagtatgcgaacagcgtcgaaaagctgtatatgagcttccaacagctcaaccgcgcgttcaacaccgacgaggagaacgtcagggagcagctcgaccgcatcaacggcatgctcaaaggccaacagttcggcccccgcggcggcaggctctcgctccacgtggacttccacccgatcgaccggcagttcaaatcctcgttgggccgcatcatgtcgaagctcgacgattggacacgcaacgcgcgcagcaatcccatggagacgcgcaaggcgttcgcaggctgcgaaacgttcatcggcaggctccaggcggaactcggccagatccgcgacacgaacggcatcaaggaatacggtgcgcgcaacctcgatccgcgcgtgcgcagctcgttctacgcgatcgtgcaccataacgatctgcccgacgagcgcatcagctccaccggcggcaagtccggcggcgcgttgcaggaactcacctcgttcgtctacggcgcggccctgatctacctgctcggcggcgacctgaccggcaagcccacctacaccacgctgttcctggacgaagccctcatcaaagccgacggacgctacacgaaacgcgcgctgaccgtgctgccgcgcctcggcttccagatcatcgtatccgcgccggaaagcaaaaccgccgaaatcctcagcatcgcagacaaggcgtacgtggcatacaaggatcccgcaaccggcaactcgtacctgcaggagctcgaccgcgagccggcaacgcaagccgaaacacaagacgccaccgtcgagcagacgcaacccgcgacggaggcataa

SEQ ID NO: 44879 - DNA, 627 bp, Bifidobacterium kashiwanohense JCM 15439 = DSM 21854
atggcagcggccagaaacaccacaggcgaaacggacatccgccggaaactcgacgaatacgtcgacgcccacctcaccaggcacatgtacgacaccgacgaatcctggccgctgcgcaaaaccatccgactgcccaaacaagccgaactagagcagcactacaaccaaatccgcgcccaaaacgaaaccatccgcgactgggcgcggcaacaccactgcgaaaccagcgaaaaaaccaaaatcgtctccagcggactcatccaacaaaaaagcccgctcatcgactccgtgaccatacccgacctcgacaccgccctccgcatcgccaccaaacaaacccgcgaacgctacctacgcgaacacgaccgcatgagcgcgctcgccaaagaattcggcctcgaaccggagaacgccatgaacgtcgccaaaaccctcaaagaccatgacgacaccgacttccacctcgtcatccaagccgctcactacttcgcaaaccacgactgccacaccatgaccccacgcatggcgcccatcccaggattcagcgccaaatggctcggcgcacccaactctcaacgccgcaaagcgatatgccagctcaccggacaagacaacctcaccttctag

SEQ ID NO: 44880 - DNA, 1524 bp, Bifidobacterium merycicum
ttgggcgacattcgatctgagatggagcgtcttcgtccggtgtatgaaaccggtgtgctgcgactgctgatgcgcaacaattcgcaactgtacgtggcgctgctccgttcctcattcgaaccgttgaccggcgaactgccgagggaagtactcgaagagcatttcacccgcgcactgtccaaactcgtggaaaccggcgaatacacgctcaaagacgatcagaccccggccgaagcggcccgtcgcatcctcgtagaattgtcgcgtgaaggcgacggcgactatgcttggctggcgaactcgctcgacgtggcatcccaccgttacctgtaccgtctcaccgcccgcgcccatcgcgcgatcgaagccttggcccgtctcgaagacaccacgcaaaccctgtccggcgcacaggccaacagcatcatcatggaaatcgagcatgcgcgcatgcagctcaccgccgacccgcatgaacgcatcaaactgctcaaccgcgagatcgaggagcgccagaaggaaatcgaacggctcgaacacagcgaaaccgtcgaacaactgtcgtcccagcaggtcgaagacattatcaacgtggtgcacaacaccctgcgtggcgtccccatcgacctgcgcgagctcgtgctcgccgaacgcgacaacggcgacgcgctgcgccgtcgcatgcaagccggcgccatgtccgtcgaacagatcctcaccgcctaccacgaggaataccgccgatccttcaccgagtcggacagtggccggcgtttcgaagacgcgttccagatcatcgtcaccgaggaaggccgtcaggaaatcgacgaagccgtgcgcgacatcgcccgaaacccgtatctttccggcgaaccggggctgctgctcaaccaggtccgtgccgaactcgaacgcatctacgaaggcatcgaggacgtgcgccgtcagatgcgtgcctccgacgaagccgtgagccgactggtccgccagcagaccgacacgcgctaccgcaccatgctcgccaaactcaaccgcctgttcgccaaaaccagcgccgaagcgaaagcggttccgggcaactcctcccggccgtaccgtaccgacacgggcacggcgcaattcgcggtattgcccaccaggcctgcgaaaccgatgatccatgcggccccgccgagccttgacgagcgggagaacatcccttccgtggaatcgccggatctgaaagccatgatcgaggtcggcggcccgcgtctgcggcacatgatggcattgatccgccaatcgccgtgcacgctcgacgacgggcgcgtggatctcgcggccagcttcaaccgtctgcccgaacgcgagcgccgcgaaagcgaactcgtcggattcctcagcgccttgcatgtgcagaacggctcgcaatacgtgcaatggaattgcgtgaccttggatggcaggccgcgcgtgtggcgtaccaagccgattgtggcgagcgccgaagcccttgacgagatcgtgggggaggagcgtgtatga

SEQ ID NO: 44881 - DNA, 882 bp, Bifidobacterium merycicum
atgacggccgaagcgcgtatggtcgcgatcgcgctcaaacgtgaccggtatatcagcgatgacatgtattggctggtgcatgacgacagcgccatccgtgacgccgtcatgcgctcgctgaacaacgatctgcttgaactcaaggagaaccgcaagtaccgcatcatgtatgcggctcctgtcaacggcacggagacgggcatccgttccctgaagacgcgtgcgagcctgacgcgcgaggaggcggcgatgctcgccttcctgcgcatccgcgtgctcgaatacgagaacacgcgcaccggtgcggaaggttggatcatcagccatgacgagattcgcgcggcgctcaccacgggcgcggggtatttggcgtccagcaatgatgaggagacggccgcgaagaagatccgtgccacgatttcgcgcatgatgacctacgggtatctcgagcagggcgatgcggacgacatgtatctcatcacgccgttggtgccggtggtgctggacggtgacgtggccgatcagtggctgggcgtgtcggcggatgaggtcgatgattcggatggggatggggccgccgtgacaggggagccgtctgattccgtggaaggcgtggatgccggtgatttcggtgatgccggcgatgccaacggttcaggcgattctgacggttccggcgatgccagtgagcaggatgccttggatttcggtgaacaggacatgctggacttcgacgaacccgaaccgctcgtgaagatcgcggaacccgccgccgaaccgaatgaaccgaatgaaccgaataagccgaccgagtcgaccgagccgggcgaaccgaccgaagagactgcgacgatcatcgacgagaacgaggaggatcagtga

SEQ ID NO: 44882 - DNA, 3483 bp, Bifidobacterium merycicum
atgactgacaacgatatgcacatcatcgccgaccggtggatgctggaaagccgccaggtcatcaactggggctcctacgagggctaccgcgagttcaagccgtccatgagcgacaaactgcccgtcaccctgctcgcgggcgccagcgaatccggcaaatccacgctggtcgacgcgcagatctccctgctctacccgaccggcacgccctacaataaagcctccaattcaggccgatccgaacgcaacgattacacgtatctgcgcggcatggtcggctccagcgacggcgaaaacggcgaaacgccgatctacctgcgcgggcgcgacgccaatgatgcgccgcaagccgtgtggggcgccatcgtcgacacctacctgaaccgcaccaccggagccgtgctctcctgcggcaaattcctctacctcgcatccggcgacgggcgtggcgaagtgcgcaggcagtacatcgcctgggatcgaaaaatcgacccacgtgcaatggaccggttccgcgacacgcccttcaccgccaccatgctgaagaaagcgtacccggagtgcgattccttcctcaacgcggaagccttccacgcgtacatctggcgcgaaatgggcctgagccccgaagcgtgccgtctcctgcacaagatccaatccgccgacgcgccgtccaaactcgacgacatcttcaagcagggcgtgctcggcgtgcccgaagcgctggaactcgcgcgcaccaccatcgacgactatctgcgctacgacgagaacttccgcagcatggaggagaaagccaagcgcatcgccaaactgcaggacatccagaacctgtatggcgaatacgccgaagcattgcaggcccggcgcgaattcgacgcggtgaaccccgacgacgaacagggcggcgccgcactcgaagcatgggcaaggtcccgcatggccggcgaagtgcgtgccggcctgcccgcggcgcaacgcgaacgcgaggaacaggaacgcgcctacaccgcggcatgccacgacagtgaaaccatccaagccgaactcgacgaagtcaaagcgaagatcagcggactcgacgacggcacgctgcaacgtctcgaaagcgaactcgaccgtgcccgccgcgacgcggaagagacccgcaagcagcgcacaagcgtgcaaaaccgcttccggcaggccggcgacaccatgccgaccgacgaggaacagtggtacgccaagcgcgaagccatcaacaacgccatcgaatcctacgacatcgataaggcgcagcgcgaaaaccagcgcgacgaaatctacgacgaggtgcgcgactgccgcaaggaacgcgaaagcctgcaagccgacctgaaccgtcagcgcaaccagaaaacccgcattacccaagccatggacgaggcgcgcaacatgctcgccgaagccgtgggcctcgaccccaagcacctgccgtacgtggccgaactcatggatgtgcgcgaggattccgaaacctggcgcgtggcgatgaacgtcacctacgcgccgatcgcgcaaaccattctggtcgacaagcgctacgagcaaggcttcgccaagaaagtcagcgccatcgacccgcgtctcatgatccgccgcacctggcagttcgtggacaccggcacctcctacgacacggcgagcgaaaaaggctggatgtccagcaaactgcggttcaaagcgggctccccgttcaccggatggcttaaggaacaggtcgcgtccgaacgtttcgacgcgaaatgcgtcaccacgatcgacgacgacaaccgcgacgaacgccaagtgcagacggacggccagctgaagtccggtgcgcacggcttccacggcatcaagaacacgcacatgatcatcggcttcgtcaacgaacggtacctgaccgagttgcagcgcaagctcgaacaggccatcgaaaagctggccgaggcgacgattcgccacgagcgggcgaaacgccaagtggacctgctgcgcgatcagaaggaattggcgaacctcgtctccgacatggaatggtccaaggtcgacgtggtcggcgccgaacgtgccgtcgaggatctcaaagcgcgcatcgaggaaatccgcagcaaccccgaactcgccgaactgaccgccaagcgtgaaggcctgtacgcccagctcggccaggccaacagggccaaagccatggcggagctcgcacgcgacggcgcggcgaaaaccgtgcgcgaggaacgtgaatggctcgactcgtacggcagcggcgaattcgacgattcgctcatccccgaacacctgtccaaccagctcgccgacgtctacgaggccgcgtacggcgtgtcctccagcgaaaaccgcgcggcgctcatcgtgtccggcgcgttcggcggcggcaacgaaacatatgcggaccgtattctgcgcagcgtcggcaacgcgatccgcaaacgcatcgtctcgctcgacgatcaggcgggcgtgatgcgcgccaacgtcgagacgcgcatggcggattatctggaaacctacgcgcccgacgacaatacggtcatcgcaagcgtggaggaataccggttcttcgtcgaagagcttcggagcctcgacatgctcagcacgcgcaaagccacggacgaggagtacgtgaacagcctcgacaagctgcgcatgagcttcatgcagatcgcccgcgccgtcgacaccgacgcgaaacgcatcgacgaacagctcgaccgcatcaatgcgatgctcgaaggccagcagttcggcccgcgccacggcagcctgtcaatcgacgtggacgtgcgcaggccggaccacgagttcgtggggctgatgaagaacaccatcggcgacctgaccgactggaagcagagcgatcagaacgatcctgcggccacgcgcaaaatgttcgccaagtgccgtccgctcatcgaacggctgcagcaggagctcggccaggtgcgcgacacgaacggcatcaagagctacggggcgaagaacctcgacccgcgctgccgctgctcgttctacgcgatcgtcaagcatgaggacgggccggacgagcgcatcacctcgaccggtgggcgttccggcggcgcattgcaggagctgacctcgttcatctacggtgcggcgttgatctacctgctgggcggcgacgtgaccggacagccgacctacaccacgctgttcctcgacgaggcgctcatcaaggccgacggccggtacacgcagcgtgcgctgagcgtgctgccgaagctcggcttccaggtgatcgtgtccgcgccggaaagcaaaaccgccgagatcctcgaagtggcgaccaaggcgtacgtggcgtacaaggacgcgtcggacgggcactcctatctgcaggagatcacctccgacgagatcgaccgtctcgaatccgaaatcgccgccgatatggatgccgcgtccggttcggatgacgcgggcgatacgagtggtgagtga

SEQ ID NO: 44883 - DNA, 1209 bp, Bifidobacterium merycicum
atgaagtggaacatcggtgacttgtcgggaaccgacgcgcaggtgaagacgaacatcggcaaacagctcagggcgttcgtcgaacagtatctcgacaagcagcgttttgcgctctttcaggtctggccctacacggtacgcgccccgcaaccctccaaaagcgaattcgaaaacgattcgaacacatacatcaccatcacgaaagtcttacggcaatgggcgcaatcgcacgattgccagtatacggaggttttccggctgcaaggggcgaactgcggcaaaacaaccctcgtgaaggacattgccgtgccggatgagcgcacggcattgcgtattgccggcagggaatgcgcgagccgctaccgaatcacgcggcggcggttgcgctgcctgcgggaggagttcaacgcttccgatgaggcggtcgtcaaagtcattcggaaactcgatgatgcaacagatctcgatttcgatctggtgcgtcaggcggcgcactatttcgcggaacatgatgcatcgggcatgagcccacgcgcagtgccgatacccggattctccaccaaatggctgggtggcaaaagctccgagcggcgcaaggcgatctgcctgttgctggggcgtgacgcacttgacttcaaggagcggccgggggagattcgattgcgttacctcgatcccgcccaccgcggatacccggatctgtatgtcaccgagccgtggtccaacgccgattgcgcaggattcgactatgcggtgattgtggagaacaaggacacgtatcaggaaatgccggagattgagaacggtctatgcatattcggcaatggtagggcggcgaaccgtatcgcggcgctgctgccgtggatcgcagacataccgcatgtcgtctactggggtgacatggatgcggacggattggagattctttcggaagtgcgggaatcgggaatcgactgcgaatccctgttcatggatgttgaatcctgtacgcggtacgaacggttcggcaccgcgtatacgccgaagggtgaacgactgaaactgcgcaatcccgcggaggttccgggtttgcgcgaggatgagcgggcgttgtatgaatcgttatgttccggggagggagtgaattatctgcgcatcgaacaggaacgcattcccatcgtggacgccgtcgagcggctacgggcattcggctttcccgtcgccggatga

SEQ ID NO: 44884 - DNA, 1626 bp, Bifidobacterium longum subsp. suis
gtggccgatgtgatgcgggagctggaacggctgcgaccggtgtatgagacgggcgtcctgcggttgctgttgcgccagaacgcgatgctgtacgtgtcgctgctgcgttccacgttcgacccgctcaccggcgagctgccgcgcgagaccgtggaggagcggttcgcgcaaagtctgaacgctctggccgacgccggcgaatatgcgccgcgcgaggaccagaccttcgccgaggccgcccatcagatcctcgccgacctgacccgtgaaggcgaaggcgactacgcctggctcgccaactcgcatgatgcggccacacaccgattcctctaccgtttgacggcccgcgcccaccgcgccatcgaggcactgagcaggctcgaagacgaatcacgcgccctgtccggcgcgcaggccaacagcatcatcatggaaatcgagcacgcgcgcatgcagctgaccgccgaccccggcgagcgcatcaaactcctcaaccgtgaaatcaaggaacgcaagcacgagatcaaacgcatccaacagggcaagcagcacgccacgctgagcgaagcccaagtggaggacgtgatcgccgtgatccacaacacgctgcgcggcgtacccatcgacctgcgcgaactcgtgctcgacgagcgggacaacggcgacgccttgcgccggcgcatgcagaccggcgacatcagcgtggacgagaacctgacccgctaccacgacgaataccgccgctcgttcagcgaatcggacagcggccgccgcttcgaggacgccttccaggtgatcatcaccgacgagggccgccagcaaatcgacgaagccctgcgcgccatcgccaaaaccccgtatctggccggcgaatccggcgtgctgctcggccagatccgcgacgaactggcccgcatctacgacggcatcgaagccgtgcgccgccagatgcgcgtctccgacgaggcgatcagccggctcgtgcgccagcaaaccgacactcgctaccgtacgatgctcacccgcttgaaccgactgtacgcgcgcctcaacgcggatgcgaaaacccatatgggagacgcctcgcgcccgtacgacacggccaccgcggacgcgctgttcgcgccattgccgatgcgcccggccaaatccatgacccgcgccaccgcacccggcctgagcgacctcgccgccgaagccccgcaggcgactccggtggccgatctgcgggatatggtcaacagcggcggcccccgactcctgcgcatggtcagcctcatccggcgcaacccggtgaccgctgacaggtccgatgacaggtccaacgcaaccctcgtggacatcgccgccagcttcaaccggctgcccgaaagcgaacgccgcgaaagcgagatcgtcggcttcctgggcgggctgggagccgcaagcggcagcgccatcgccgacgagccgtccactgacggcgtcggcatcgacagagacatcgccaccgagccggccccggcgcagcgcggcgataccgcgacctggcattgcgtatcgatcgacggcgagccccggaactggatcactagaccggtgctggccgacatggacgagctgaacatcattgtggaggaaggatga

SEQ ID NO: 44885 - DNA, 663 bp, Bifidobacterium longum subsp. suis
atgaccgtggccgaggaacacgaggaacatatggacaacgccaacccgtacgccctgttcgaaggcgacaccggcgacatgccggccgaggcacgcatggccgccatcgccctcaaacgcgaccgctatatcagcgggcccacctacgacaccgtgctcgacaaccgcgacgtcgtcgtacgctccctgaacaacgacctgctcgacttggtgatcaacgaacgctaccgcatcatgtacgccacgcccgtggccggcgacgacgtgaccctgcgctcgctcaaaacccgcgtcagcctcaaacgcgaggaggccgcgctgctcgccttcctgcgcatccgcgtcctcgaatacgagaacgtgcacgccgaccccgccgactggctcgtcagctttgaggagatccgcgccgcgctcgccaccggcgccggctatctggccgcccgcaacgacgaggaaggcgtggcaaagcagatcggcgccatcgtctccgcgatgatcacctacgggtatttggtgcgcctggacgacgaagccatgtaccagatcacgccgctcgtgcccgtggtgctcgaccgcgaactggccgacacctggctcgacgtcgcggaacacggcgacggcgacacggaagatgacgatgacgagaaggaagccgaatga

SEQ ID NO: 44886 - DNA, 3546 bp, Bifidobacterium longum subsp. suis
atgcaggcgacagacgtgcagatgatcgcggaccgatggatgctggaatcccgccgactcatcaactggggctcctatgagggctaccacgaattccgcccctccacggaccacaagctgccggtgaccctgctcgccggcgccagcgaatccggcaaatccacgctggtcgacgcgcagatctccctgctgtacccaaccggcacgccgttcaacaaggcctcgaactccggccgctccgaacgcagcgactacacctacctgcgcggcatggtcggcgtgggcagcaccgaaaccggcgacgagccgctctacctgcgcggccgcgacgagaacggcgcaccgcaacccgtgtggggcgccatcgtggacacctatcgcaaccagaccaccggccaggtgctctcctgcgccaaattcctctacctgatgcccggcgacggccgcggcgacgtgcgccgccagtacgtggtctggggcaagcccgtggaccccaggcgcatggaccaataccgtgacgccccgttcacgccagcccagctcaaagccacctaccccgactgcctcacattccccagcgccgaagcgttccacacacacatctggagcgcaatgggcctgagcgaggccgcctgccgactgctgcacaagatccagtccgccgacgcgccctcccggctcgacgacatcttcaaacaaggcgtgctcggcgtgcccgaagccctggacctggcccgtaccacggtcgaggactacgaacgttacgacgggaacttccacgccatggacgagaagacccgccgcatggacacgctgcgcggcatccaacaggcctacggcgaatacgccgccgcacgcggcaaggcccgcgccttcgaaccggtcaagccggccgtcgacggcacggtgccggccgtgctgcgcgactgggcattggcccgcatgcgcggcgaagtcgccgtccaactgcccgccgaccgcgccgaacaacagaacagcgaggcgaaagccaagctgctgcgccgccgaaccgaagacctgcgcacccgcctcgacatgatccgaggccagatgcagggtctggacggcggcaacctgacccgactcgaactcgaactcgaccaggcccgccgcaccctcgaagacgtgcaagccaaccgaacacgaatcgaacaaacgttcgcatccatcggcgagacgctgcccggcaacgaacaggcctggaacgagcgccgcatcaacgccgtgaacttcaaacgcgaatacaacaaacgagacggcgaatgcgaggaagccctcaccgccgccatcaacgcgcgggccggcgcacgcggcgacctcgaacgactgcaacgcgacttcgaccggcaacgctcccagcgcacccgcatctcccagcagatggacgaaacccgcgccatgctctgccgcgccaccggactcacccccgccgaactgccgtacgtggccgaactcatggacgtgaacgaacacgaggaagactggcgtctcgccatgaacgtcgcctacgcgcccatcgcccagactatcctcgtcgacaagcgccacgaacagggcttcgccgccaaagtcagcaccatcgacccgcgcaccatgccccgacgcacctggcagttcgtggacaccgcacgccactacgacgacaccggcgcgcacgcgaacatactcaccggagaacaggacggcgactggctgtccggcaaactgcgctaccgcgacgactcgcccttcgccgactggctgcgctcgcagacccaggacgaacgattcgacgccctatgcgtcaccgccatcgacgacaccgaccgcaccaaccgtcaggtgcaggccgacggtcagatcaaatccggcgcacgcggccagcacggcaccaaagaccgcgcccaggtcatcggattcgtcaacgaaacctacctcaacgcgctcgcagcgcaggtcgacgccgcccgcaacgcgctcagccaagccgacaccgactacacggccgccaaaacacagtccgataacctccaccgcgaactcgaactggccaaccagctcgcctacacgtcctgggaacgcatcgacatcgccggcgcgcaacggaccatcacggacacgcaggacgccatcgcatccatcaaaaacgatcccaaactcgccgaactcgccaaacagcgcgacgaactgaacgccgaactcgaccgtgtggaacgccagcgcatcgaatccgaccaggccgcggcccgcgccggcagcgccgtcgaagcggcgctcatctggctgcgcgaccatgccgacaccggcacgacggacgccgccggtgccaccgccgacaatgacgatgacgccgcttccggcccgctgccggacgaagtcacggcggcgctcgccgaatcctacgacaaccgattcgccgggctggcggacgcggccatgcgcgcgcacatgatcatcggcgcgggcgcggcaggaacgcaggcgccgggggagagcttccccgaacgcaccatcgccggcatcggcaaggacatgacctcccgcatcaacctgctgaacggccaggccgacgccgcgcgcaccggcgtcgaatcgaaaatgagcacctacatcgcgctctacgcggccgacgacgactcgctgaccgccagcgtggaggactaccggtactatctcgacgaactcgctagcctcacccagctggccgcggttgccgccaccgacgccgaataccggcgctgcctcgaacagctgctcaggagcttcctgaccatcaaacgcgccatcgacacggatgccagcgacatccacgaccagcttgaccgcatcaacgccatgctcaagggccaacagttcggccccaagcacggcagcctgtccctgcacgcggacgtgcaccgtcccgagcgcaccttctgggcgcagctcatccgcgtcatcggtaccctgaacgattggaaatccgccgacgtcaacgattccgacgcctcgcgcaaggctttcgcggcctgcgcgccgatggtcgggctgctgcgcgccgaactcgcgcaggtcaaggacacgaacggcgtgaaaagctacggcgcccgcaacctcgacccgcgctgccgctcgtccttctacgccatcgtgcatcatgccgacggtccggacgaacgcatcacctccaccggcggccgttcgggcggcgccttgcaggagctcacctcgttcgtatacggcgcggcgctcatctacctgcttggcggcggcctgaccagcgagccctcgtacaccacgctgttcctcgacgaggcgctcatcaaggccgacggccgttacacgcagcgcgccctcacggtgctgccgcgcctcggattccaggtcatcgtctccgccccggaaagcaagaccggtgaaatcctcgaggtctccaccaaggcctacgtgacctacaaggaccccgacactggcctcacctccctgcgcgaggccgtgctgcatcagaatgacatggacgatgaatcatcgtcggatatattgaaggatgacggggttgccgaatga

SEQ ID NO: 44887 - DNA, 375 bp, Bifidobacterium longum subsp. suis
atggccggcatgaaagacatcgctgcgatcaccacatgcgtgaagaaacatatgcgttcacatatgtacgacatcgaaccggcatggccatttcccgtgccggtgggattgccggaccaagcatttttggaaaccaatgcgattgcagtgcatgacaacaacaatgagatacggcaatgggcaagcaagaatggttgcgaaatcataaccaagcatcgcaccataggcacctctgtcgagttgatcttcaaagtcgtcgttcctgacgaatcaatagccatgcgtgtggttggtcgtacgctggcggcggaatatcgcgaagcgcaccgtcgcacagattccactgacaggattcagcggcaaatggctgaatga

SEQ ID NO: 44888 - DNA, 1650 bp, Bifidobacterium pseudocatenulatum
  DSM 20438 = JCM 1200 = LMG 10505
atggggccgggttccctcttccatgacaggaaaagacgtcgcattcgtactgtaactgcggcgtcttttccttgttttcgtttagaatggagacttgccgccaaggcatcgaacacatggaaaggcgtattgttggctgagatcagacgggagatggaacggcttcgacccgtatacgaaaccggtgtcctacggttgctgctgcgtaacaattccatgctgtacgtcgcgttgttgcgttccacgttcgacccgctgacgggggagctgccgcgcgaaatcgtcgaagaacggttcgcgcgcagtctcaaccggctcatcgaaaccggcgattacacgctgaaagacgggcagactgcgcgcgaggccgcgcattcggtcctgcttgacctcgcccgcgaaggggaaggcgactacgcctggctcgccaattccatggacgtggcctcgcaccgctacctgtaccgtctcacagcgcgagcgcaccgtgccatcgaagcgctcgaccggcttgaggacaccacgaaagcgctgtccggcgcgcaggccaacagcatcatcatggaaatcgagcatgctcgcatgcagttgaccgccgatccgcgcgaacgcatccgcctgctgaagagggacattgaggaacggcagaaggaaatcgacgagctggaacatagcgaggccttggaaaagctcacgtccgaacaggtcggcgacatcatcggcgtgattcacaacactctgcgaggagtgcccatcgacctgcgcgagctcgccctttccgaacgggacaacggcgacgcgctccgacggcgcatgcaggccggcgccatgagcgtggaaagcatcctcaccgcataccatgacgaataccgacgtgcgttccgcgaatccgacagcggacgtcgtttcgaagacgcgttccaagtcatcgtcaccgacgaaggccggcgcgagatcgacgacgcggtgcgggacatcgccagaaacccctatttggatggcgagccgagcgtgctgctcaaccaggtgcgttccgaactcaaacgcatctatgaaggcatcgaggacgtgcgccggcagatccgcacgtccgacgaggcggtcagccgtctcgtacgccagcagaccgacacgagctaccggaccatgctcgccaaactcaaccagctgttcgcaaagaccagcgccgaagccaaagcccatcccaatgaccaaagccggccctaccatacggacgccgggcaggcgaaattcccgacattgccatctcgtccggccagatcaatggcgcgcgccgcatcatccagcctgaacgacgccccagcggcgaccatcgaagcgccggacctcaagaacatggtcgaaatatgcgggccgcggctgacgcgcatgatcaggcttatccgcagcaatccggtgacgacatcggacggcatgttcgtggacctcgcggcaagcttcaaccagctgccgaaagccgaacggagggaaagcgaactggtcggcttccttagcgccctgcgcacgcaggacgactcgtcatacgtgacatggcgctgcatatcgatcgacggcagcgaacgcgtatggcgcaccaaacccattctcatcaccgaaacgacgctcgacgacatcatcgaggagagataa

SEQ ID NO: 44889 - DNA, 783 bp, Bifidobacterium pseudocatenulatum; identical to SEQ ID NO: 42320
  DSM 20438 = JCM 1200 = LMG 10505

SEQ ID NO: 44890 - DNA, 3552 bp, Bifidobacterium pseudocatenulatum
  DSM 20438 = JCM 1200 = LMG 10505
atggcagacggcatgaagatcgtttccgacaagtggatgctacaaagccgacaaatcgtcaactggggctcatacggcggctggcacgaattccgcccatccatggacgaaaccatgccggtgaccctgctcgccggcgccagcgaatcaggcaaatccacactcgtcgacgcgcaaatctcactcctctacccatccggaaccccctacaacaaggcgtcgaactccggacgttcggaacgcaacgactacacctacctgcgtggcatgatcggcgtaagcgatagcgaaaacggcgaaacgccgatcttcctgcgcggcaaagacgccgacggcaccccacagaacatctggggcgcaatcgtcgacacctacgtgaacaaaaccgacggaggactgctctcctgcggcaaattcctctacctgaacgccggagacggacaagacggactacgccgccgctacatcacctggaaccgaaccatcgacccacgactcatggaccagtaccgcaacacaccattcacccggtccatgttcgaaaaaacctatccggaatgcaccacgcacaccaacgccgcggcattccacgcctccatctggcaggacatgggcctaagcgccgacgcctgccgcctcctgcacaaaatacaatcggcggacgccccctcaaaactcgacgacatcttcaagcaaggcgtgctcgacatacccgaatccatccgcctcgcccacgaaaccgtcgacgactacaaccggttcaacgaaaacttccacagcatggaagacaaaatggcccgcgtcgccatcctgcaaaacatccagacacgctacggcgaatacgcaaagcaaaccaccgaacgacgcgaatacgaacccatcaaccccgacagcgaacatggcaacgcaacactgtccgcatgggcgcgctcgcgcatggccagcgaagtgcgcgctggtctgccggccgcgcagcgcaaggtcaaggagtcgcaggaggccatcgatcgggcgatgcagcgcgtcggcgagctcaacacgcgaatcgacgccgtcaaggaacgtatccaaggcatcgacggcggcagtctgcagcagctcggcaaggatcttcaacgcgtgcgccaggacatcgacgaggcgagcaggcaacgtcatgccatagccgaacgattcgaacaggtcgaaggcaggcttcccgacagcgagcagacatgggacgccaaacgcgccatgctcgccgaaacgctcgacacatacgaggaacggttgaaggacgcgaacgccagattccagcagctggtaggggagcgtcacgaccgccagcgcgaccgtgacagcctacgacgggactatcagcgcaaactcacgcacaggacgcgcatcagcgatgacatggacgacgcgcgcacgcttatcatgcgggcgaccggattggacgcgtccgaactgccgtatgtggccgaactgatggacgtgaacgaacaggacgaacagtggcgtctggcaatgaacgtcacctacgcgcccatcgcgcagaccatcctcgtcgacaaacgccacgagcaaggattcgcggcgaaaatcagcgccatcgacccgaaactcatgacacgacgcacgtggcggttcatcgacaccggcatgcaatacgaatcctctgccagcgaaggctggatgtcgtcgaaactgcaataccgggaggactctccgttcgccggatggctgaaaaaccagacgacgtcgccacggttcgacgcgcgttgcgtgcacgccatcgacgacatgaaccatgacgaacgacaagtgcaggccgacggacaaatcaaatccggcgaccgtggattccacggcagcaaaggactacaccaggtcatcggcttcatgaacgaacaatacctggccgaactgaaaaaccaactcgacaaggcggagcaggcgttgcagaacgccgaccgtcgaagcgaacaaatgtccaacgccatcagcctgctgcaagacgagcacgagctcgcacgaatcgtagccgacatgccatggagcaaaatcgacgtgaacggactacgggaacaggaaacgcgaatccgcaggcagatcgaacgcatcgaaaacgacccggaactcggccaactgcaaaccgaactgaaacagctcaaccaacaggccaccgccgaaaacagaaaccagtaccaagccgaagacgacctcgacaaggcccaacacgccgtccaagccgaacaagcatggctcgacgcctacggcaacgacgacttcgacgatgccacactatccagcatggtatcgaacctactcgccgacgcatacgagaactgcttcggcgcatccgtacgcgcgcaagaccggccaaaactcatcgcaggcctcttcgaccatgaaagcgaaacaccattccacgcgcgcgcgctacgcaacatcgcacgcatcgcacgcacacgaatccaagaaatcgacgccagatccaaccaactgcgcgccgacacggaacgcatcatggacgactacctcaacaaccactccacagatgacaacaccgtcatggcaagcgtggaagactaccgatacttcctcgacgaactcgacgaactcaacatgctcgtcacccgcgccgcaaccgacgaagaatacgccaacagcgtcaaaaaactctacatgagcttccaacagctcaaccgcgcgctacgcaccgacgaagaaaacatcaaagaacaactcaaccgcatcaacagcatgctcaaaggacaacaattcggcccacaaggcggcagactatcactcgacgtgaccttcagcccaatcgaccgacaattcgaaacaaccctcagccgcatcctgtcaaaactggaagactggacgcgcaacgcaagcgacaatcccacggaaacacgcaaagcattcaacaactgcgaaacattcgtgaacagactgcacaacgaactcgacaaaatacacgacaccaacggcatcaaagcatacggcgcacgcaacctcgacccacgcgtacgcagctcattctacgcaatcgtgcaccacgacaacgcccccgacgaacgcatcagctccaccggcggaaaatccggcggagccctccaagaactcacctcattcgtctacggcgcggccctcatctacctcctcggcggcgacctcaccgcacgccccacctacaccacgctcttcctcgacgaagcactcatcaaagccgacggccgctacaccaaaacgcgcgctcgccgtactaccccgactcggcttccaaatcatcgtctccgccccggaaagcaaaaccgcggaaatcctcaacgtcgccaacagagcatacgtcgcatacaaagacccatccaccggcaactcatacctacaggaactcgacagcgaaaccatcacacaggacgaaacacagcccaccaccgcacccgcgaaaccaacaacggaggcataacccatggcaacggccagaagcaccaccaacagcgacatccacagccaactcaacggatacgtcaccgactatctcaccaagcacatgtatga

SEQ ID NO: 44891 - DNA, 1539 bp, Bifidobacterium reuteri DSM 23975
atgggcgacatcaggcgggagatggaacgtctgcggccgatctacgagaccggcgtgctccgactgctgctgcgccagcacgccatgctgtatgtggcgctgcttcgcgccgcgttcgacccattgaccggcgagctgccccgcgaaaccgtggaggagcgcttcgcgcaaagtctgcagctgttggagaagaccggcgactacgtactgcacgaccaatcctatggcgatgccgcgcaccgcatcctcaccgacctcacgcgtgaaggggagggtgactacgcgtggctcgccaattcccatgatgcggcttcccaccgcttcctctaccggctgacggcccgcgcccatcgtgccatcgaagccctgagccgtctggaagaccaatccagcgcattgtccggcgcgcaggccaacagcatcatcatggagatcgagcacgcacgcatgcaactgaccgccgatcccggcgagcgcgtcagactgctcaacaaggagatcaaggagcggcagcatgagatcagacggatccaacacggtcagcagcatgccacgctgaaccggtcgcaggtggaggacatcatcgccgtaatccataatacgttgcgcggtgtgccgatagacctgcgtgaactggtgctcaccgaacgggacaacggcgatgcgctgcgccgccgcatgcaggccggagccatgagcgtggacgacacgctgaaccgctaccatgaggactatcgccgttcattccgcgaatccgatgccggacgccggttcgaggacgccttccaggtgatcatcaccgatgaaggacgccggcagatcgactccgcattgcgcgatattgccaaaaccccgtatctggccggagactcggcgacgctgctcgggcagatacgtgacgagctcgcccgcatctacgtagggctggaagcggtccgcaaccagatgcgcgtttcggatgaagccatcagccgtctcgtacgccagcagaccgacacccgctaccgcacgatgatgaacaggctcaaccgtctgtatgtgagcctcaatgcctcggcgcaagcccatatgggcgatgcctcgcgaccatatgccaccgatacggcaaacgcgctgttcgccccgctgccgatgcgaccggcacggtccatgacccacaccgcgacgccaaagctgagcgggggaccatcggcacccgacaccgacatggtgagcctcaaggacatggtcaccagcggaggtccacggctcaggcacatgatcgaccttatccggcgcaatcccgtcatccaggacggtctggtggatgtggccgccagcttcaaccggcttccggaacgcgaacgacgcgaaagcgagctcgtcggattcctcggagggctgccctcggctgccaaggggaacgtcgatgacggaccggcaatggacgcaacctggcattgcatcgcactcgacggctcggatagggattggcacaccatccccttgtgggcgactttggaggaacttgacgctattgcggaggaggagcaggcatga

SEQ ID NO: 44892 - DNA, 840 bp, Bifidobacterium reuteri DSM 23975
atgaacgaaccagtggccaacccatacgccttgttcgaaggcgattgcggcgacatgtccgcagacgcgcgcatggcggccatcgccctgaaacgcgagcgctatatttccggccggctatatgatctggtggacgacaaccgtgatgcagtgctgcgctcgctgaacaacgacctgttggatctggtcgtcaacgaacgataccgcatcatgtatgcgacacctgtcgccggagacgacgtgtcgctgcgttcgctcaagacgcgctccagtctgaaacgcgaggaggcggcgctgctcgccttcctgcgcatccgcgtgctcgaatacgagaacacccgggtgggccgtgacgaatggctggtgagcttcgaggagatgcgcgcggcgctcgcctccggagcaggctacctggccgcgcgcaacgacgaggagggcgtgctcaaacagattggcgccgtcgtatcctcaatgatcacctacgggtatctgaatcgtctggacgacgaagccatgtatgtgatcacaccgctggtgccggtcgtgctcgaccgcgagctcgccgacacatggctggatgccgccgcccatgatcttgagggacgagacgaagagcgggacgctgcggacggcgaccggcctgcgtcggattccacgccatccgacgatgctcctgacgatggggaagccatgcccgatgagtccctgttcgccgaaccgctgttcggagccacgaataatgccacggatggctccggcgaagaccatgcccgcaatagcgtcgaacagacggatgccgacaccggcgcatccaccgactcggacaagcaaggggagtga

SEQ ID NO: 44893 - DNA, 3552 bp, Bifidobacterium reuteri DSM 23975
atgccatccactgaactgcatatgatcgccgaccgatggatgatgaccagccgtcgactcgtcaactgggggtcctacgagggataccacgaattccgtccttccacggattccgcactgcccgtgacgctgctcgccggcgccagcgaatccggcaaatccacattggtcgacgcacagatatcgctgctgtacccgaccggaaccccattcaacaaggcctcgaactccgggcgttccgaacgcagcgattacacatacctgcgcggcatgatcggcgtgaccagcaccgcccacggcgacgagccggtgtatctgcgcggacgcgactcggccaccggcgcacctcaggccgtctggggcgcgattgtggacacgtaccgcaaccagaccaccggccaagtgctgtcctgcgccaaattcctgtatctgatgcccggagacggccgcggagacatgcgccgccagtacgcggtatggggcaaacccatcgatcctaggctgatggaccaataccgagaatcccccttcacccccgcgcaattgcgggcggcgtatcccgaatgcctgaccttccccagcgcggaatccttccacagccatatctggtccgtcatggggttgagcgaggaggcctgccgcctgctgcacaaaatacagtccgcagacgccccatcacgtctggacgacatcttcaaacaaggcgtgctcggcgtacccgaggcgctggacctgtcacgagccaccgtgcacgactatgaacgctatgccacgaacttccatgccatgcaggagaaaaccgaacgcgtggaggctctgcacggcatccagcgcgcgtatgacgattacgccaaggctcgtggacgcgtacatatgttcgacaccatccgcccgataggcacaggcgcatccgcatcgctgcacgactgggcgacagcacgcatgggcgcggaagtcagcgcacagctgcccatcgaccgcgccgaagcgcaggcttacgagaccgaagcgcgcaacgcaaaacggaaagcggaaaacctgcaaagccgcatcgacatgatccgcggccagatgcaaggcctggacggcggaaccctctcccgactcgaaatggaactgaaccagacccgacgctcctgcgaggacgccgaatcgaaccacgcccgaatggaacaggtgttcgaatccgtcggcgaacagctgccctccaccgaacaggcatggaacgagcggcgcattaacgcagtgaacttcaaacggtcctacgacgaacgcgccacccgatgcgaggaacagctcaccgcagccatcaacgcccgcgcggacgcacgcaacgcgatggaacggctgcaacatgactacgaccgtcagaaatcccgtcgcacccgcatcacccaacagatggacgacagccgcgccatgctcgcacgcgccaccggtctgtcgccggacgaactgccctatgtggccgaactcatggatgtccgggagacagaggaatcctggcgactcgcgatgaacgtggcctatgcgcccatcgcgcaaaccatccttgtggataaacggcacgaacagggattcgccgccaaggtaagcgccatcgacccgcatgccatgacccgcagaacctggcagttcatcgacaccgaacgcgaatacgccgacgaagccacgcagaccgaaacaacatcgcgaacatcatcgcaggaatggctctccgacaaactgcgctatcgcgaggactcaccgttcaccggatggctgcgctcgcaaacccggtccgaacgtctcgacgccctgtgcgtggacgccatcgacgatgccgatcgcgatacacgtcagatacaggaggacggccagatcaaatccggctcacgcgggcagcacggcgtcaaagaccgtacgccgatcatcggtttcgtcaacgaggcgtatctcgccgaactcgaagtgcagatcgagcagtcctgtcaagccttccaacaggccagccgccagtacgacgacgccaaacgcgagtcggaaacgctgcaccgcaggctcgagctcgccaaccaacttgcgtacacctcatgggagcgcatcgatgcggcgggccagcgcaaggccgtcgccgatatcgaggcgtccatcgcctcgatcaaggaagaccccaagctcgccgagctcgcccaccgcaaagacgaactcaccgaggaactcgaaagtgtggaacacgaacgcatgaacgccaggcagttggcgaccgcatgcgcgcaggccgtcgaggccgcgctcatctggatgcagcgtcacaccaccgacacggatgatggcgggaaaggcgacgccctcccatcggcggccgacctgccggagacggcggcggcagcgttatccgaagcatatgagaaccggttcgccggcatcgatgaccccgcccttcgcgcacacatgatcatcggagccggaacgccggcgaccggcgggaaaggaacccaatcgcctgcaccgtccttcgccgaacgaatcatcgccggactgtccaacgacatcggcacacgcatcgaggcgctcgaggcgcaggccgacgccgcccgcaccaccgtggaatccaagatgagcaactacatcgccatctgggcggctggggacgatgcgcttacggccagtgtggatgattaccggtactatatggatgagctcgccagcctctcccagctggcggcgaccacggccaccgacgccgaatacgagcggtgcctcgaccagctgctgatgagcttcctgaccatcaaacgcgccatcgacaccgatgccgacgacatccacgaccaactggatcgcatcaacgccatgctcaaggggcagcagttcggccccaaacacggcagcctgtccctccatgccgatgtgcgcagccccgagagcacgttctcccgagagctgcaacgcatcatcgccaagctcaatgcatggaagaccggcggcaagaccgcggacgaccaggcgcggcgagacggcgcccacaacgccttcgccgcatgcgcctcgatgatcacactgctgaaagaggagcttgcggacgtcaaggacgccaacggcatcaagcaatacggcgcccacaatctcgatccgcgctgccgctcctcgttctacgccatcgtgcatcatcaggacggcatggacgaacgcatcacctccacgggcgggcgatccggcggcgcgctgcaggagctcacgtcattcgtctatggcgccgcgctgatctatctgcttggcggcggtatggagaacaggctcaaaccctgttacaccacattgttcctggatgaagccctgatcaaggccgacgggcggtatacgcaacgcgccctcaccgtgctgccgcgcctcggattccaagtcatcgtatccgcgccggaaagcaagaccggcgaaatcctcgaagtatccaccaaagcgtacgtcacctacaaggatcccgacaccgggctcacgtgcttgcgggaagccaccgtggacgactacgacgactccttcgccgaggagcagccgcgcatcggggagtga

SEQ ID NO: 44894 - DNA, 1554 bp, Bifidobacterium saguini DSM 23967
atgggcgatatcagacgggaaatggaacgtctgcggccgatttacgaaaccggcgtgcttcgtcttcttttgcgtcagcatgccatgctgtatgtcgcattactgcgtgccgccttcgacccgttgaccggcgagctgccgcgcgaaaccgtagaggaacgcttcgctcatagcctggaactgctggcctccagcggcgaatacacgttgaaagaccagtcctacagcgaagcagcccatcgtatcctcgccgatttgacccgcgaaggcgaaggcgattacgcatggctcgccaactcgcacgatgccgcatcacaccgattcctctacaggctcaccgcccgcgcacatcgcgccatcgaagccctgagccgtctggaggatgaatcccgcgcattgtccggcgcacaggcgaacagcatcatcatggaaatcgagcatgcacgcatgcaattgaccgccgaccccggcgaacgagtccgactgctcaacagtgagatcaaagaacgcaagcatgagatcaaacgcatccaacaggggcagcagcatgccacactgagccaggctcaggtagaggatgtgatcgccgttatccataacacgctgcgtggcgtgccgattgatttgcgcgagctcgtactcaccgaacgcgacaacggcgatgcgttgcgccgccgcatgcaggccggcgacatgagcgtggacgaaaccctgaaccggtatcacgaggaataccgccgctcattcagcgaatccgattccggacgccgattcgaagacgccttccaagtgatcatcaccgacgaaggccgccagcagatcgactccgcgctgcgtgacatcgccaaaaccccgtatctggcaggggagtccgcggcattgctgggacagattcgagatgaactttctaggatttatgacggcatagaagcggtacgtcatcagatgcgcgtctccgacgaggccatcagccgactggtgcgtcaacagaccgacacgcgttaccgtacgatgatgagccgattgaaccgactctatgtgaacctcaacgccgacgcgaaagcccatgccggcgatactgcacgaccatatgcaaccaacacggcgagcgccctgttcgccccattgccaatgcgtccggcacgttcgatgacctataccgaaaccccaggcttggaatccttggatgctgccgatgctcaggtcccgcaggtcaatctcaaagacatggtcgaaggcggaggcccgcgcctcaagcacatggtggaactgattcgccgcaatcctgccatcgaacatggcacagtcaatgttgccgacagcttcaatcgtctgccggagagggaacgccgtgaaagcgaaatcgtcggattcctcgggaatctgccagcggcgagtgcatcaaacggaattccaagtaacgagtcaacggcaagcgctgctgccggcgtggtctggcattgcatcgctttggatgggacaccaagagactggatcaccagcccggtttgggcaacattggaagaacttgacagtatcgtggaggaaggatga

SEQ ID NO: 44895 - DNA, 828 bp, Bifidobacterium saguini DSM 23967
atgagcatgagcgaaccagtcgccaacccatacgccctgtttgaagacgaccacggcgatatgaccgcggacgcgcgcatgtccgccatcgccttgaaacgcgaacgttatatttccggccagctctatgatttggtcaatgacaatcgcgaggcagtggaacgctccctcaacaacgatctgctcgcgttggtggtcaacgaacgctaccgcatcatgtatgccactccagtggccaatgacaacgtggcgttgcgcgcgctcaaaacccgagccagcttgaaacgtgaggaagcggccttgctcgcgttcctccgtattcgcgtgctcgaatacgagaacacgcgaaccgaccagtccgaatggctagtgagcttcgaggagattcgcgccgcgctcgcctcgggtgcaggatatctcgcctcgcgcaacgatgaggaaggcgtactgaaacaggtcagcgccatcgtctccgcgatgatcacctacgggtatctgaaccgattggatgatgaagccatgtatcttatcaccccgctggtgcctgtagtgcttgatcgtgaactggctgatacctggttggatactgcagcgagaaatctgggtgatacggctgatttgaacgaatcgaatgtcatagatgccggaccggcagaatcctcagatgccgattcgaatgaatcaactgacgatatcccagacgaaagcctctttaccgaaccattgttcgatgctgcagacggtaacgctcaaacgacgatcggcgatatcgaaaatgagcatgacgccgcgaacgataccgacagcattatgaaggaaggggagtga

SEQ ID NO: 44896 - DNA, 3525 bp, Bifidobacterium saguini DSM 23967
atggcagccgcagaactgcagatgatcgccgaccgttggatgatggtcagccgcagactcatcaactggggttcctacgagggctaccatgagttccgtccatccacggactccaccctccctgtgaccctgctcgccggtgccagcgaatccggtaaatccacattggtggatgcgcagatctccctgctgtatccgaccggcaccccgttcaacaaggcatccaactccgggcgctccgagcgcagcgactacacgtatttgagaggcatgatcggcgttggcagcaccgagcacggtgacgaacccatctacctacgcggaaaggacaagacgaccggcgcgccacaagcggtatggggcgccatcgtggacacctaccggaaccagacttccggtcaaatcctgtcctgcgccaaattcctctacctgcagcccggcgacggccgcgccgacgtccgccgtcaatacgcggtctggggcaagcccatcgatcccaggctcatggaccagtatcgcgaatccccgttcacgcccggccagttgcgcgacacctaccccgactgcctgactttccccagtgcggaagctttccacaatcacatctggtcgatcatgggcctgagcgaggaggcctgccgactgctgcacaagatccagtccgcagacgctccatccaggctcgacgacatcttcaaacaaggtgtacttggtgtgccggaggcattggaactcgcacgcaccacggtcgaggattacgaacgctacgatgcgaacttccatgcgatggaggagaagaccaagcgcatggacgcgttgcatggcatccaggatgcctatggcgagtatgccaaagccaatcagcgcgtacatatgttcgatatcgttgcgggcggcgatggtgagaccgttccggcgtcactgcgcgactgggtcatgacgcgcatgcgcgcggaagtcggcgcacagctgcctattgaccgcagcgaggcacaggcctacgaatccgaagcacgcaatgcgcgacgcaatgtggaaagcttgcgtagccgtatcgatatgatccgcagccaaatgcaaggattggacggcggcaacctcacccgtctcgaaatggagctgagccaagccaagcgcgcattggaagaaaccgaatccacccgcaaacacatcgaacaaacgttcgcatccattgatgagcagttgcctgacagtgaacaatcatggaccgcacgccgcatcaacgccgtcgaattcaaacgaacctacgatgagcgcgtcagcgaatgcgaggagcagctcgccaagacaatgaacgcgcgcgcagccgcccgagacacactcgaaaagctgcagcgcgactacgatcgacagaaatcccaacgcacacgcatcacccagcacatggacgaaacccgagcgatgctggcccgcgccaccggactcacgccggcggatctgccctatgtcgcagaactcatggatgtcaaggagggtgacgaacgttggcgcatcgccatgaacgtggcctacggatctttcgcgcaaaccattctggttgataagcgccacgaacaaggcttcgccgcaaaagtcagcaccatcgacccgcacgcgatgagccgacgcacctggcaattcgtggataccacgagcgattacgggaacgtcgataaaaccgacgtcgccgcgtctgacgaagatgaatggctctctgacaaactgcgttaccgcgaagactcgccattcgccggatggctgcgctcgcaaacccagtccgagcgctatgacgcattgtgcgtaaaggccatcgatgataccaatcgcaacacacgccaagtgcagacagacggtcagattaaatccggtgcccgcggtcagcacggcatcaaagatcgcgcacaagtcatcggtttcgtcaacaaggcttatctgaagagtctcgaacagcagatcaacgagtctcaggaagcattgaaacaggcggacgccgattacacaacagccaagaaaaactcagataaactgcaccgcgaactcgaactcgccaaccagcttgcctatacatcctgggagcgcatcgacatcgatggcgctcgcaagactatcacggatatcgaagactccatcgcttctatcaagaacgatcctaagcttgccgagctagccgctcgcaaggatgagctgaccgctgaactcgagcaattggatgaacgccgcatgcaagccgaacaggttgcaacctcggcctcacaagctgtggaagcagcactgctgtggctgaatcatcatgcagacacagcggaagagcagaacggcgcagaacattcgactgcacaagccatgccaagcgatgtgactgccgtactggctgaggcctatgagaatcgtttcgcaggtctcgaagatgctgcaatgcgcgcacacatgattatcggcgcgggggctgcttcgtccaacttcgctgaacgtgtgctcaccggcatggccaaggacatcggcgcacgtatcaccatgctccagactcaagcaaccgcggctcgtaccgcggtggaatcgaagatgagcgcctatattggcgtctgggcgtcggacgacgatgcactcaccgccagcgtggaggactaccgttattaccttgatgagctcgagagcctcacgcagctggctgccaccacggccacagaagctgaataccagcgttgcctcgaacagttgctgatgagtttcctgaccatcaagcgcgctattgatacggatgccaccgatattcacgaccagctcgatcgcatcaacgccatgctggaaggtcagcaattcggtcccaagcacggcagcctgtccctgcaggcggatgtgcgccggccggaacgtgtgttctccagtcagcttacgagagccatcggcacgctgaacgattggaagaatgcgaacggtgaagcggacgacgaaacaaaacgcgctgagtctcgtcgagcctttgccgcgtgcgcgccgatgatcacgttgctgaaggacgagctcgcgcaggtcaaggacgccaacggcatcaaacaatatggtgcccgtaatcttgatccgcgctgccgctcctcgttctacgccatcgtgcatcatgcggacggcccggatgagcgcatcacctcgaccggcggccgatcaggcggcgcattgcaggaactcacctcgttcgtctatggagctgcactgatttacctgctgggcggtggcatggagaaccggttgaagccaagctacaccacactgttccttgacgaggcgctgatcaaggcggacggtcggtacacgcagcgtgcgttgagcgtgctgccgcgcctcggcttccaggtcatcgtctccgctccggaaagcaagaccggtgaaatcctcgaggtgtccaccaaggcctacgtgacctacaaggatcccgacaccggcctcacctccctccgcgaagccagcctggatggccttgacgaagaggatacggaagcgactgaaatgtcgcaatccgtatccgaatag

SEQ ID NO: 44897 - DNA, 1509 bp, Bifidobacterium stellenboschense
atgggcgatgcgcgacgggagatggaacggctgcggccggtctacgagaccggcgtgctcagactgctgctgcgacgcaactcgcgcctgtacgtggcgttgctcaaggcggcgttcgacccgctgaccggcgaactgccgcgcgagacgctggaggaacggttcgcgcagggactcgccgcgctcgccgacatcggcgaatacgcgctggaccccgacctcacgttcggccaggccgcgcatcgcatgctcgtcgacctgacccgcgagggcgaaggcgactacgcctggctcgccaactcgcacgacgccgcatcccaccggttcctctaccggctgaccgcgcgcgcccaccgcgccatcgaggcgctggggcggctggaggacgaatcccgcaccctgtccggcgcgcaggccaacagcatcatcatggagatcgagcacgctcgcatgcggctgaccgccgaccccggcgaacgcgtgcgcctgctcaaccgcgagatcaaggagcgcaagcacgagatcagacgcatccagcaggggatgcggcatgagacgctcgacgactcgcaggtggaggacatcatcgccgtcatccacaacacgttgcgcggcgtgcccgtcgacctgcgtgagctcgtgctcgccgaacgggacaacggcgacgcgctccgccggcgcatgcaggccggcgacatggacgtcgacgagatcctgaacgcctacaacgccgaataccgcgcgaacttcggcgaatccgacatggggcgccgcttcgaggacgccttccaggtgatcatcaccgacgagggacgccagcagatcgacgaggcgatgcgcgacatcgcgaggacgccctacctcgcgggggagtccgccgcgctgctcgggcaggtgcgcgacgagctcgcccacatctacgacggcatcgaggcggtacgcgcccagatgcgtgtctccaacgaggagatcggcaggctcgtacgccagcagaccgacacccggtaccggtcgatgctcgcgcggctcaaccggctgtacgccgccgtcaacgccgacgcgaaagcccatccgggcgccgacggcaggccctacgccaccgacgtcggcggggtcaggctcgccccgctgcccacgcggccggcacgttcgatggtccgcgcggcatcgcccggactggatgccgccggggactccgacctgccgcgcgtcgacctgaagacgctgatcgacaacggtggtccgcgtctgcgccgcatgatcgcgctcatccggagggaaccggtgacggccgacggcggaatcgacattgccgccagtttcaaccggctaccggaatccgatcggcgtgaaagcgaactcgtcggcttcctcggcgcgatcggcgggcgggaggacggtgacgccgtctggcattgcgtgacaatcgacggcaggcctcgggactggcgcacgcgtgcgctgatcgccggcgcggacgaactggacgccatcatggaggaaggatga

SEQ ID NO: 44898 - DNA, 624 bp, Bifidobacterium stellenboschense
atgatcatggacgagaagaccaaccccgacgccctgttcgaaggggatcgcggcgacatgggcgcggacgcccgcagggccgccatcgcgctcaaacgcgaacggtacatcgaaggcgagctgtacgacctcgtcgacgacaaccgcgacgcggtcatccgctcgcttaacaacgacatgctcgagctcgtcgacgacgaacgccaccgcatcatgtacgcgacgcccgtcactggccccgacgtcccattgcgttcgctcaagacgcgcaccagcctcaggcgcgaggaggccgccctgctcgcgttcctgcgcatccgcgtgctcgaatacgagaacatgcaggtgccggaggggcagtggatcgtcggcttcgacgagatgcgcgccgcgctcgccaccggcgccggatacctcgcctcacgcaacgacgaggagggcgtgctcaagcaggtgggcacgctcgtcaacacgatggtcacctacggctatctggcggtcaccgacgatgacgccatgtatcggatcacgccgctcgtccccgtcgtgctcgaccggggactggcggacgcatggctcggcgtcgccggcgagagtgacgccggcgaggaagagaaggaatga

SEQ ID NO: 44899 - DNA, 3516 bp, Bifidobacterium stellenboschense
atgaccatcagggaactgcagatgatcgccgaccggtggatgatggaaagccgccgcctcgtcaactggggctcgtaccagggctaccacgaattcaggccgtccaccgacccgaagctccccgtgaccttgctcgccggagccagcgaatccggcaaatccacgctcgtggacgcgcagatctcactgctgtacccgaccggcacgccgttcaacaaggcgtcgaactcgggacgctccgaacgcagcgactacacgtatctgcgaggcatgatcggcgtcggcagcaccgcgggcggcgacgagcccgtctacctgcgcggccgcgacgatgacggggcgccgcaggccgtatggggcgccatcgtcgacacatacgtgaacgccaccagcggacagacgctgtcatgcgccaaattcctctacctgatggccggcgacgggcgtggcgacgtgcggcggcagtacgcgacatggggcaagccgatcgacccgcgtctcatggacatctaccgcgaccatccgttcacccccacgcagctgaaggacgcataccccggatgcgagaccttcaccagcgccgacgcattccacgaacacatctgggacatgatggggctgagcgaggaggcctgccggctgctgcacaagatccagtccgccgacgcgccgtcgcggctcgacgacatcttcaaacagggcgtgctcggcgtgcccgaagccctgaaactggcgcgcgacaccgtcgacgactacgggcgctacgaggcgaacttcaccgaaatggaacgcaaggcgaaacgcgtgacggcgctcgccggcatccgggacgcgtgcgacgcctacgacgccgcacgccggggcgtccggaccttcgacccggtcgacccagccggggaagtcggctcgacggcgatacgacgctgggcgacggcgcgcatgtccggcgaggtcgccgcacggctgcccatcgacgaacacgagcaccgcgagcatcagacggccgccgaggccgcataccgcgacggcgagaagatccgcgcgggcatcgacgccatccgcgaccgcatcagaggactggacggcggcaacctcgcacggatggagatggaactcgaacaggcccgacgcgcgctcaccgatgtgaagacgaaccgcgagcgcatcgaagccgggttcgggtcggtcggcgagacgatgcccggggacgagcacgcctggacggaacgacgcatcgccgccgtggacttcacccgcctgtacgaccggcgggcgcaggaactggacgagacgcgcgaccgcgcggtcgcagcccgcgccgcggcgaacgacgaactgcgccgtctcgaacgcgactatgagcgccagaagacgcagcgcacccgcatcacccagcagatggacgagacccgtgccatgctctgccgggccaccgggctgcgcgccgacgaactgccgtacgtcgccgaactcatggatgtgcgtgagagcgaggagcggtggagactcgccatgaacgtcgcctacggtgccatcgcgcagaccatcctcgtcgacaagcgccacgaacgggggttcgccgccaaggtcagcgccatcgacccgcatgcgatggcacggcgcacctggcagttcgtcgacacctcggagcgcttcggggcggatgacgggaagaccacggccgcggacggcggcccgtggatgtcctccaagctgcggtaccgcgatgattcaccgttcgccgactggctgcgcgcgcagaccgcatccgaacggttcgacgccgtatgcgtcgacgccatcgacgacgccgatcgtgaacgccgtcaggtgcaggccgacggtcagatcaaaagcggcaaacgcggccagcacggcgtcaaggaccgtcgcgaggtcatcggctacgtcaccgaagcctatctggatgctctggagcatggcatcgccgaggctcgcgaacgttcggagaaggcggaacacgactacacggaggcgaaacgccgtgcggaggacctgcgcagcgggctcgaactcgccaaacagctcgcctacgcctcatgggagagcgtcgatacggattcggccgcggccaaggtggacggtctcgagacgtcgattgccgcgatcaggaacaaccccgaactcgccgacctcgtccgtcgcgaggaatcgatgaaggaggagctcgaccgcaacgagcagcgccggttcgccgagaaacgcgacgccgacgccgcggcatccgcctgcgaagccgcccggcggtggctggacgccaaccgggacgatgccgggcggggagacgccatgccgttggacaagagcgtggaatcggcgctcgaacattcctacgaagacgggttctcgggaatcgcggacgccgcgctgcgcgcccacatgatcatcggagcgggtgccgacgcggcggccgcgggaacgtcgttccccgaacgcgtcgtcgcgaggatgcgcgacgacatggccgcccgcatcgacgcgctcgccgcacaggcctcggcggcgaagacggtcgtcgaagcccggatggaatcgtacaagggcatgtacgccgcggacgacgacgcgctgtcggccaccgtggaggaccgccggtactatctcgacgagttggagggattgtcgcggttgaccgccggcgaggcgaccggtgctgaataccggcgttgcctggaacagctgctgatgagcctgctgaccatcaaacgcgccgtcgacaccgacgaggccggcatccgcgaccagctcgaccgcatcaacgccatgctcgacgggcagcggttcggtcccaggcacggcagcctgtcgctgcatgcggacgtgcgcaagccggaccgtggcttcttctcgcagctgacccggaccatcggggcgctcaacgactggaagtcgtcgggagacgacgatccgacggccatgcgcaaggtgttcgccgcatgcggcggcatcatcggcctgctgcgcgcccaactcgcgcaggtgaaggacgcgaacggcgtgaagagctacggcgcgcgcgacctcgacccgcgatgccgttcgtccttctatgcgattgtgcaccacgaggacgggctcgacgagcgcatcacctccaccggcgggcggtccggcggcgccctgcaggagctcacctcgttcgtctacggggccgcgctcatctatctgctcggcggcggcatggagaaccggctcaggcccagctacacgacgctgttcctcgacgaggcgctcatcaaggcggacggccgctacacgcagcgcgccctcaccgtgctgccgcgtctcggcttccaggtgatcgtctccgcaccggaaagcaagaccggcgagatcctcgaggtctccaccaaggcctacgtcacatacaagaaccccgacaccggcctcacctccctgcgcgaggcgtcgctcgaaggcctcggaatgagggatgcggattatgcccccaacggggaagagtctccgacacatgaaggagagccgcaagcatga

SEQ ID NO: 44900 - DNA, 1251 bp, Bifidobacterium stellenboschense
atgagccgtatgaagagcgtggaggacctcgtcgccgagacacgtcgcgcgatgcggacccgcatgtaccgactcgatacggtgtggccgttgacggtgaaggtggggttgcccggcaaaagcgagctggaatccaatatcgtcgaggtgcatgacaacaacaacgcgattaaacaatgggcggatgaccatggatgcggcttggaatatgtgacgcgacggatgggaacgccggtgcggctcgtgtccaaggtgctgatcgaggatgaagccaccgcgttgcgggtcatcggccggcgggacgccgccgaataccgcaggatgcgggaacgggccggccggttgtgtgaccgtctgggtgtggaaccggcgttggcgatgaaggcggtccgtaagacccatgcccaatcggatgtcgatttcgagctgctgatacggtcctccgagttcttcctgcgttatgacgccaccggtaggaggccaagggcggtgccgctcgccggattcagcgcgaaatggctggaccagtcgcataaggtacgtcggcggaccatcgaactgttatgcggtttggatgatctcgggcttgatgaacgtcctcgcgaatgtcgtttcaggtacttggatccggcgttgcatcggtctccggatatggtcgccgtccggccttggaacgaggggccgtcatgcggcatccgatacgtcgtcatctgcgagaacaaggacacctatcagaccatgccgtccattgacgggggactatgcgtattcggacaaggatttgcggcatcggattcgttgccgctgctgccgtggctgttcgacgatgcggggcatggcatccacgtggcgtactggggagatttggacgcttccggctttgaaatcctatccaaggtcagacagatcggcatctcctgcgaatcgttatgcatggacagggagacgtacgaggctcataaggaattcggagccaagctctcggaagacggcaaaacgcttcgtacgcggattccgcaggatcttcccggattgaccgatgaggaacgaaacctgtatgaggccctatgcacgggagagggcgtcgattgccttcgtatcgaacaggagcgcatcacgatggattatgccatgtctcgcttggcgaacatggggtttcccgtgagatgcgaagggatcgatgacgcatggccggctaggacggcgccgaagaccgaagaaggggcgcgggatacgcgcatgggcatatga

SEQ ID NO: 44901 - DNA, 1461 bp, Pseudomonas sp. 1-7
gtgaaagcagacaaagccatcgcgacctaccgacgcatgcgggcgcagccgctgtggcgtctgcttgcctcgactaccgggcctaccgtcattggcctgcttcaatctcatctgtatgagggcgagcgaagcctccctgcctccatttttcacgaacgcatcgcaagggatctggaagagctgcgcgcccaaggcgaagactttccccaaacggcacaggcgtatgtcgccagctggctcgccgatgggttcctcgagcgacgcttcccggctggcgcttccgaagaggaatatgaactcaccacggcggccgtcgaagccatccggtttgtctctggcctggcacagccgcattccgccgccaccgaaagccgcctgacgctcgtcattgaggcattggcccggcttgccgaggacaccgacaccgacaagttccgccgcatcgaccggctcatggccgagcaagcccgcatcgacaaggagattgacgccatccagaaggggcagatgcgcgtgctgccccatacgacggcgctcgagcgcacgcgggagatcatcacgctggctgacgatctggccggtgatttccgccgcgttcgagatcagttcgaccagcttaatcgcgatcttcgtgaacgcatcatggacaacgatggcaatcgtggggatgtgctggattcgctgttcgccggaatcgacctgatttcagagagtgacgccggaagaactttctccgctttctggcgattgcttacggacccagagcaagcggccacgcttgatcaggcgcttgatagcgttatgtcgcgggagttcgtggggcagctcgaagccaaggagcgacgattccttctgcggctgacgcgcacccttcttgagcagggcggcatggttcacgaggtgctccagaccttcgcgcgcagtctgaagcacttcgtccagagtcgtgaatacctcgagcaacgccgactcaatcacctgctgaaagacgcccagcgcgcagcactggccctgaagaacgaggtcagggccacagaaaccctccagtacacgcttgagctaacgagcagtcgtttgcgctcattgtctcaatgggtgctgcacgacccatccctacaagcattgcccgggcagatggcagaaggggatgcgccgccaatcgaccttgagtctgtgagcgaactggtcgcacagtccgagatcgacttccgaacactgaaggccaacgtgctggctgtcctggagcaacgctcccaggcatccattgccgacgtgctggagcagttccccgctgcacaggggctgggcagcgtcgtcggcctgctggcgttgggcagtcggcatgggttcaaagccgaccacagtgaaaccgtaggctgggttggaggcgacgagcagcgtcgtagcgcccgaattccaaagatcttctttttgagggagcgggccaatgaactggtctga

SEQ ID NO: 44902 - DNA, 708 bp, Pseudomonas sp. 1-7
atgaactggtctgagaacgacgaatcggcaataccagccgaaacacaagcgccagatgctgctcaagcacctaccaacaccctcttcatgggtgacagcggcgagttgccactggatacccggcgcgcattagtacaactgttggcagggccatcgctcgacggtcgtcggcatccaaaactctggccgatcttggcgcgagacgaagcggtgatccgtcggcgtcttgccgaactgtttctcgaactggtcatcgatcgggatgtgcaagtggccttcacgcgtcaggcagataccggcgaccttgaagtgcccctgctgctgcgtcgcgcccaactgacgttcattgactccattctgttgctccaccttcgccagcgattgacccaggcggactcgcagggggatcgtgccgtggtgtcgacagacgagatcacggagtttctctccctctatgagcgcgccgccaacaccgaccgtgcagggttcgtgaaacgggttcatgcctccatcgagaagatcaagaagcacagcattcttcagaaaattcgctcgagtgaggatcgcttcgagatttcgccgacgctgaagctcctcttctcggcagaggaaatacaagcgctgacgcacctgtatcagcgaatggctgccgcagaaacgccagcgcagctggttcagactgaagctgatgaggaggctgaccaatga

SEQ ID NO: 44903 - DNA, 3375 bp, Pseudomonas sp. 1-7
atgatctcggaaccccaaaccgcctccttgtttgcccgcgagcagttccggatgacccgcctgcaggtttacaactggggtactttctccggcctgcacgacgtaccaatcagcgagcgaggctttctgtttgtgggtcgatccggcgcagggaagtcgacgctgctcgatgcattttcggcgttgctgacgccacctcgctggatcgatttcaacgctgctgcgcgtgaggcagaccgcagtggccgagaccggaacctcgtcacctacatacgtggtgcgtgggctgaacagaaggatggggagtcgggagagatcgcaacgcgctacctgcgcgcggggacgacctggtcagccttggcgctgacctaccagaatgccttgggccaatctgtggcgttggttcaggtgttctggctgcggggcaatgcgaacggcagcaccgacgtcaaacgccactaccttgtcatggagcgggcctttgacctgcgcgagctcgaggacttcggccaatccaacttcgacatccgtaagctcaagcagtccttcccggaggcattcgcccgcgacgaatttcgtccctattgcgaacggttctgccgtctgctcggcatcgagagcgaaatggcgctacgtttgctgcacaaaacccagtcggccaaaaacctcggcgacctcaataccttcctgcgcgacttcatgctcgacaagcccgagaccttcgaggtagcggatcgcttggtcagtgaatttggcgagctcaatgcggcccaccagtcagtcgtcacggctcgcgagcaggttcaaacgctcgccccagcgcgggaccagcacctgcgcagggactcgctgatgctgcagcgcaatggcttggatgagcttcggttgggcgtggacggctaccgggagacccgccgcattgatctcctcaaggagcacgtggcatccctggaggtgcaagccaacggctcagaaggtgaagtggggcgacgtcaaagcacgctggataaccacgccgcaatcttgcgcgatctggagcgacagcaccgtgaggcaggcggtgatcagatcgagcaatgggaaaccgagaaatcggggctggagggccagcgtacggatcgtctgcgcaaacgcgcccaggccgaagatgcgtgcaagaagctgggctggagtctcccggattcgcctcaagcctttgcggaactgttgggcagcgcgcggcaggaggtcgaaaactgggagcagcgcagcaacgatagccgcgccgagcagttccgcctggacagagaaaagaaggatgccgagaccgcgttttcgcaagcattgaaagaggtgcaggcactccagcgccagccatcgaacattccggcggacatgctggaaatgcgtcgaaacatcgccgccgccatcgggatctcggagtcggcacttccctttgttggcgaactcgtcgaggtgaagtctgacgaggtcgaatggcagggggccattgagcgcgtactgcacgggtttgcgctctcactcctggtagacgagcgccagtattcggcattggccaatcacatcaacaccacccaccttgggcagcgcttggtgtattaccggactggccgcccggagacgcggcaggccaagcccatcgggaccaattcgctcgtcctcaagctgaacgtcaaggaggggagctacgctgattggctccaggccgagctgcggcaacgcttcgattacgcgtgcgtcgattccattcagtcgttcaggagcgcagatcgcgccattacccgcgagggtcaggtcaagcacagcaaaactcggcacgagaaagacgaccgcagaagtgtcggcgaccggcgaaactgggtgctcggatttgataaccgggagaagctagggctctttcaagctcaggcgcaggagcaggctgacgcggttgcgcgcctcgccggggagatcgacaaactctccgagcaagacaagaatcgtgcggcccgagcgatacagtgccagactctggtgaatctccagtggcaagaaatagatctgctcccattgctggatcgcatctccaccattgagcggcaaatccgcgaagcgcgcgaggggaacaccaccctgctgcaaatcagtgagcagatcgagaagcaaaagaaactcgtcgatgatgctgacaaagatcttcggcaggcaacgcgtgcgcacgactcgattgttgaccagatcaagaccagcacccagaaactggaatccctcctgcaggacgcgtctatcgttccattgacgtcccatcaggtttcgggtctcgacgagcgcttcgccaagcagtcagatgcagtccggctcgacaacatcgacaaggtgacaacttctgtagaacgcgcactcaatgcggagatcgaagaggtcaaccgtgggattggtgcctgcgagaaggaaatagaagcacgctttgccgacttcaaacggcaatggccgatggacgcgggcgacatggacacgagccttgccagcgcgccagacttcttcgccaaactggttcggctggagacagatgggctgcccgcctatgagcagcgattctttgaattgctgcagaaccaaagtcaccagaatctggcggcgctttccacctacctgaacgatgcgcgtaaggcgatcctggagcggatggatctggtcaacgacagtcttggccaggtgcccttcaaccagagcgccaatcaacgcacctatctccacatcgacgccagtgaccggcagcttgtcgacgtcaaggaattcaagcgggagatccagcaggcactgagccacgcatggacggaggatcgcgagtttgccgaggcgcggttcctggccttgcggcgacttgttgatcgacttgccagtcaggaccccgagcagaaacgctggcgtgagactgtgctcgatgttcgacagcatgttgaattcatcgggcgggagatcgacgaaagcggtgtcgaggtcgagatctaccgcagcggagcaggcaagtccggcggccaacggcagaagctagccaccacgtgcttggccgcagccctgcgatatcaactgggcgggaacgaccacggcgtgccgatgtatgcccccgtcgtgctggatgaagccttcgacaaggcggataacgagttcaccgcgttggcgatgaacatctttaccaatttcggattccagatggtggtcgctacgccgctaaagtcggtcatgacccttgagccattcatcggtggcgcctgctttgtggatatcagcgatcggcgcgtctcaggcgtcctgctcatcgagtacgacggtgatcgtcagcggttgaagctgccagagcacgcacgagaggaggctagcgttgaagcttcctga

SEQ ID NO: 44904 - DNA, 1164 bp, Pseudomonas sp. 1-7
ttgaagcttcctgaagatgttcggcagtttcttgcccgtcgctttcaaagcaagcaccgcgagtggttggtcggtgatccgggcgagggccaatggccattggaagttcccctcggcataccgacggagcaggctgcgctgaggcaagtcgacggcgttcgcgcttgggtgagcgcatggcaaggctggcaaggagtcggcaccctgtcctggtgtgagcgtcggtggaaagcgcttggtgtccagcgactgccagagaaactggcgttacgaggccctgaagatgttgccatgtggatcggtgcatccgcacggtgggttcgttccctgtctcggtatcagacgctcactgctcgctggccggtgcttgcacagcagttgccgagatactttgatgtcctcgctgactacagcgatgccgatttccgtcgactggcagagatgctggattggatcagtcgcaatccgaaatcgaatctctacccacgacaaattccggttgccggtgccgacagcaaatggctggattctagaaagggcatcatctctgacttgattgcaacgctccagggtgacccaacaggagagcgcgacttcttctggcgctgcggcttgagggcacagccgcagttaatgcgcatgcgcgttctagacccggatctaagggcccattttggcggtcttggcgatatctctgcgccttgtgatgaggtcgcgagaattggtatacgaccaaagagtgtcttcgttgttgagaaccttcaaactggcctggcctttgatgatctgccaggggcggttgtgatcatgcgactgggttacgcggttgacgttttgggacagcttccatggctacaacaggcgcaatgtatctactggggtgacattgatacgcacggctttgccattcttaatcgagccagaacatacatcccaagcctgaagactgtgcttatggacgagtttacgctgatgagtcatcgcgatttatgggtcgaagagaaagaccagcactcttccacagagctcccactactcaccaataccgaacaaaagctctaccagtcgattaaaggaaatgtctgggaccaacaagtccgcctcgagcaggagcggatacgctgggatgtggcgtggaatgccatacaggcaagtattcgatga

SEQ ID NO: 44905 - DNA, 1461 bp, Stenotrophomonas maltophilia
gtgaaagcagacaaagccatcgcgacctaccggcgcatgcgggcgcagccgctgtggcgtctgcttgcctcgactaccgggcctaccgtcattggcctgcttcaatctcatctgtatgagagcgagcgaagcctgcctgcctccatttttcacgaacgcatcgcaagggatctcgaagagctgcgcgcccaaggcgaagactttccccaaacggcacaggcgtatgtcgccagctggctcgccgatggctacttggaacgacgcttcccggctggggcttcagaagaagaatatgaactatccacagcggctgtcgaagccattcgatttgtctctggactggcgcagccgcattcagctgcgaccgaaagccgcctgaccctcgttatcgaggccttggcccgactggccgaggacaccgacaccgacaagttccgccgcatcgaccggctaatggccgagcaagcccgcatcgacaaagagatagacgccatccagaaggggcagatgcgcgtgctgccccatacaacggcgcttgaacgaacgcgggagatcatcacgctggccgacgatctggccggtgatttccgtcgcgtccgcgatcagttcgaccaattgaatcgcgatctccgtgaacgcatcatggacaacgatggcaatcgtggggatgtgctggattcgctgttcgccggaatcgacctgatttcagagagcgacgcaggcaggactttctccgctttctggcgtttgcttacggaccccgaacaggcggccacgctcgatcaggcgctcgatagtgtcatgtcgcgggagttcgtggggcagctcgaagccaaggagcgacgattccttctgcggctaacgcgcacccttcttgagcagggcggcatggttcacgaggtgctccagaccttcgcgcgcagcctgaagcactttgtccagagtcgtgaatacctcgagcaacgtcgactcaatcacctgctgaaagacgctcagcgcgcagcactgagcctgaaagatgaagtcagggccactgaaacgctccagtacacattggagctcacgagcagtcggttgcgatccttgtctcaatgggttctgcacgacccatccctgcaagcattgcctgggcagatggcagaaggggatgcgccgccaatcgaccttgagtctgtgagcgaactggtcgcacagtccgagatcgacttccgaacactgaaggccaatgtgctggctgtcctggagcaacgctcccatgcatccattgccgacgtgctggagcagttccccgctgcacaggggctgggcagcgtcgtcggcctgctggcgctgggcagtcggcatgggttcaaggccgaccatagtgaaaccgtaggctgggttggaggcgacgacgagcgtcgtagcgcccgaattccaaagatcttctttttgaaggagcgggccgatgaactggtctga

SEQ ID NO: 44906 - DNA, 708 bp, Stenotrophomonas maltophilia
atgaactggtctgagaacgacgaatcggcaatgccagccgaagcacaagaacccgatgctgctcaggcacctgccaacaccctgttcctgggcgacagcggcgagttggcactggacacccggcgcgccttggtgcagctgctggcagggccgtcgctcgatggacgtcggcatccaaaactctggccgatcttggtgcgagacgaagcggtgatccgtcggcgtcttgccgaactgtttctcgaactggttatcgaccgggatgtacaagtggctttcacgcgccaggcagataccggtgacctcgaagtgcccctcctgctgcgtcgcgcccagctgacgttcattgattccattctgctgctccacctacggcagcgattgacccaagccgattcgcagggtgaccgcgccgtggtttcgacagacgagatcacggagtttctctccctctatgagcgcgccgccaacaccgaccgtgcagggttcgtgaaacgggttcacgcctccatcgagaagatcaagaagcacagcatcctgcagaaaattcgctcaagcgaggatcgcttcgagatttcgccgacgctgaagctcctattctcagccgaggaaatacaagcgctgacgcacctgtatcagcgtatggccgccggagagacgccagcgcaactgactcagaccgacgctgacgaggaggccgaccaatga

SEQ ID NO: 44907 - DNA, 3375 bp, Stenotrophomonas maltophilia
atgatctcggaaccccaaaccgtctccttgtttgcccgcgagcagttccgcatgacccgcctgcaggtatacaactggggtactttctccggcctgcacgacgtgccgatcagcgagcgaggctttttgtttgtgggtcgatccggcgcagggaagtcgacactgctcgatgcattttcggcgttgctgacgccacctcgctggatcgatttcaacgctgctgcgcgcgaggcagaccgcagtggccgagaccggaacctcgtcacctacatacgtggtgcgtgggcagaacagaaggatggggagtcgggtgagatcgcgacgcgctacctgcgctcggggacaacgtggtcagccttggcactgagctaccagaacgccttgggccagtctgtggtgttggttcaggtgttctggctgcgcggtaatgcaaacggtagcgccgacgtcaaacgccactaccttgtgatggagcgggcctttgacctgcgcgagctggaggactttggtcagtcaaacttcgacatccgaaagctcaagcagtccttcccggaggcattcgcccgcgacgaatttcgtccctattgcgaacggttctgccgtctgctcggcatcgagagcgaaatggcgctgcgtttgctgcacaaaacccagtcggctaaaaacctcggcgacctcaatacctttctgcgcgacttcatgctcgacaagcccgagaccttcgaggtagcggatcgcttggttagtgaatttggcgaactcaatgctgcccaccaggcggtagtcacggcccgcgaacaggttcaaacgctcgcgccagcacgggagcagcatcagcgtagggactcgttgatgctgcaacgtaatggactggaggagcttcggctgggcgttgatggctaccgggaaacccgacgcattgagcttctcaaggagcacgtggcagccctggaggtgcaagccaacggctcagaaggtgaagtggggcgacgtcaaagcactctggataaccacgccgcaaccttgcgcgatctggagcgacagcaccgtgaggcaggcggtgatcagatcgagcaatgggaggctgagaaatcggggctggagggccagcgcacagatcgcctgcgcaaacgtggtcaggctgaagaggcttgcaagaagctgggctggagcctccctgattcgcctcaagccttcgcggaactgttgggcaacgcgcggcaggaggttgaaaactgggagcagcgaagcaacgcgaaccgcgaagaacagttccgcctggcaggagaaaaaagggacgctgaggcagcattttcgcaagcagtgaaagaggtgcaggcactccagcgccagccatcgaacattccagccgacatgctggaaatgcgccgaaatatcgccaccgccatcgggatcgcggagtcggcacttccctttgttggcgaactcgtcgaagtgaaacctgacgaggccgaatggcagggggccattgagcgcgtcctgcacggctttgcgctctcactccttgtggacgagcgccagtattccgcgctggccaatcacatcaacaccacccaccttgggcagcgcttggtgtattaccggactggccgtccggagacgtggcaggccaagccaatcggggctaactcgctcgtactcaagctgaacgtcaaagagggagcctacgctgattggctccaggcagaactgcggcaacgcttcgattacgcgtgcgtcgattccattcagtcgttcaggagcgcagatcgcgccatcacccgcgagggccaggtcaagcacagcaaaactcggcacgagaaagacgaccgcagaagtgtcggcgaccgacgaaactgggtgctcggattcgataaccgggagaagctcgggctgtttcaagctcaggcgcaggagcaggctgacgcgattgcgcgcctcggcggggagatcgacaaactctccgaccaagacaagaaccgtgcaacccgagcgatgcagtgccaaacgctggtgaatctccagtggcaggaaatagatctgctcccattgctggatcgcatctccaccattgagcggcaaatccgcgaagcgcgggaaggcaacaccaccctactgcagctcagtgagcagatcgagaagcaaaagaagctcgtcgaggatgctgataaggagcttcgccaggcaacgcgcgcgcacgactcgattcttgaccaaatcaagaccagtacgcagaaactggaatcgctcctacaggacgcgtctctcgttcctttgacgccccaccaggtttcgggactcgacgagcgcttcgccaagcagtcagatgcagtccggctcgacaacctcgacaaggtgacaacctctgtagaacgcgcactcaatgcggagatcgaagaggtcaaccgtgggattggtgcctgcgagaaggaaatagaagcgcgcttcgccgatttcaaacgtcagtggcccatggacgcgggcgacatggacacgagcctcgccagcgcgccagacttcttcgccaaattggttcgactggaaacggatggcttgcctgcctatgagcagcggttcttcgagctgcttcaaaaccaaagccaccagaatctggcggcactttccacttacctgaacgatgcgcgcaaagccatccttgagcggatggatctcgtcaacgacagtcttggccaggtgcctttcaatcagagcgccaatcaacgcacctatctccacatcgatgccagcgaccggcagcttgtcgacgtcaaggagttcaagcaggaaatccagcaggctctgagccatgcgtggacggaggaccgcgagtttgccgaggcacggttcctggccctacgccgacttgttgatcgactcgccagtcaggaccccgagcaaaaacgttggcgtgaaaccgtgctcgacgttcgacaacatgtggagttcatcggaagggaaatcgatgaaagcggcgtcgaggtcgagatctaccgcagcggagcaggcaagtctggcggtcaacgacagaagctggccaccacgtgcttggccgctgcattgcggtatcagctgggcgggaacgaccacggcgtgccgatgtacgcgcccgtcgtgcttgatgaagccttcgacaaggctgataacgagttcaccgctttggcgatgaacatctttaccaatttcggattccagatggtggtcgctacaccgttgaagtccgtcatgacccttgagccattcatcggtggcgcctgcttcgtcgatatcagcgatcggagagtatcaggcgttctgctgatcgagtacgacggtgaccgtcagcggttgaagctgccggagcacgctcgagaggaggctaacgttgaagctccctga

SEQ ID NO: 44908 - DNA, 723 bp, Stenotrophomonas maltophilia
atgctggattggattgcgagccatccgaactccaacctgtatccccgccagctgccggtatcaggactggacagcaaatggcttgatgggcgcaaagggctgctgacggatctggtggccgcaatacaggaggactcatccagcgacgtggatttttaccagcggtgtggcctgaaggctccaccactccttgtgcgcatgagggtgctggatcagtcgttgcgagctcatgtcggcggcgtgggtgacatcactgcgccggttgacgacctcgcgggtatcagttggcctgtctcgcatgtgttcattgtcgagaaccttcaaacgggactggcaatgtccgacatgccgggcgctgtcgtgttcatgcgccttggctataacgtcgacgtgttggcccggctaccttggcttgcccgcgcgaagtgcatctactggggtgacttggacacccatggatttgccattctgcatcgcgcccgttcatacattccagagttgcaatccgtgctcatggacgaagagactttgcttcgacacaaggcactgtgggtggacgaggcggcgcagcattcagcagcggaactgacgctcctgaccaaggatgagcagcaactttatcgggatctcaagcagcagcgctgggggcaaaacgttcgcttggaacaggagcggatcgactggactgccgcatggaacgtgttgcaacggtcatttgcctag

SEQ ID NO: 44909 - DNA, 1470 bp, Stenotrophomonas maltophilia
atgaagcatcgcgaacgcattgcccgttaccgccacctgcgcgaacagccccagtggaagctgcttgccgccgaccacgctccggaaatcatcggcctgctgcagggcctgctgatggacggcgagcgcacgttgccgtcctcggtactgaacgagcgactgcagcgcgcgctggaccagctggccggcgatgaactctcgcgcgagctgccgcgcaccgcgcaggcctacatcgcgcactggctggcccagggctggctggaacgccgtctgcccgaaggcgccgaccaggagcagtacgagctggcgaccgcggcactgcaggcgatccgcttcgccgacggcctcgagcaggcccgcgtggccgccaccgaaagccgcctggcgctggtcattgaacagctctcggcgctggctgcgcagaccgaagccgatcccgatgcgcgcctgtccgcgctgcacgacgagcgcgaccgcatcgatgccgaaatcgcccgggtcggcaccggccgcgtggttgcgctggacggcaagcgcgcgctggaacgcacccgccagatcatcggcctggccgacgagctgaccgaggacttccgccgcgtgcgcgatgacttcgagcagctcaaccgcgatttccgcgaacgcatcatcgacgacgagggcgagcgcggcgatgtgctgtcgcagctgttcgaaggtgtggatgtcattggcgaaagtgacgccgggcgcagtttccaggccttctggcgcctgctcaacgacgccgaacagagtgcccagctcgatgccgcgctggaagcggtgctggcgcgcggcttcgcccgccgcctggaccgcaacgaacgcaacttcctgcgcagcttcaccagcaccatgctcgagcgcggtggccaggtgcacgatgtgctgcagaacttcgcgcgcagcctgcgcggcttcgtgcagagccgtggctacctggaacagcgccgcctcaaccagttgttgaagcaggcgcagtccgaagcgctggccctgcgcgacgaattccccgcacagcgcggcatcggccgcgacctgcagctgaccaccagccgcctgcgctcgtggtcgcagtggaagctgcatgatccgcgcagcgcccaggtcgacggcaatgtcgagtacaacgacgcggccgcgatcagcctggagagcgtcggcgacctggtcgcttcgtccgaaatcgacttccgcaccctgcgccgcgacctgcacgacctgctcgatgcacagccgcggctcagcatcgcccaggccctgtcgcagcgcgaggcgccgcagggtcttggcagcgtcatcggctatctgtcgctgggcacgcgcttcggcaacgtggtcgccggcgagcaggagcttgcgcaatggcgtggtggcgacggccaggtccgtcgcgcccgcatcccgctggtttggttcacccaggagagacgccatgagctggcatga

SEQ ID NO: 44910 - DNA, 702 bp, Stenotrophomonas maltophilia
atgagctggcatgaagatcccatcgacgcagcgcaggccgacgtggcggaagacgcctacgaggccgaaccggtggcggccgtggcgcagccccgccgtggcaacgacgtctattacctcggcgacaccgggcgcctgccgctggatgcgcgccgcgcgctgtgccagctgctgatcggccccagcatcgaccagctgcgccacgccaagctgtggccggcactgatccgcagcgaagcggccatccgctcgtcgctggcggacctgttcctggaactggtgctcgaccgtgacagcggcgtggcgttcacccgccaggccgataccgaagacgtcgacgcgccggtgctgctgcgcacctcgccgctcaccttcatcgactcggtgctgctgctgtacctgcgccagcagctggccgaagccgatgcgcgcggcaaccgcgcggtggtcgccgatgccgaaatggccgaagcactggccatctacgaaaagaacctgtccaccgaccgcgccggcttcaaccgccgcgtcgcctcggcggtgcagaagatgaaggacaaccacatcctgacccgcctcagcggccaggaagaccgccacgaagtctcgccggcgctgaagctgctgttctccgccgaagacgtgtcccagctctcggcggtctaccgccagctgcgcgaaaccccggccgccgaggcctga

SEQ ID NO: 44911 - DNA, 3381 bp, Stenotrophomonas maltophilia
atggctatctccaagcacactcccgccctgttcaacgaaggcctgccggacccgcgcctgcagcagttccgcatgcgccgcctgcaggtgcacaactggggcaccttcaacggcctgaccgaagtgccgatcgccgagcgcggtttcctgttcgtcggacgttccggctcgggcaagtcgacactgctcgatgccatgtccgcgctgctgacgccgccggccatcgtcgacttcaacgctgctgcgcgtgaagccgagcgcagtggccgcgaccgcaacctggtgtcctacgtgcgtggcgcgtgggctgaccagcaggacagcggcaccggcgaaatcgccacccagtacctgcgcaagggcgccacctggaccgcactggtgctggaataccgcgccggcgatggccgcgtggtcagcctggtgcgcctgctgtggatctccggcaacggcacctcggccggtgacgtgcgcaagcactacatgattgccgagcgcccgttcgacatcgccaaggatcttggtgggttcgacctggacctgcgcaagctcaagcagaagctgtccgacctgcaccactttgacaccttctccggctacgccgagcgcttccgcgacctgctcggcatcgacaacgagatggcgctgcgcctgctgcacaagacgcagtcggcgaagaacctgggcgacctcaacgtcttcctgcgcgacttcatgctcgacacgccgaagaccttcgacgccgccgagcgcctagtcagcgacttcgccgagctcgatggcgcgcaccaggcggtggtcaccgcccgtcgccaggtggagactctgctgccggcacgcgcctactacaacgacctgaaggaaatgcaccgccggcgcggcgacgacgaagccctcaagctcggcgtcgacagcttccgtgaaagccgccgccaggcgctgatcgaagcgcgcctgcgcgagatggacgtgcgtgaccgtggcctgctcggcgaagaagcccagcgccgtgccgcactggacaatcacaccgagcgcctggccgaactggaactgcagcgtcgccagcagggcggtgagcgcattgaagaactggaacgcgagcagggccgcgccgaagccgagcgcgaccgccgccaggccaagcgcgagcaggcaagcctggccgcgcagcagctgggggccgaactgccggacgacgcacacggcttcgccgaactggtcgagcgcgcacagaacgagctgcaggaccgccagcgcgcctcttcggcgctggacgatgcgatcagcgatcgcctgggtggcaagcgcgatgacgagcgccgcttcggcgaagtccgtgcggaactcgaagcgatgcagcgcacgccctccaacatcccggcgccgatgcagaagctgcgcgcgcgcctggccgaggaaaccggcatcgctgaagcggcgctgccgttcgtcggtgaactgatccaggtccgctcggaagagcagggctggcagggtgccatcgagcgcgtgctgggtggcttcgcgctgtcgctgctggtcgacgacaagcattacaacgacgtcgccgagtgggtgaaccgtacccacctgggcatgcgcttcacctactaccgcgtgcgccgcaacgatgatgcgttcgcccgtgagccgtcggcgaagtcgctgctgcacaagctggaactgcgcgaacacgtgttcgacagctggctgcgccgcgagctcggcaagcgattcgactacgagtgcgtggatgccaagcagctgcgcaacgtcgaccgcggcatcacccgcgaaggccaggtcaagcatccgggcgaccgtttcgagaaggatgaccgcagtgcggtgggcgaccgccgtcgctggatcctcggcttcaacaaccacgacaaggtgggcgccttcgagcgcgaagctcaggaactggccaagcgcatcgccagctgcgagaccgacatcgcgcgcctgcgtggacagcgtgaccgcgacaacgaacgccgcctggcctgccacgagctggtcagcatcagctggaacgagatcgacatcgccgccccgcagcagcgcctgagcgacatcgaggccacgctgcgcgacctgcgcgaaggcaatgccgacctcgccaagctggccaagcagatcgacgccgtgcgcgccgacattgagcaggcccgccgcacctatgaagacgtccgcgtcgagcgcgggcagctggtcaaggaacgcgaccgcctggaccgcgcgcgccagcagagccgtgcgctggtgctgccgagcctggcccaggagcaggaagccggccttgccgagcgcctgcaggagcagggtccgctcagcctggaaacgctggaagcgcacatgcgccaggtcagcaacgcgctgaacgagcagctgtcgtcctcgcagcaggacctcaaccgcatcgagaaccagttgatcggctgcttccgtcgcttcatccagcagtggccggaggaatcgggcgacttcaccgtgtcggtggcctcggccgaggacttcctcgcacgcctcgaacgactggagcgcgatggcctgccgcagcacgaagagcgcttcttcgatctgctgcagaaccagagcaagaacaacctgctggccctgcagcgccacagcgccgaggcccgcaagtcgatcggccagcgcctggacgaagtgaacgccagcctggaacaggtgccgttcaaccgcggtacgctgctgaccatcgaactgagcgaccgtcgtctgccggaagtgggcgagttccagctgcagctgcgcgaagtgctgtcgcagcagcagaccgagcagcgcgagctggccgaatcgcagttcaccgtgctgcgccagctggtcaaccgcctgggctcgcaggaaggcgaggacaagcgttggcgggagctggtgctggacgtgcgcatgcacgtggagttcatcggcgtcgagctggatgcggaaacgcgccagcaggtcgagatctaccgcagcggcgccggcaagtccggtggccagcgccagaaactggctaccacctgcctggccgcggcgctgcgctaccagctcggcggtgctgacagccagctgcccagctacgccgcagtggtgctcgacgaagccttcgacaaggccgacaacgagttcaccgcactggcaatgaacatcttcgacaacttcggcttccagatggtggttgccaccccgctgaagtcggtgatgacgctggaaccgttcatcggcggcgcctgcttcgtcgaaatcagcggtcgtcacgactccggcgtgctgctgatcgagtatgacgaggaaggcaagcgcctgaagctgccagagcgcagccgccagcaggccaacgaaccggaagaagccgaggcctga

SEQ ID NO: 44912 - DNA, 1476 bp, Acetobacter malorum
atgaagcttgatttcacaactctcaacagcatgcgccagcataatccggcctggcgcctgttatgctcggaccatgccccccttattctcagctttttgcatcaggccttcgtccgccccaacgtgcgcagtctggaagccgagagcatggcggaagcgctggaggacacactctatgctttgcgccagcaactggatgaaaacgcattcccccgaacagcccgggagtatctggaagactgggcctcacccgacaaaggctggctgagaaaattctatcagctggggacagacaacgctgtcttcgacatgaccccggctaccgagaaagctctttcatggctggagcagctggcagagcgtagctttgtcggcacagaatcccgcctgcggaccctgtttgacctgctgcgccagatgaatgaaggcacccagagcgacccggaccagcgccttgctgacctgcaccagcgccgggatgaaattgatgccgaaattgcccgcatccagagtggggatctcagcctgatggatgataccggcatcaaggaacgcttctcccagttcacccgcatggcgcgcgaccttctggccgacttccgtgaagtggaacataatttccgccgtctggaccgcgcggtgcgggaacgcgttgctttatgggatggcaccaaaggcgcattgctggatgaaattctggcccaacatgatctgattaatgagtccgatcagggtcgcagctttcaggccttctggaacttcctcatgtccagccgcaggcaggaagaactttcgcagcagttggaacacatcctctcgctgcccgtcattgcggagcagaacccggaccctcgcctacgccgtattcattatgactggctggaagcgggcgaccacacacagcgcaccgtcgcacaactctcccatcgcctgcgtcagtttctggatgaccagagccggcaggaaacccagcgcattatggaaattctgcataatatcgaggcccacgccatcgccgcacgcccgtatctgtccgattgcccgcctgatgaggcactgacggatctggacgccatggccgcctcaccagaccttattatagagcggcctctttattcgcccccactccccaccatcctgacggttgaccctttgccggaagacacagcggacgatgtggaccccatagccctttatgaacaggtcgtggtggaccgcgtgcgcctgaccgaaaacattcagcaggctctggcggaagccccgcaaatcagccttgctgcgctgctacgtcgccatccgctggaacagggattgtccgagcttgtggcctatctccagctcagcagtgagcgcttcgagagcctcattgatgaaaagacgaacgatcatgtaaactgggacatcatgacagcggatgggtccatcataacgcgccacgccaccctgcaacgcgtaatttttgtgaggtcggcatga

SEQ ID NO: 44913 - DNA, 759 bp, Acetobacter malorum
atgagccagacggtcaacaccccagaggatgcgcaggcttcagcgcacgctccggcttctctctccacactcgccattacgctcttaaaaagcgtgatctaccgggaggaagatgaaagcctatgggggcatctgctccgcctgcaaaatcaggtgcgggattatgttgctgtgttggggctagtcctgattatcgaccccgccgagggctatgcctatctgcgcagcgcaccagagcccgaagaggaagaaggcgcatcccgtatgctccgtctgattgcgcgacgtccgctctccttccatgtcagtctgcttctggccctgcttcgccagcaactggtccggtttgatgccatgggtggcgagacgcgccttatcctcagccgcgatgatatcgcttccatgcttcaaaccttcctgccggaaagcagtaatgaagtccggcaacttgcgcagattgaaagctatatccgccgcgtggctgaactcggctttttgcgcccccttccccctaccagtgcagatgcccctaatgccgcaccccgctacgaggtgcgacgtattctgaaggcctatattgatgcggaatggctggccacgctggatgaacggctggaagcctatctggcgcatgcccgcagccttgagcaaacagacctgccccttgcgactgcacccaccacgccagaacagaacaccgtagctgagtcccagcttttttctgaccatgccgatacaggactgaccgaccgtgactga

SEQ ID NO: 44914 - DNA, 3408 bp, Acetobacter malorum
gtgactgacacccagcaagccccgctcgactttgccgtggatgatcgtctggccgggttccgtctgcatcgtcttgaagtgctgaactggggcacgtttgacaagcggatctggcgctttgacctcaagggtcggaacgcgctgctgaccggcaatattggctcgggcaaatccacactcgtagacgccatcaccaccctgctcgttcccgcacagcgcattgtttataacaaagctgcaggggctgatacgcgtgagcgctctctgcgctcctacgtgaccggccattataaatccgaacgcaatgatgcaaccggctccaccaaatccgtaagcttgcgtgatacacaaagctacacggttattttgggtgttttcaaaaatgaagggtatctgcaaaccgtcacactggcgcaggtattttggataaaaaaacagcaggtgcaaccagcacgcttctttgtgtgcgcggaaaaagaactgtccattcaggagcattttaccgggttcggcacagatatcctgcaactgcgcaaaaacctgcgtgcgcagggtgcggaagtggaagacagcttcaaccgctatgcggcatggttccgtcgtcgcttcgggattgaaaacgagcaggctttagacctgttcctgcaaactgtctccatgaagtctgttgataatatcacagactttgtgcgggaaaacatgctggcgcggtttgacgcaactgaacggatccacgctctgatttctcattttgaagatctggatgactcgcatcaggccatcctaaaagcgcagaagcagatcaacctgctcacgccgttaacggaagacgtcaccgcccacgctgaaagtaaaacccggcatgacacgctcaaagcctgtcgtcaggctttgccgggttattttgccagccagaaagccaccctgcttgagcagaagattgccaaagaacaggacgttgccgcaaccaatcagcagcagctgactgaacaggatgccgtccgcaccaccagcaagcagcagctggacgagatcaaacaggccatttatgccaacgggggcgacaggcttgaacagctggccatcgctatccagcaagccgaaaagaccagtgaagaccggcgcaaaaatgccgcgcattacgcaatgcttgttgaaaaactcaatgaaaaacctgcgcattctgcggaaggctttctggagcttacgcagcatctcaagaagcagaaaaacgaatggaaaaagcaggatacctggctggcaaaggatctaaccgagcagagcattcttttccacgaagaaaagaaccagcacgccgagattgtcaccgaactggacagcctacggaaacgccagagcaatattgacgaacgacagatccgcatgcgcgccatgctctgtgatgcactggatgtgtctgccgaagacctgccgtttgccggtgaacttatccgtgtgcgggatgacgcccgggagtgggaaggtgcagcggaacgcctgctacatggcttcgcattatcgctgcttgtgccggaccatctctatgcacaggtggtggactgggtggaccgcacacacctgaaagggcgtttggtttactaccacattcagcaacaccgctcgggctctcatgccgtccgccatcctaatacactggcccataagctggaagttcacccggactcctccatgcgcctctgggtggaaaatgaactggcgcaccgcttcagctttacctgctgtgaaacccaggacgatttccgccgctcaagcaaagccgtcacccggtccggtcaggtcaaggaaccgggcggccgacatgaaaaagatgaccgtcatcagattgatgaccggagccgttatgttctggggtggaataacgccatcaagattgccgctcttgaagagcgacagcgagagcaggaagcgctgatccagaaacacgcgggtgaaattgcgcaggccgaaaacacccgcaaaatgctgcaggaacgctttgaaacgctgacccggctggagcgctatcccgattacactcagctggactggcagagtgccgcgcaaacagcagaacagctgacagcagaacgagaagctctaaccgcaacatccgatgttctgcgtgaactcaaacagcagaaagagcatgcggaacagacacaacagcaggctgaagcagagtatatgatcctgtttaaaaaacaggcgcttctggatcagtccgttgaaactcttcaggcccgcctgcaacattgccagacggttctgaacgactatacgctcacaccgcagcaggagcaggaactcaccgagcttcaaatacagctgaatggcgcagagctatccagccttgaagcctgtgagggcgcggaaacgcagctgcgcgaccagctggacatacaaattgaccaccagcagcgcacactggactccctgcgggacagtattctgaaagacatgcgagagttccggacaacgtatccggtcgaagcgcaggacatggacgatcatctggaggccggccctgagtattgcgcgttgctggcacaactcaaaaaagatgaccttccgcgctttgtcagccgcttcaaaaaccttctgacggtcaatacgattaacgaaatcgctaatttcaatgcccatctggcgcaggaacgggagattattaaggaacgaattgccgtcatcaatacgtccctcacccagattgactataacccggaccgctatatccggctggaagcccaccagacactggacccggaaattcgagattttcaggcctcccttcgggcctgcaccgaaaatactgtttccggggatgataccgaacagtattccgaacagcgcttttatctggtgaaaaccatgatcgaacgtttccgggggcgtgaaggtctggcggaacaagaccgccgctggaccaacaaagttactgatgtccgcaactggttttccttcgcagccagtgaacgctggcgcgctgatgagaccgagtttgaccattatacagattccggcggcaaatccggtggccagaaggaaaagctggcctataccattctggcggccagtctggcatatcagttcgggctggaatggggcgaagtgcgctcgcgctctttccgctttgtggtgattgatgaagcctttggccgtgggtctgatgactccacccaatacggcctgcggctgttccagcaactgaacatgcagctccttattattacgcccttgcaaaaaatccacatcattgaaccctttgtttcaagtgtgggctttgtggacaataaggatggaaattactcgcgcctgcgtgttctgagcattgaagagcattttgccaacaaggcatccctccatgatgcagcgccagccctgctcaggcatgaagagcagtctgtgtga

SEQ ID NO: 44915 - DNA, 1182 bp, Acetobacter malorum
gtgaactggactacgccggcagacctcaaaaaacagcttgagcgtttatggaaaaaggggacactccccaatgcccttatcagcaaaacatgcttatttccgttaaccctcaccctgcgcaccccaagtgcctcagatattacgaagcacctccatgccgtcagagactggacggaaatgcttaatgcgatgcggcatatcaggctcatccgacacacagtgaaaaatagggtgcagggcacacagaccatcccgcacaaagtcgttattgaaacactggaagatactcttgccttactggacaagcacgacaccgctcgtcaaattttagcgctccatgccatgacagtagaaaaagcgccttttctgctaccttggcttgctcaaaatgctctcacagcccaccgccacgccacagaatgggaacgacttttaaccctcgctgtctggatgagggacaaccctgctcccggcatctatctgagacaggtcgacctaccgggaattcataccaaattcattgaacgcaacaagactattctctctcagctttttcagcatgctttgccagaacaagccattaacgccgcctgttctggcatggatcagtttgagccacgctacggatttcgcaccaaacctttacgcattcgttttcggattttggatgctgcactctctcccttccccaccatcgcgcatcccgacatcacgctggactccgaaagttttgcaaccctatctcttatggggtgtcgtattttcattgtggaaaatgaaagttgctttcttgctttcccttatcttgagaatgctctggtcatttttggagcaggctattgctgggatgttctgaaacccgcccactggttgcaaaaatgctctatttattactggggagacattgatacgcacgggttcaggattcttgatcacctccgggccattttaccccggacgcattctttcctgatggatgagccaaccttgctggtttatagcgcgttttgggatgaggaaccttctcccgtgcggcatccgctttcccgcctaacgccctctgagcagagtgtttttacggctcttcaaactgatctgtttagccagaacctccgacttgaacaggagcgcattcatttttccgacctgcgcaagatactggactcgctgctccagccataa

SEQ ID NO: 44916 - DNA, 1437 bp, Arenimonas malthae CC-JY-1
atgcccgtgactgatcccaacgccaacacgctgttcgaccgcctgccccggaccgtgttccggcccttggcggccgccaacaacacacgctactgggatctgctcggtcgcctggtcgacgagttctggggcgacggggcgcgtacgcccggtgaagacgttcccaaaagcgagttgattgcggccctggagtcgtacctggtcgtaagcgacccctgggaagccgaggacggcgcggcgcccgataccccagccaacatccgggcccatggcatctacagcgtgtttcgggacagcggctggttgagccagcgcaaacgcggcgtacgcgacatggccaccattcgcccggtgctggcccagtttcatacgctgctgcgtgaattcggaaccaaagagcctgagttcctcggtagcgaggtccgctccgtattcctcaacctccaggaggccgcgggcgggaagggggacgcctacgccaaggcggcgcgtgaagccaagcactgcatgacgcatctggcgagcacgggcgtggcggtgtacgacctgatggcgtcgctgcaatcggtggccagcacccgggaattcgtggcgggctatttcgatgacttcatccgtcggcatttcatcggtgactaccacgagctccgaacaaaggcgcaccccctgcagcatcggaccgccatcgtcactttgacgctccagattcaacacgacccggagcggcggaaagacatcgtcgcttggtaccaacacaacaccgccgggggcgacgcggatcgggccgaagcctatttcgagcgcgacacccgccgtttgatgcgcctggaaagcgtggaggacgaacttcgccgactggatgacgagattcgcgccgccaaccagcgggctttggcgtatctggattaccgccttcgtgctcccaggcattttgacaaactgatcgcccgggcgattgccggcgtggcgtcgctgcgcgacggcgatcgcgccttgccggccgggaccgcgggcgagctggcgggcgagggttggctgggcaaggctcggcaggtcacccgcgagcccgacgccacccgggtgcaaacgcgggtccctacgctcgaggaactggccctgcagtcattgcgcaaacgcatggcggacgctcgcttggtgcgccccgacaagctggcggcctacgtcgcgagacacctacagcgggccacccccgtgttttctgaccagttgcaaattgagaccgtcagcgacttgtgttgctatcagcgcttgctgctgatcgcctcgcgcaacgaggccccgctcgcggcggcgcgccaggatccgttcgtacagatgctgccggcggtccgcatccagttcgtcgacggcccgcgcaccctcaacccctacgtggaacaccggcgttttgtcatccaacgggagaaagccgcatga

SEQ ID NO: 44917 - DNA, 606 bp, Arenimonas malthae CC-JY-1
atgaccgcctcatgggagcggctggccgaggccaccgacggacgttacaccggcgccgatttcgagcgggcggcctaccaattgctggtcgaacaggtggtctacgccgctgatcgcggcagcgcgaccccgtatcacctgctggtgacctacgccgccgcgtttaaggacgtgctcgaccggctcggcgtcacgatgcagcacaatcaccaccacaactacgtggtcgcgctggcgaggcaccgggtgggtccacgcatgcgcctgtcagagacgcgcctggcactggtgcttcgtcgactctacgacgatgccatccaccgggcggacgtgaccgacggggaggccttggtcgggttggaggatctggagcgcgcctacggtgaattgctcggtcgtccctttccgtccaaaggcgaactggacgacctgttgcaggccctgcgtcgctacggcatcgcgaagatcgagggtgcggaggacccgctgcaaccctaccacgtggtgattcgcgccggcatcgtcgatgtcctgggcgagtccgcgctgctacagctggcggcgcacggcgttgatctcgaggagggcagcgatgaagctgcttga

SEQ ID NO: 44918 - DNA, 3438 bp, Arenimonas malthae CC-JY-1
atgaagctgcttgagtcggtgacgttggtgcagttcttcctgtacgagcggcaggatctgaccatgggtcgcaatacggccttcctgggccccaacggcaccggcaagaccgcgttgctcgacgccattcaggcagtgatgctggcggcggatgcgcaccggacccatttcaactcgcaggcgaacggcaagaagcgggcgcggacgctgcgcgactactgcctgggggtctttgaccagtccgaggaaggccggtgccgcgatgtggccaacacgtacgtggccttgggctttcgcgacgagacgtcaggccaggtcgtcaccgcgggcatcgcgctgtcggcgagcgcgcacagtccggaagtcatcgtccaggggctgttcatcctgcccggcgtggccgtcgacagcgcctcgttcctggagcaggggagcggtggctcgcaggtattgccttggaaacgattccaggcacaggcggccgatgcgtgccgacaggcaggctcgatcggcaccgccgtgttcaccacgaaccgggaagacttcacccggcgcttgctggtcgaacacctggcggcgcctggcgatcgcccgaacccgcaggcgttccgaaatgccttccagcgctcgctgcagctcaagggcatggacgatctgagcgtggcgctgcgcgaccacctgatcgaggcacggcccacgaatgtgcgcgagttccggctcaggctcgaccagttccgccaggtgcgcgacgtggtgcgactcaccaaggagaagattgaccaggccagcgtggtctgcggcaagtacgacgtggtgcgccgggaacggatcgcggaagcgaactatgcgtgtctgcgagccgtgtacgacagcgagcggctgggcgagtcgatggcagaggcgagcgagaccgtcaccacgctggccggcgaactcgatcgcgcccacaccgagcaccgccgagcgcaggccgcttttgaggcggccgacgcggcgaaggagcgggcgattgcaacgcttaaccaggatcctgactacgcccgccaggccggcagcgcgcagcacctgggtgaccgccagaaggacctggcgcagcagcagcgtgcgctgcgcgccagtgtccaggcgatgacggcggcggtgcgcacggccggcgggttgccggtgcttctcgagaggcgaggcctgttcgaggccgccctcacgcagttggctgacctggacagcaggttggcgccggacgccggcacggccccggacgccgtgagcgtggccagcgccctgcggcaggtcgagctggcgtaccaggccgtccggcgtgccttggccgcggccgaggccgaatacaaggaggccgaggcccggcgcaaagacgcggccttggccctggagcgctcaaaccggggcttggctgagctcaacccggaggtcgctcgcctccagcgcgagctcaccgaggcgggaattgactgcaccccggtttgcgatctggtgcggatctcggcgccggcgtggcagccggtgatcgaggcgtatctggggccgcacgtgcaggcgctgctggtgcccagggggaaggaaatcgccgccgtacgggcctatgagggcctgcgcggcacccaggcggtgtatggcgtcaagctggccctgccgtcgcgcctgcggccttaccgggccccggcgggaggtcagcccgccgcccttctggtcgatggcgagaatgcggatgcggtgacctacctgcgcggcgagctcgggtcggtgatgtgcgtggagtccctcccggacctggtggcaggtcagaagggattcacccgcaccggcatgatcgcgaccggcagcggcgtggagcgccggcggctggccagtgccgagcatcttcggatcgggcgaaccgactcgcacgcgcagcggcgcaaggcacaggccgaactcgaggagagcacgcggctggccactgcccgcaaggccgaggagcaggccctgcagggtgcgctgctgcaactcacgccgttcggcaacctccaggttacgcagcacgatatcgaacagcggctggccgagatcgccgccgggcaggccgtggttcaggacttgaccgagcgcctcgccaccaccgccacgccgggaacccggtcattgcaggacgccgtcaccgcggcgcgcctggccgccgtcgaggccaagcgccaggaaagccaggggctcgaacgggtgaccaccctcaaacagcgactggagacgtcgcagcggaccgtcaacgagctagccgggcagctcgcgctggccgccggcaccgagcgcacggcccggcaggatgcgctgtacgacgcgcaggaggtagatcgccatcgggcgcgcctggacgagcgccacccggtcatggacgcccggatgcaggcctgcgaggcggccatccagcgggcgcgctcgagcgccgccagcgcggatcgagaggcctggtctttgctggcggcctatgtggcccaataccacctggccgccgagggcctggacggccagtggattccggcccagcgctttatccagcgcgagcgccagcggctggaggagaccgaactggctgcgcgactggaggaatccgaggaggcttaccagcgggccctggagatcttccggaccgacgtcgcacaagcactgctgtcgggtttcgaccgcgtggacgagcaaatgcgcggtctgaacctggtgctgaagaacgcaccaccgttctccaacaacgagcgctatcagttccgctcccgggtggtcgacctgcaccgccccctgtacgacttcctgcagcgggtccgggaggtggggggcgacgatgggctgttcggcgaggccggccaggtgccggaggcgttccgggagctgatggagggcgacgccagctcagtcctgctgcaggacggcagtccgttggccgactaccggcgctttttcagctttgatgtcgagatcagtcgcgagggcaaagtcattggcctgctgagcaagcgtttcggccccgggtccggtggcgagcatcgcacgcccttgtacgtgatcttcggcgcggcactggcggctgcatacggcaaggtacagggtcagaacggcggcggcgggatcatgctgctcgacgaggcgttcgacaagatggatacgcagaatgtccgtgcggccgcgcagtacctcaactccctcggcctgcagctgatcatggccggccccgagaccgaccagccgaaactctcctcgttcctgagcgtttactacgacatgggccgctacggcggaaagacgatccagatggaccgcaccgtgctcacggacgcgacccgtgagctgctggccagcgacaacccgttgtaccacccggaactgatcgagcaagagatggcgaggctggccagggagcgaggcgatggatctcagccaggcgacgcttga

SEQ ID NO: 44919 - DNA, 1194 bp, Arenimonas malthae CC-JY-1
atggatctcagccaggcgacgcttgagcagttgctggcgcgtggcgagcgggcgctgcacgcggcgagcacgcggacgattcggatctcgtttaaggacacccaaagtccgtactgggcgctcacgctggatgaccgggtcctcctgcatgagcgcatgcgcgcggccgagacggctggggcggtgcgcctggagtggtcgaaactgggcggcgacgaacgccccctcgacggcgtggtattggtcagcctgcggcacctagccgcgcacctgggccgtcccaccgtcgccgatcaggtggacactgccgaacgtgtgttggccccctgggcggcgtcggaactgccgatcccgaccctgctggccacctggcggtccctgcgcacggtgcgcggaatggggcctgacgccgcgccggacttcgcagacgccgcgcggctggtctgccaccttcgcgggcagccggcggaggaccgcgtgctgcggcaggtcagcgtcgagctgttcgcccacagcaagcggatcgaggcgttgcagcggcacgtcgacgtgctgaccgccgaggatgtgcaggcccccgcgcgccacgccgaagaagtcttcgcacgcatcggtttgcgcaaagagccacaaccgttcctcgtctcagggcacggcaagatcctgctcccaggggaagcgtgccggatcgtgcggccctatgtgggcgtttcaccgtcggcggttatcggctacgccggcgcgcccgcatggatcctcaccatcgagaacctgaccaccttccacgtcgcagcaatggcgcttggggcccgcaccgacggactcatcctctacaccggtggcatgccgtcgccggcgtggtgccgcgcctatgcccggatccgagcggccttgccgccgcgggccacggcctatcactggggcgacatcgatgaaggcgggttccggatcgccttggtcatacagcaggcggacccggcaactgcgggactgcacccgtggttgatggaccccatcgcgtgcggtggaagacgggtcgaggtctcgccggccgcgtgcgcggccatgtctcgaaacgcgctgcgattaggttggaacgccgttgccaacggaattcgcgatgcgggtacccgggcagggtgcgagcaggagagcattccggttcgccttcccggcctgggccccgccggctag

SEQ ID NO: 44920 - DNA, 1437 bp, Arenimonas metalli CF5-1
atgcccgtgactgatcccaacgccaacacgctgttcgaccgcctgccccggaccgtgttccggcccttggcggccgccaacaacacacgctactgggatctgctcggtcgcctggtcgacgagttctggggcgacggggcgcgtacgcccggtgaagacgttcccaaaagcgagttgattgcggccctggagtcgtacctggtcgtaagcgacccctgggaagccgaggacggcgcggcgcccgataccccagccaacatccgggcccatggcatctacagcgtgtttcgggacagcggctggttgagccagcgcaaacgcggcgtacgcgacatggccaccattcgcccggtgctggcccagtttcatacgctgctgcgtgaattcggaaccaaagagcctgagttcctcggtagcgaggtccgctccgtattcctcaacctccaggaggccgcgggcgggaagggggacgcctacgccaaggcggcgcgtgaagccaagcactgcatgacgcatctggcgagcacgggcgtggcggtgtacgacctgatggcgtcgctgcaatcggtggccagcacccgggaattcgtggcgggctatttcgatgacttcatccgtcggcatttcatcggtgactaccacgagctccgaacaaaggcgcaccccctgcagcatcggaccgccatcgtcactttgacgctccagattcaacacgacccggagcggcggaaagacatcgtcgcttggtaccaacacaacaccgccgggggcgacgcggatcgggccgaagcctatttcgagcgcgacacccgccgtttgatgcgcctggaaagcgtggaggacgaacttcgccgactggatgacgagattcgcgccgccaaccagcgggccttggcgtatctggattaccgccttcgtgctcccaggcattttgacaaactgatcgcccgggcgattaccggcgtggcgtcgctgcgcgacggcgatcgcgcctttccggccggggcagcgggcgagctggcgggcgagggttggctgggcaaggcccggcaggtcacccgcgagcccgacgccacccgggtgcaaacgcgggtccccacgctcgaggaactggccctgcagtcattgcgcaaacgcatggcggacgctcgcttggtccgcccagacaagctggcggcctatgtcgcgagacaccttcagggggccacccccgtgttctctgaccagttgcagattgagaccgtcagcgacttgtgttgctaccagcgcttgctgctgatcgcctcgcgcaacgaggccccgctcgcagcggcgcgccaggatccgttcgtacagatgttgccggcggtccgcatccagttcgtcgatggcccgcgcaccctcaacccctacgtggaacaccggcgttttgttattcaacgggagaaagccgcatga

SEQ ID NO: 44921 - DNA, 606 bp, Arenimonas metalli CF5-1
atgaccgcctcatgggagcggctggccgaggccaccgacggacgttacaccggcgccgatttcgagcgggcggcctaccaattgctggtcgaacaggtggtctacgccgctgatcgcggcagcgcgaccccgtatcacctgctggtgacctacgccgccgcgtttaaggacgtgctcgaccgactcggcgtcacgatgcagcacaatcaccaccacaactacgtggtcgcgctcgcgcggcaccgggtgggcccacgcatgcgcctgtcagagacgcgcctggcactggtgcttcgtcgactctacgacgatgccatccaccgggcggacgtgaccgacggggaggccttggtcgggttggaggatctggagcgcgcctacggtgaattgctcggtcgtccctttccgtccaaaggcgaattggacgacctgttgcaggccctgcgtcgctacggcatcgcgaagatcgagggtgcggaggatcccctgcagccctaccacgtggtaattcgcgccgggatcgtcgatgtcctgggcgagtccgcgctgctgcagctggcggcgcacggggttgatcccgaggagggaagcgatgaagctgcttga

SEQ ID NO: 44922 - DNA, 3438 bp, Arenimonas metalli CF5-1
atgaagctgcttgagtcggtgacgttggtgcagttcttcctgtacgagcggcaggacctgaccatgggtcgcaatacggccttcctaggccccaacggcaccggcaagaccgcgttgctcgacgccattcaggcagtgatgctggcggcggatgcgcaccggacccatttcaacgcgcaggcggacggcaagaagcgggcgcggacgctgcgcgactactgcctgggggtctttgaccagtccgaggaaggccggtgccgcgatgtggccaacacgtacgtggccttgggctttcgcgacgagacgtcaggccaggtcgtcaccgcgggcatcgcgctgtcggcgagcgcgcacagcccggaggtcatcgtccaggggctgttcatcctgcccggcgtggccgtcgacagcgcctcgttcctggagcaggggagcggtggctcgcaggtattgccttggaaacgattccaggcccaggcggccgatgcgtgccgacaggcaggctcgatcggcaccgccgtgttcaccacgaaccgggaagacttcacccggcgcttgctggtcgaacacctggcggcgcctggcgatcgcccgaacccgcaggcgttccgaaatgccttccagcgctcgctgcagctcaagggcatggacgatctgagcgtggcgctgcgcgaccacctgatcgaggcacggcccacgaatgtgcgcgagttccggctcaggctcgaccagttccgccaggtgcgcgacgtggtgcgactcaccaaggagaagattgaccaggccagcgtggtctgcggcaagtacgacgtggtgcgccgggaacggattgcggaagcgaactatgcgtgcctgcgggccgtgtacgacagcgagcggctgggcgagtcgatggcggaggcgagcgataccgtcaccacgctggccggcgaactcgatcgcgcccaaaccgagcaccgccgagcgcaggctgcttttgaggcggccgacgcggcgaaggagcgggcgattgcaacgcttaaccaggatcctgactacgcccgccaggccggcagcgcgcagcacctcagtgaccgccagaaggatcttgcgcagcagcagcgagcgctgcgcgccagtgtccaggcgatgacggctgccgtgcgcacggccggcgggttgccggtgcttctggagaggcgaggcctgttcgaggccgcgctcacacagttggctgacctggacagcaggttggcgccggacgccggcacggccccggacgccgtgagcgtggccagcgccctgcggcaggtcgagctggcgtaccaggccgtccggcgtgccttggccgcggccgaggccgaatacaaggaggccgaggcccggcgcaaagacgcggccttggccctggagcgctcaaaccggggcttggctgagctcaacccggaggtcgctcgcctccagcgcgagctcaccgaggcgggaattgactgcaccccggtttgcgatctggtgcggatctcggcgccggcgtggcagccggtgatcgaggcgtatctggggccgcacgtgcaggcgctgctggtgccccggggaaaggaaatcgccgccgtacgggcctatgagggcctgcgcggcacccaggcggtgtatggcgtcaagctggccctgccgtcgcgcctgcggccttaccgggccctggcgggaggtcagcccgccgcccttctgctcgatggcgagaatgcggatgcggtgacctacctgcgcggcgagctcgggtcggtgatgtgcgtggagtccctcccggacctggtggcaggtcagaagggattcacccgcaccggcatgatcgcgaccggcagcggcgtggagcgccggcggctggccagtgccgagcatcttcggatcgggcgaaccgactcgcacgcgcagcggcgcaaggcacaggccgaactcgaggagagcacgcgcctggccactgcccgcaaggccgaggagcaggccctgcagggtgccctgctgcaactcacgccgttcggcaacctccaggttacgcagcacgatatcgaacagcggctggccgagatcgccgccgggcaggccgtggttcaggacttgaccgagcgcctcgccaccaccgccacgccgggaacccggtctttgcaggacgccgtcaccgcggcgcgcctggccgccgtcgaggccaagcgccaggaaagccaggggctcgaacgggtgaccaccctcaaacagcgactggagacgtcgcagcggaccgtcaacgagctagccgggcagctcgcgctggccgccggcaccgagcgcacggcccggcaggatgcgctgtacgacgcgcaggaggtagatcgccatcgggcgcgcctggacgagcgccacccggtcatggacgcccggatgcaggcctgcgaggcggccatccagcgggcgcgctcgagcgccgccagcgcggatcgagaggcctggtctttgctggcggcctatgtggcccaataccacctggccgccgagggcctggacggccagtggattccggcccagcgctttatccagcgcgagcgccagcggctggaggagaccgaactggctgcgcggctggaggaatccgaggaggcttaccagcgggccctggagatcttccggaccgacgtcgcacaagcactgctgtcgggtttcgaccgcgtggacgagcaaatgcgcggtctgaatctggtgctgaagaacgcaccgccgttctccaacaacgagcgctatcagttccgctcccgggtagtcgacctgcaccgccccttgtacgacttcctgcagcgggtccgggaggtcggaggcgacaacggactgtttggcgaggccggccaggtgccggaggcgtttagggagctgatggagggcgacgccagctcggtattgctgcaggacggcagtccgttggccgactaccggcgctttttcagctttgatgtcgagatcagtcgcgagggcaaagtcattggcctgctgagcaagcgtttcggccccgggtccggtggcgagcatcgcacgcccttgtacgtgatcttcggcgcggcactggcggcggcgtatggcaaggtacaggggcacaacggcggcggcgggatcatgctgctcgacgaggcgttcgacaagatggatacgcagaatgtccgtgcggccgcgcagtacctaaactccctcggcctgcagctgatcatggccggccccgaaaccgaccagccgaagctctcctcgttcctgagcgtttactacgacatgggccgctacggcggaaagacgatccagatggactgcacggtgctgaccgacgccacgcgcgagctgctggccagcgacaacccgatgtaccacccggagttggtcgaacaggagatggcaaggctggccagggagcgaggcgatggatctgagccaagcgacgcttga

SEQ ID NO: 44923 - DNA, 1194 bp, Arenimonas metalli CF5-1
atggatctgagccaagcgacgcttgagcaattgctggcgcgcggcgagagggcactgcacgcggcgagcacgcggacaattcgggcctcgttcaaggacacccaaagtccgtactgggcgctcacgctggatgaccgggtcctcctgcatgagcgcatgcgcgcggccgagacggctggggcggtgcgcctggagtggtcgaaactgggcggcgacgaacgccccctcgatggcgtggtattggtcagcctgcggcacctggccgcgcacctgggccgtcccaccgtcgccgatcaggtggacactgccgaacgtgtgttggccccctgggcggcgtcggaactgccgatcccgaccctgctggccacctggcgggccctgcgcacggtgcgcggaatggggcctgacgccgcgccggacttcgcggacgccgcgcggctggtctgccaccttcgcgggcagccggcggaggaccgcgtcctgcggcaggtcagcgtcgagctgttcgcccacagcaagcggatcgaggcgttgcagcggcacgtcgacgtgctgaccgccgaggacgtgcaggcccccgcgcgccacgccgaagaagtcttcgcacgcatcggtttgcgcaaagagccacaaccgttcctcgtctcagggcacggcaagatcctgctcccaggcgaggcatgccggatcgtgcggccctatgtgggcgtctcaccgtcggcggttatcggctacgccggcgcgcccgcgtggatcctcaccatcgagaacctgaccaccttccacgtcgcggcaatggcgcttggggcccgcaccgacggcctcatcctctacaccggcggcatgccatcgccggcgtggtgccgcgcctatgcccggatccgagcggccttgccgccgcgggccacggcctatcactggggcgacatcgatgaaggcgggttccggatcgccttggtcatacagcaggcggacccggcaactgcgggactgcacccgtggttgatggaccccatcgcgtgcggtggaagacgggtcgaggtctcgccggccgcgtgcgcggccatgtctcgaaacgcgctgcgattaggttggaacgccgttgccaacggaattcgcgatgcgggtacccgggcagggtgcgagcaggagagcattcctgttcgccttcccggcctgggccccgccggctag

SEQ ID NO: 44924 - DNA, 1434 bp, Arenimonas composti TR7-09 = DSM 18010
atgcaggaacccgccccgctgttcgaagtgctccccggcggcatcttcggcccgctcgcctcgccgaaccgccgccatcactgggcgctgctgtgccggctctacgacgagttcttcggtcccgacgcgccgctggcgccaccggtcggtctgccgcggcgcgaaatcaccgccgcgatcgagcgctggctgctcggcgacgatccctgggaagacgaggacgggcaggcgcccgataccccgctgccggtgcgcgcgaacgccatctacgagcgcttccgtgcctccggctggttgcgccaggaacgtttcggcgcccgcgagatggtgacgatgccgccgctggtcgcgcagttcctcgccacgctcgtcgagttcgccgaacacggaccgacctatgtgtcggcgaaggtgcgctcgatcgagcttcagctgcagcaggtcgtcgacggcaaggccgccggcgacgccctcgacgaagccgccgaccaggcccgccgcctgctggtctcgctgagttcgatgagcctgcgcgtgcgcgacctgctgccggagatcgcccgcgccgacagcaccgcgcagttcgcccggatctggttcgagcgctacatcgccggcttcttcatcggcgactacgccgacctgcacaaggtcgaccatccgctcgcccgccgcagcgcgatcctggcgatggcgcgttcgctggacgagggcgaacgccgcaccgggctgctggcctggtaccgcgaacacgccaccggcggcgacgccacccgcgccgagtcgcgcatggcgcgcagcctgcgccgcctgcacgagctcgaccgcatcgacgagtacctggcccgcctcgacgaggacatccgccacgccaaccggcgcgcgctggccttcctcgactaccgcctgcgcgcgccggcacgcctggacgtgctgatcgcgcgtgccgtccgcggcgcgctggccgcaccggaggacgcgctgcgcgtgcaggtggcgcccggcccgctgatggacgaggaacagctgcgaccggcgcgccgccgccccggcgcgatcgagcgcagcgccaacgcggtggtgcgcccgacgccggagcaacaggcgcgtctggcgctgctgcggcggatcaaccgcgcccgcctggtcaccgccgaggacatggcgcgctacgtcggccgccatttgccggcggaagggcaggtcgattcgatcgcgctgtcgatcaccggcatcgccgacctgcgcgcctaccagaccctgctgaccctggcgctgcgcagccggcgcatcggcggcctgcgtcgcgacgatccgctgagccgtctcgcgcgcggcttccgcgtcgaactcaccgatgccggcgagcgcgccgacaacggctggctgcgcgccccgcgcttcgtcatccaccgcctccggaagtccgcatga

SEQ ID NO: 44925 - DNA, 630 bp, Arenimonas composti TR7-09 = DSM 18010
atgagccgcagctggaacgtcctttcgcaacactcgaatggcctgtacgcaccggccgatttcgagcgcgccgcctatcgcctggtcaccgaacaggtgctctatgccagtgaccgcggcagccgttcggcctatcacctggtcgaagcctacttcgccgaattcgccgcggtgctggcgccgctcggcgtccgcctggagcgcaatgcgcattaccgctacgtggtcgcgctgccggcgcgtgccgagggcgtgccggtgacgctcgacgagaccctgctgctgctggtgctgcgccaacgctacgacgaggcggcgcgccgcggcgacatcgaggagttcggcgaagtcgtggtcgaactgccggaactgcaggaggcctaccggcggctggtcggccggccgatgcccgaggtcggcacgctgcgcacgctggcgcgcaccgcgcggcgctggggcgtcgcccgcctggtcgaatccgatgcggacgacccgcagcccttccacctgcgcgtacgcccggcgatcgtcgacatcgtcggcgagacctggctgcagcgcctggaccagcacaaccgcgacgacgtcgccgaagaagccgtcacggaggacgacgatgcagctgcttga

SEQ ID NO: 44926 - DNA, 3432 bp, Arenimonas composti TR7-09 = DSM 18010
atgcagctgcttgagcgggtccacctggtccagttcttcctgttcgaggcacagaccctcgagctgtcgccgaccagcgcggtcatcgcccccaacggcgccggcaagagcgcgctgctcgacgcgctgcagatcgtgctgctcggcgccgaccgcacgcgcatccgcttcaatgcccaggccggcggcagcgtccgcgcgcgctcgatccgcgactactgcctcggcgtctggcgcagcggcgacgagggccgcaagcggcgcaccgcgaccacctacatcagcctggtcttccgcgaccaggagaccggcgaggcgctcactgccggcatcgccctcggcgccagcgtcgacgagccggagcaccgcgtctacggcatgtacctcgtgcccggcgtcgcgctgacgctcgacgatcatctcgagcgcgccggcggccgcgaactgccgctggcctgggcgggtttccgcgagctgctgacccagcgctgccgcgaggccggcagcggcagcggtccggaactgcatgccggcagcgaacgcttcctcaaggacctgctgctgcgcctgcgcgccgcgccggcgggccagccggatgtcgcggcctaccgcaaggctttccagaacgcgctgaacctgcagcgggtcgaggatgtcgacctgttcgtgcgcaccctggtcgccgaggaccggccgaccgacatcgcgcgtttccgtggcctgctgcagaccttccgcagcctgaaggagcgcatcgagcaggtcgtcgcgcgcatcgccgccgccgaagacgtcgacgggcaatacggcaagatcgcccagcaggcggcgcgtgcggccagttgccgggcgctggcggcggaataccagcgggacctgctgtcggagcaggtcgagcaggccgagaacgaaagcgcggccgcgagccgccgcctcggcgagacgcgccgcgcgctggtcgaagcgagcagcgaacggacgatgctcgccgaggcgcatgcgcaggcactggcgcgactgcagggcagtgccggctacggggagcaggcgcagatcgatgaactcgccggccgcgaccgcggcgaactggcgcgtctgcgccgggagctcacgcgcggcatcggcctggtgcgcgaacagctcgcggcggtggcgaaactcggtctgccgtcgatcgatgcggcggccgtcgcgcaggcgatggcgccctggcagcactggcacgagacgctggcggcgctgccggccgaggcgccgctgccgtggccagcggccgcgctcttcgacgaggcgcagcgcgaactcgcggcggtgcagccgctgctcgccgcggtcgaggcgcaggcgcgtgcgctgcacacccaggtggaggacgcgaagcgccgccgcgccgccgcccagcaaaaccagaagcgcatcgccgccggcaaggcggagctgcatccggacgtgatgcggctggcgtcctacctcgccgacgagggcatcgcggcgacgccggtctgcgacctcgtgcgcgtccgcgacgccgcctggcagggcgcgatcgaggcctatctgcgcagcaatgtcgaagccctgctgatcgcgccggccgacgaggagcgcgcggtgcgcctctaccgttcgctcggcggcgcccgcagcgtctatggggtgaagctggcgctggcgagcgcggcgcgccgcggaccggatgaggcgcggccgggcacggccgcggccctgctcgagggtgagaacgccgacgcgctgggcttcctgcgccgcagcctcggcgagctgcgctgcgtcgacaccgaggccgagctgatcgccagccgccagggcctgacccgcgacggcctgctcgcccgcggtggcggcatcgagcgcctgcgcctgccggcggcgagcgaactgaagatcggcgccagcgacaaccgtgcccgtctgcgcgtgctgcacgaggaagccgccgctgccgagaacgagctgcgtcgcctcgaacccgcactgcgcgagctcgagaactgccgccgcggcctggccctgctcgccgaaccggggaagctcgcgcaggacctgcacgaccggatcgtcgaccaccgccaggtacagcggcgctggcaggacgcgatcgacagccgcgcggcggcgcaggacccggatctgctgcgcgcgtcggagcaggtccgcgaactcgccggacagctggccacctgcgactcccgccgcgatgcgctgatcggcaaggtggcgatggacgaacgcgcggaagccgacgcgcagcgactgctggccggcctgcgcgagcaggaggaacgggtcacccgcgacgcggtggacgccttccgcgatcccgacgtcgaccccaacctggtcgagcgcgtgcgcgaggaactggatgcgaagtggccgacgctgaaggaacgcgccgagcgctgcgaggagcgtgcgaaggacagcgaccgccagctcgacaacctcaagccgcaggcctggggcgcgctggcgcaatacgccagggatcacgtgctcgagctcgatctcgcccccggcgactggcgcgcggcgcgccgcctgctggcgaaggagctggcgcagctgcgcgagtccgagctggccaactaccagcgcgaggccgacgaggcctacgcgaccgcgaccgaaaccttccgcagcagcgtcgcctcggcgctgttcgacaacttcagccgcctgaagcaccagatcgccacgctcaaccgcacgctgcgggcgagcccggcgttctcgaacaacgagcgctaccagttccacttcgaggtcgcgtcggaatacgccgagctctaccgcttcatcaggcgcgtcgccgagatcgacggcgaggacggcctgttcggcagtgccggcgaggtcccggccgccttccgcgaactgatcgaggacgacgccgcgaaacatggcgcggtgtcggcgctcgacgactaccgccgcttcttccatttcgaggtgcagatccgccaggacgatcgcgtgatcggctcgctgtccgaacgcatgcgctccggctccggtggcgagcatcgtgcgccgctgtacgtgatcgccggcgccgcgctcgccgcggcctacggcaagaccgcggccaacggcggcggcctcggcctgatcctgctcgacgagttcggcgacaagatcgacgcccagaacgcccgtgccaccgtcgactacctgcgctcgctcggcctgcagctgctgctggccgcgcccgataccgcccagggcacgctgtccggcgttctcgacagctacatcgagctgttccgcgacggcgacctgctgcaggtcgagcacatcgaggtcggcgcggcggcgcgggcgctgctgctgtccgaccagttcgacctgcatccggagttgctggaggcggaggtcgcgcgcatcacggcgggagaggcgcaggtgtga

SEQ ID NO: 44927 - DNA, 1197 bp, Arenimonas composti TR7-09 = DSM 18010
gtgagcggcgtcgacgccgtgctccgccgcctgcttcgccgcgccgagagcgcacggcggcgtggcgatccgcggccggtgtcgatgaacatggccaaggtcgaggaatacaccggcctgcggacgctcgccgcgctcgaacacttccacgcccggatcgcgctcgccgagcgcatgggtgccttgcgtgccgagcgtgacgtgaatgccggagacggctcgcggctggtgcgcctgatggtggtcgatgcggcggcgctggccgccgccgtcggcgtcgaactgctggaagaccggatcgccgcggcgcaagccctgctcgtggactggcgggatcggtttccggtagtggaggaggtgctctcgcgctggcgtgacggcggcaaggtccgcggcgctggacccgaggccgcggcggatctgcgcgatgcagcgaaggcggtggccgcgcgccgggaagaccacgcctacgaacgggtgttgcggcgcgaaagtacccgcctgttcggcgacagcaagcgcctggagaagctgacccgctggctcgagctgatcgcgaccggcgaactcgctgcggggccgctgccggatgtcgaggtgtgggcgatgctcgggctcaggcgcgagccacagcccttcctcgtcgccggcacgggcgaggccgacgtggcggggatggccctgcccctggttaggcccttcatcggccttccggtggagcagctgcgcggactcgcgaccggggtgcgctgcgtgctcagcatcgagaatctggcgagcttccacgacgccgcgcagtccgccgatgcgggaaatgtgctgctgctttacaccggcggcatgccgtcgccggcatggcgtgccgcctacaggcgggtactcgcagggatcgatccgacggcccgcgtcttccactggggcgacatcgacgagggcggcttccgcatcgcggcgacgctggcggcgaccgccgccgaggccgggtacgggctgcgcccgtggctgatgtctccggaccagctgccgcccgccgtccgttcggacgccgccacgccgaatccggcggagctggaacggctctgccgctgggcagcccgcgccgggtgggaagaggtcagcacctcactccggcgacagccgatgctgctcgaacaggaaatgctggaaccggtccttccggctccagacgcgtcctga

SEQ ID NO: 44928 - DNA, 1458 bp, Nonlabens ulvanivorans
atgtttgaaatagaagatataaataagattttaaatgaatctcccagcttagaacttttgcagactaagcataggaatttgactattccgtttttcgttcacgcttttaaaaaaagtgagacttctcattctcaaaaagtattggagagcattctggtagattacctgcaacatattaactacacagaggagtctgaagatttattgattaatacagaatctcttgaggtaaaagcgaaaagaaagataaaagaatggagaggcgctggttttctttaccaaagtattattgatgatggtacaataacttacgatttatcacaatacagtctgagatcattagattggattgcagatcaaaaaagaacagaatttgtaggaacggattcaaagtttaaaagtgtttatgaaaaaataaaggatattcttgaatatacagatgataatctgataaagcgtaagcaaatattagaagaaagaaagttaacgatacaacatcaaatagaccaattagaagctggagaagctgtattattatatgatgaaagagaaattatagaacattttcaagacttacttagaacagcaaaagatcttctaattgattttaatgaggtagaagaaaattttataagaatatctaaagatgtgtattcaaaatactcaagtaaccaattaccaaaagaagagatactcaatttaacgtttacagcgcttcaagaacttaaaaatagtaatcaaggaaagagtttctatgctttttggaagtttttgctcgacacagattaccaagaggattggtcgaaactcacaaacgaattatattctcgattagaacaaaagaacattccacacgaggatacattcctaaaaaacttaaagcaaaatcttaaccaagcagctttaaaagtaactggtgcaaatactaaaatggcttctaaggttgctcggataatacgagattctggcactaaccaaaaaattacaaagcaattactttttgatataaagaagttactttcaaaaataagcaagcaaagcattgttccggacattggtattgaattagatactaaacctgttttcattttacctctcgaaccaggactgacttcccaaatgaaagaagaagttatttatacaaaacgacctgcaactgctgacgatgactacaccaaagcaaaaagcataaataagctttatgaaaattctggaatagatagacttgttctcagaaaaagaatagccgatattattaaagataaggatcaaacaactttagaagaaataataaatatttacggaggcataaaagaaggacttcctgaattatttggctacataggcgaacttaaaaaatttaagcataattacaataccaataaaaacataagcatcgtctttgacaaagcagaaaacaagactattaaaattcctgaaataatattagtacgatga

SEQ ID NO: 44929 - DNA, 579 bp, Nonlabens ulvanivorans
atgaatataacaacagaaaaaataaaaccatactcaaaagtgatagttctattacttaaaggagtggtagaatcaaagagttcaaaatgggatgatatatttcaatatgaagataaaatcagagaatacttgagtgtaataggccttgaattaatttacaaaaaggaagatggttatgcctttttaaagcaagttgaactagacgaagatgaaagtacgattggtttagtcagcagacgcaaattgagctttggcgcatctgtagttatggtaatacttaggcaaattttagaagaatttgaaagagatttagatgcttacgaaacacaagaacggtttattacagaggaagaacttaaatctgaaattgaagactttttacctcaagattatgataaagttaaattctattcagacttagaaaagaatatttcacgaatatctgatttgggttatttgaataagtcagtagctgacaatggagaaaccgtttatagtattcataaaatcattaaagaaaaagtaacattagacaccttactgaattttaaacaaaaccttgaaaattatggactataa

SEQ ID NO: 44930 - DNA, 2028 bp, Nonlabens ulvanivorans
atggaagtttttaattgggggggaacatttcacgataaagtatggcgaattaatccagaaggaaacactacgcttttaacaggcgcaaatgcttcgggaaaaacaacatttatagatgctttacttacactaatggttccctacaaaaaagatagattctataatcaatcttctggtgaagaaaaaaaaggagcaagaaccgaggaaagttacgttcttggtcactacggtaagaaacaaaacgaaggagatttaagtgctaccgttcaagcactaagggatgaaactgcaatttccattctattagcaacctttaagaatgaagacgataaatactgtactatatttcaatgtagatggttttctaatggagatctcaaaaaacaatttggattagcacataaaggacttcgcattgaagaagatttttttccgtttgataccaaaagaaaatggaaagacaatctaatggctaaacacccagatataggaagaggtaatccaatagagtatttctctggtccaggagattatgcagaacgtatggttcgcttatttggtatgaggtctaataaagcattaagtctatttaatcaagttgtgggtattaagtatgttgaagacttagacctattctttagaaactatatgcttgaggataaagatgtaaatagccatattgaatacaaagaacttattgggagtttcaatgaactaactaaagcaagaaatgatattgaaaaagctgaagaacaaatatttcagttaaaaccgattacagaatatgcagaaaaaatcaaaactacgtccagtgaattgaaagatttagaaatttcaaaacatacctctgcttattggttctctgcaaaaggtaaagaattgagcgaaaaagaatatgctcgtcttgaaaaggtaattgagaacatagaatcaaaaattaaaatcattgatgcagaaattaatggactaagagataaggaagcagagctgaaagtagatataaaaagtagtgaagcaggacgacagacagaagcattagaaaaggaaataaaagaactaaacataaaacttcaggaacgctcaaaagcactaactaaatataatgctcttgctcaaagtttaagctttacagaaaatccaagcgaaaaagtcatagcagaaaaagaagcagcattagtaaagaaaactggctgtgagacaaaagataaggaactcaataaatgtataagaaatgaagaaaacaaaagagaagaatctcgtaaaaatattgagaccacaaaagttagtatctctactttaatcaagaacgataataatatacctacgagtgtcgcaagaatacgagaagatattttagaagctgttggcgctaataagaatgaaataccctttattggagaattaattaaagttgatgaaaatagccaagactgggaatttggaatagaaaaattgctccatagttttgcgctaagaataatcgttccagagaaatattataaggcagttaataaatatgtaaatagtacaaatctaaatggtaagatattttactatcgctataaagaaaccgatacactattagaaaatagaatagaagacagcgaaaaaactgtttatagtaaattgaattttaagccagactctaattataaaaattgggtacaagaacaaatatttgagcagtttaatttttactgcgcagatgatttactggattttgaaaactcaaaaagagcacttaccaaagaaggcctcataaattttggaagaggaagacatcaaaaagatgatcgtaagtcttttggtaatcgatcaagctatgttttgggatgggacaataaagctaaaataaaaagtcttagagagcttctcacaattttgaccgatgatgaaaccaatgctatcaaagaaataggaaaattagaaaacaaaattgagctcaataaaaatcaaagagataactattataattttatcaatctctttgaaaattttgatagtatcaattggggggaaatatgctaa

SEQ ID NO: 44931 - DNA, 1443 bp, Acidihalobacter prosperus
gtgcttttcgacgataccagaaggcatttcttccgcccgctcaacggcaaataccgggggcaggtggccgactgcctgatcctgctctacacgcgcctgtatggcgcctacgcggattacagccggcatttcatgcgcgagcaagtggtggaagtcctggaggaagccatcgcgcgcagtccggttttcgatgaggacgaggccgacgaatacacgcccggcgcccgtagcccgcgcgagcaggccaactggatactggcgctgctgctggagcatggctggctggaacgtcagatggacgaggtcacgctgcaggccagctacgcatttacgcgccatggccgcttgttcacgcagcccatgatcgatgccgccggcgggcgttttcgtacgcgacaccgcaacacgcgcaatacgcgcaacgccctgcagtcctttctcgacaagggcgaggcctacgacctgttggatgcatacgaatattccgagcgtatcgtcgcggatttctccgacgtgatcgccgaattggacgagcgcaggcgcgagctggtcagggaggtcgagtcgcagcagatcgtgcagcgcgcctccgacgagttcttcgatttcatggaaaaacgcttcatgcccgatgtcgcgatccgactctcggccgattcggtcgagaaataccgcgacgagatcgccgggctgatcgagcgcatcaagcgcaagcgccgcgaattcaaggaacaggcggaacacgaactgcggcgggcggcgccggagctgatcgaggcgcccggccgctcggtgctatatgccattctcgacggcatcgatgcgcgcatgcacaacgcctcgaccaccatgctgccggccctgcgccaggcgctcaatgggtttacccgccgggccgacatcatcatgcgtcagctcagctacgccggcggcggcgtgcaaaaccggctgctgcgcctgaccgagcgtttcagacaggccacgccggagcagcagtcgcaggcgctggccgtggccggcgaggcgttggccacgcttgcggtcggattcgtcgtcggcgatgccgtgcgcctgcatgcggcgcgtcgcccgcgcgtcgtcaacgcccgtgtggaggcggtgccgatgcacgacgcgacgacgcggcgcgagctgttcctgcagtccgcgctcgatcaggcctttgccttcaacagccgtgcgcagcgggaatacgtgctggccgcgctgcgcgacggtcaccgcgtgcacagccagaacctgcccgtgcgcgatgccagggacttgctgatgagcgcccatgccattgaaatcggcgccttgtcgaccagcgaattcgcggtcagggttacgcccacccggcagcgcgtgacgaccgactacttcgaagcgaccgacgaattcacgctcgaactgaccactccccaggaccatgctgactga

SEQ ID NO: 44932 - DNA, 600 bp, Acidihalobacter prosperus
ctgtgcctgcggctgctcaactatggcgtcctctgtcgcgacgaaagccagatcgaacagcagctgtacgatcgctacctgcgtgtggccgaatgggtggacgattatctttcggtggtcggcgtgcgggtgtttcacgaccgccgcttcgcctacctgcggctctatccccccggcagccggatgccaggcgtggaggaggcatcggaggaggcgttcgcaggcggtctgcgcgcgcgtctgcgccaggacgaggttgccctgttgctggtgctgcggcagcagtacgacaaggccctgcgcgaagggcagctcgacgatggcggctacgtgaccgagtcgatcgaatccctcggcatcgccctgcgcaaccaactggggcgcatgctgccggagaggcttaccgatcgcaaacgggtgttcgagcggctgcgccggctgcgcctgatccagtatcgtcaggaagacgacctcgataccggcgaagcgggtctgcgcattcatccgatgatcaccgccttcgtcaccgacgaggccctgatcgccctggaagacgcgttgccggccgaagcgccgccggaggaagacgatgtttcttaa

SEQ ID NO: 44933 - DNA, 1560 bp, Acidihalobacter prosperus
atgtttcttaagcgtttcgtcttcatcaattggggtaacatcccgagcatcgacttcgagttcggcccgctcaatctgttctccggcggcaacggctcgggcaagaccacggcggccgacgcgatccagacggtgatgaccgccgcccacgaaagcctgttccagtacaaccccggccaggacgaaaccacccagcgcgggcgtgggggcaagcgcgtgcgcacgctcgcctcctatgtgctcggttgcgacgacggcagttatgcgcgcctggaccccaccgatggctacgttgccgccgtgttccaaccgaacgagggcgaaccggccgagccgttcaccgctgtcatcggcgtgcgcgcctggctggatatcgccggcggcaacacggtggcacgccaggacgacgcgcagtacttcattgtccccggtgccgaactcgcgctcggcgatttcgtgcgcgaggaggaatccggccgttacgtggtggcgctcagcgaactccagaccgagctgatccggatgttgggcaagcggcgcgtcgaacgatacgacgccaagaaagcctatttgcgccgcctttacggtgccctgcgcggcaagcccgattccgttaccgaaacggaagcggtggccgccgcgcgcgccttttcgcgcttcatggcctacaagccggtcaaaagcatcgaccgtttcgtggccgaggaaatcctcgaacccaaggatctcggagaagcgatccgctcggtctccagccagctcaagaccatccacggcatggagcgcgacgcgtcgaggctgctggcctcgatcgacacgctcgcccgtgccaacgctcacgcacaggcctatatcgaccactggatcgacctcaacctgctcgattacacgctcgcccaggccgaatacggcctgcgccagcaggactacctgcgtggcaaggcgctgcagcgagaacagcgcgcggaacaggccgaactcgaggcgcgtctcgcgaccgttcaaacccagacggtcggcgtacagcgccagctgatcgaactggaagcccagcgccagggtgtcgacgcgctgcgtcagaaggacgaaatcgagcgccagtcgcaggcactcggcgaggccttggtcgaaggcgcccaccggctggtcgagcaggatcggacggttgcggcgaatgtggaggccacgcgcacgatcctgcgcgcgctggacgatccatccgtggccgagacgttgcccgggccgtccgcttcggaggcacaggcgctcggacgggcggtggtcgagaccgcaggcgagatgctggcggacgtccatgcgctggtgcagcgcgacatcgccggtggcggcgcggggttggaacagcgcctggaggcgctgctggcggtgcagcgggcacataatcgctggcacgcgctgtggcacgcggcacgcgaatccgggagcgcgcgcgatcgcttgatgaatctggcgcacgccgcgcgcgcccgctatggcgcgttggcgcatcaggcgacgagaaacggcgcgagatcgaacgcctcggcgcgaatctggtga

SEQ ID NO: 44934 - DNA, 1008 bp, Burkholderia pseudomallei; identical to SEQ ID NO: 44025

SEQ ID NO: 44935 - DNA, 672 bp, Burkholderia pseudomallei; identical to SEQ ID NO: 42091

SEQ ID NO: 44936 - DNA, 3633 bp, Burkholderia pseudomallei; identical to SEQ ID NO: 42299

SEQ ID NO: 44937 - DNA, 1134 bp, Burkholderia pseudomallei; identical to SEQ ID NO: 44028

SEQ ID NO: 44938 - DNA, 1008 bp, Burkholderia pseudomallei; identical to SEQ ID NO: 44263

SEQ ID NO: 44939 - DNA, 672 bp, Burkholderia pseudomallei; identical to SEQ ID NO: 42091

SEQ ID NO: 44940 - DNA, 3633 bp, Burkholderia pseudomallei; identical to SEQ ID NO: 42092

SEQ ID NO: 44941 - DNA, 1134 bp, Burkholderia pseudomallei; identical to SEQ ID NO: 44028

SEQ ID NO: 44942 - DNA, 1008 bp, Burkholderia pseudomallei HBPUB10303a; identical to SEQ ID NO: 44263

SEQ ID NO: 44943 - DNA, 672 bp, Burkholderia pseudomallei HBPUB10303a; identical to SEQ ID NO: 44291

SEQ ID NO: 44944 - DNA, 3633 bp, Burkholderia pseudomallei HBPUB10303a
atgaagctcgaccgcatcgttctggtcaactgggggcagttgcggccgggcgactatgaccttggaaacatgactcttcttaccggcccgacgggcgccggtaagtccactatgctcgatggcctccagaccatcatgactgccgcgtaccagggtatcgtcgcatacaaccctggccaagaagaggtacagcaggggcaacgcagtgggaagtccaagcgcaccttggagtcatttgtcgtcggtgctgagtacagtcgtttctctcgacctcatggcgcgcacgggtatatggcggctgtgttccgccccgggcccgatgaggactcggccaagacctttacggcgctcgtcgccgcatcggcacaggtggatggcatcggggagcgcagggttccgaagctggagcgactcgaactggttatcgtagacgacgccgcgctgaccgttgacgattttctaaaggacgcggagcagagcgagtgggtggctgtcgaagaaatcgtcaagcgattgaaggctcggtattcgaaggtggtgacctatgacgggcataagcgagactacctttgcgcactctacgggcgcttccgggggcgcatctcgattacctgggatgaggcccagaacgctgcgaaggcttggtgccagtcaatagcttacaaaaaaattggctcggtccacgacctcgttcgcgatgacattctggagtatgacggcaagcagttgcaggagagcatcactcgcatcagcgacctgatgcgccaagtcacgaacctgaagcaagaagggcagcgactggaagcgactgttgggcggttgcgagggttgaagactgctatcgcgcaaacgacgtcggcgtttgaagagcaagtccagtatgacttgctgctggccaagatgctggtggcggcggacgacgaacgtatcgcccaagagcagaaacgcatcaacgatgactcggcactggtaacgcggtgcgagcaaaaggtaaaagccgaggagcgactgaaggcaggcgtggaccggagccgcatcgacattgcagcgaagctcagtggaatcgccgccaacgccgagaaagagcgcctggaccagcagctcgagctcgccaattccgcagctcggcacaaactggctgagctcaatactgggcttcaagaggccgcccaaatcgtcaatgcggctaccggtttgttgcggaagcccattccggagcagttccccaagctcaaggcgtcggttgacgcggtcggtcgagttacagcatcgactgacgttgctcgcttggacggtctgttgggcgctgtcctcgatgcctcaagtgatgcgcagcttaacgtcgagaagctgttccgattgacccctgcattcgatggtgtggaagagggactcgccgcgctgcactcatatctagtggggaccgaagatagtgtcttgatggctgttgcgtccgagacgtcggaattgacgcaacgtgtcgaagccactcgcaaggcgcgcaaggaattggctgaccgcaaggagctgttggcgagcggcgctagcgattacaaccgcgacactcgcatggcgcttcctcgcatccgagagtgtctgcccgaagctggtgtccaagttctctgcgacctcgtcgaacctgtgtcggatgaatggcaggaggccatcgaagggtacttggacaatgcccgcttcaatctcattgtgaagcctgagtgggaagcacgaactatcgatttgcttcactcatggggctcgcgctgtaaggtcatccagggtaaacgatgtcttcagcgtgccgatgccggtcgtgtgccatctgactctatcatccatgagctccgcacggaccatcccattgcacgtgcgtatctcatcgagcagtatggcgccgtcgtcaaggtcagggactccgagcaactgcgcgataccgcgcgtgggttgaccaaggacggcaaaggaagcggttctcgcactatgtttgttggtgagcggcgggaccttgttcttgggcgcaaagctcgcgagcaggcgctgcgggctaccatcgagaaactcgatgcggcagaccgaggaattcgagagttcgagcaactgcaggatacgctgtcgagcgttaaacggcttcttggcaacctgcgtgaacccgtattcgatgcgatgccgcttggccaagcagcgggcgaaatcgacagcactcggcgctcgcttgcgcaactggacctcaccgaggtggaacagttgcgggcggagcgagcgaagctggaactgctcatcgcagggcacgatgcggaaattaccgcggtaaacaaagagattaccctggcgagtcagcgtatcacggacgcccaaggcgccattgagcgcatcaatggaggccgagacgcgcgatttcgggagcgtgaagaccagattcgtcggctcgggcagatgtgcgaaacaaactcagagaaaacctacacggttattgccgaggaagtagagggcttgctcaaatcccggaggtttgacgtgcactccgttcaggtgcggctcaacacgctgcgcgcgcagccggacaaattgctgggcgatgtgcgggaaatgctcgcggagtacaacgcgaacgcgcgccaagaggagcgcttccagtcagcgctgcctcatcttcacgacgccaccatgttcgacccgtactatggcccccttgttgcgctcggccgcgcggtgggtgcactccacagcgagcttgagggcattggcctctacaacaatcgggccaaggtggaagaagcggagcgctctttccatgacgtgttcaccaagcagttttgcgtcgaaatcaaaagcaaggtggatgatggcgtccgactgctacggcaacttaatatggagttggaaaggcttaagttcggcacggaccgcttcagcatcgactggtcgaagtgggagccggagttccaggagtactacagcttcttctcggccgtcaccgaccttgcggactcagtcgaaacggtcgacctcttcggagagacggagctcacgccaaagcacgtagaggtacgcgaccgcctggtgaagctcctgctcgactcagaccaagagagagcggggcgggagctattgcgcattgccgactatcgaaactacaggcgctacgaaatttggaatgattcagacagtggggggcgcatcgcgctttcgacatggggcacggggtctggtgggcagcttgagacgccggcttacatagttcgcgcggccgtggtgacgaaccggctaaagttcttcgagaagggacccagcctgaagatgctcgttagtgacgagtcgttctcgacgatggatgaacctcgcgctcgggccgtgctgcagtacctacgcgaaagcctcgatattcaggtcatcagtgcgatgccgacacgaggcgctggtggcttacggccagagttcgaccgggagtacagctatagccgggttcctgttgacgctaacggcgaactcgacttcatcctcgaatacgacgagcgcatcttcaagaaggacaagatgcgagagctctgggaaaagcagcgggcggcggcccgtgcgcaggccgagctggcgtttggcgccgccgaggccgcacagcaggcggaggcgcttaaatga

SEQ ID NO: 44945 - DNA, 1134 bp, Burkholderia pseudomallei HBPUB10303a
atgagtggcgcgtctctttggctgaagtccatgccagtgcaagaattgctcaacatgcttgttgaccgattggacgcggccgagcagagaggaagcactaaagcgaaatcagtccagctcgacgagcgcacttggccagcgctctacatgtcgccagtggagtcgcagaaggaacacctttgggagcatgtcgtcgcgatggtgcgatgcggatggctagctgtgaagccagaaaccgcgctcaaaagtcggtccggttacgcatcatcgccgcgtgtgagtgtggtcgaccagcgagaactgcgtgcggcggtcggccggcaggaaagggtgaagtcgtccgctgagcgctggcgcgacgccgtgtcgtctggcttactagcaagcgatacggtaaagcgacttgtctcagagtattgcatcgatatccccggtcgcacgatgacggaggtcgtggagcagttgaaccggcttccggcgctggccgagaaatcgatgctgctgcgcgaggtgtcatcgcagttattctgggggatgtccaaggtcctcgacaagcgccaaggattggttgcggccattctaggtatggacgattgcccattcccagagtctcccatccaattgcacgtgttcttgcctgccggcggccatcgtggagtgctcttcattgagaattcggtgagcttcgaatgcgcaatgcgcgagccccgcggagtgttcggtgagttggctttggtctacgcgtccggctttaaagggagtgcgcagcggctgcgcaccacggaggggtgctcgctgttttacgcggcaggcggcggtctcgaacgggacttgcgtgcaacgtttgaaggttggttgttcggccggcaagagataccgtcgtacttttggggcgacctcgacttcgcgggaatgcgcatactcgcggctatgcgggcgaccttttcggggctgacagcctgggtgccgggttatgcgccgatgctaaccgtgctaaagggtggcggagggcacccccctgaggccgccgacaaacaagggcagaagccaatcgcatcgacagggtgcgagtacgccgatgagcaactaatgccagccctgcagaccttccggcgtttcgtagaccaggaatag

SEQ ID NO: 44946 - DNA, 1008 bp, Burkholderia pseudomallei HBPUB10134a; identical to SEQ ID NO: 44263

SEQ ID NO: 44947 - DNA, 672 bp, Burkholderia pseudomallei HBPUB10134a; identical to SEQ ID NO: 42091

SEQ ID NO: 44948 - DNA, 3633 bp, Burkholderia pseudomallei HBPUB10134a
atgaagctcgaccgcatcgttctggtcaactgggggcagttgcggccgggcgactatgaccttggaaacatgactcttcttaccggcccgacgggcgccggtaagtccactatgctcgatggcctccagaccatcatgactgccgcgtaccagggtatcgtcgcatacaaccctggccaagaagaggtacagcaggggcaacgcagtgggaagtccaagcgcaccttggagtcatttgtcgtcggtgctgagtacagtcgtttctctcgacctcatggcgcgcacgggtatatggcggctgtgttccgccccgggcccgatgaggactcggccaagacctttacggcgctcgtcgccgcatcggcacaggtggatggcatcggggagcgcagggttccgaagctggagcgactcgaactggttatcgtagacgacgccgcgctgaccgttgacgattttctaaaggacgcggagcagagcgagtgggtggctgtcgaagaaatcgtcaagcgattgaaggctcggtattcgaaggtggtgacctatgacgggcataagcgagactacctttgcgcactctacgggcgcttccgggggcgcatctcgattacctgggatgaggcccagaacgctgcgaaggcttggtgccagtcaatagcttacaaaaaaattggctcggtccacgacctcgttcgcgatgacattctggagtatgacggcaagcagttgcaggagagcatcactcgcatcagcgacctgatgcgccaagtcacgaacctgaagcaagaagggcagcgactggaagcgactgttgggcggttgcgagggttgaagactgctatcgcgcaaacgacgtcggcgtttgaagagcaagtccagtatgacttgctgctggccaagatgctggtggcggcggacgacgaacgtatcgcccaagagcagaaacgcatcaacgatgactcggcactggtaacgcggtgcgagcaaaaggtaaaagccgaggagcgactgaaggcaggcgtggaccggagccgcatcgacattgcagcgaagctcagtggaatcgccgccaacgccgagaaagagcgcctggaccagcagctcgagctcgccaattccgcagctcggcacaaactggctgagctcaatactgggcttcaagaggccgcccaaatcgtcaatgcggctaccggtttgttgcggaagcccattccggagcagttccccaagctcaaggcgtcggttgacgcggtcggtcgagttacagcatcgactgacgttgctcgcttggacggtctgttgggcgctgtcctcgatgcctcaagtgatgcgcagcttaacgtcgagaagctgttccgattgacccctgcattcgctggtgtggaagagggactcgccgcgctgcactcatatctagtggggaccgaagatagtgtcttgatggctgttgcgtccgagacgtcggaattgacgcaacgtgtcgaagccactcgcaaggcgcgcaaggaattggctgaccgcaaggagctgttggcgagcggcgctagcgattacaaccgcgacactcgcatggcgcttcctcgcatccgagagtgtctgcccgaagctggtgtccaagttctctgcgacctcgtcgaacctgtgtcggatgaatggcaggaggccatcgaagggtacttggacaatgcccgcttcaatctcattgtgaagcctgagtgggaagcacgaactatcgatttgcttcactcatggggctcgcgctgtaaggtcatccagggtaaacgatgtcttcagcgtgccgatgccggtcgtgtgccatctgactctatcatccatgagctccgcactgaccatcccattgcacgtgcgtatctcatcgagcagtatggcgccgtcgtcaaggtcagggactccgagcaactgcgcgataccgcgcgtgggttgaccaaggacggcaaaggaagcggttctcgcactatgtttgttggtgagcggcgggaccttgttcttgggcgcaaagctcgcgagcaggcgctgcgggctaccatcgagaaactcgatgcggcagaccgaggaattcgagagttcgagcaactgcaggatacgctgtcgagcgttaaacggcttcttggcaacctgcgtgaacccgtattcgatgcgatgccgcttggccaagcagcgggcgaaatcgacagcactcggcgctcgcttgcgcagctggacctcaccgaggtggaacagttgcgggcggagcgagcgaagctggaactgctcatcgcagggcacgatgcggaaattaccgcggtaaacaaagagattaccctggcgagtcagcgtatcacggacgcccaaggcgccattgagcgcatcaatggaggccgagacgcgcgatttcgggagcgtgaagaccagattcgtcggctcgggcagatgtgcgaaacaaactcagagaaaacctacacggttattgccgaggaagtagagggcttgctcaaatcccggaggtttgacgtgcactccgttcaggtgcggctcaacacgctgcgcgcgcagccggacaaattgctgggcgatgtgcgggaaatgctcgcggagtacaacgcgaacgcgcgccaagaggagcgcttccagtcagcgctgcctcatcttcacgacgccaccatgttcgacccgtactatggcccccttgttgcgctcggccgcgcggtgggtgcactccacagcgagcttgagggcattggcctctacaacaatcgggccaaggtggaagaagcggagcgctctttccatgacgtgttcaccaagcagttttgcgtcgaaatcaaaagcaaggtggatgatggcgtccgactgctacggcaacttaatatggagttggaaaggcttaagttcggcacggaccgcttcagcatcgactggtcgaagtgggagccggagttccaggagtactacagcttcttctcggccgtcaccgaccttgcggactcagtcgaaacggtcgacctcttcggagagacggagctcacgccaaagcacgtagaggtacgcgaccgcctggtgaagctcctgctcgactcagaccaagagagagcggggcgggagctattgcgcattgccgactatcgaaactacaggcgctacgaaatttggaatgattcagacagtggggggcgcatcgcgctttcgacatggggcacggggtctggtgggcagcttgagacgccggcttacatagttcgcgcggccgtggtgacgaaccggctaaagttcttcgagaagggacccagcctgaagatgctcgttagtgacgagtcgttctcgacgatggatgaacctcgcgctcgggccgtgctgcagtacctacgcgaaagcctcgatattcaggtcatcagtgcgatgccgacacgaggcgctggtggcttacggtcagagttcgaccgggagtacagctatagccgggttcctgttgacgctaacggcgaactcgacttcatcctcgaatacgacgagcgcatcttcaagaaggacaagatgcgagagctctgggaaaagcagcgggcggcggcccgtgcgcaggccgagctggcgtttggcgccgccgaggccgcacagcaggcggaggcgcttaaatga

SEQ ID NO: 44949 - DNA, 1134 bp, Burkholderia pseudomallei HBPUB10134a; identical to SEQ ID NO: 44028

SEQ ID NO: 44950 - DNA, 1008 bp, Burkholderia pseudomallei MSHR5858; identical to SEQ ID NO: 44263

SEQ ID NO: 44951 - DNA, 672 bp, Burkholderia pseudomallei MSHR5858; identical to SEQ ID NO: 44291

SEQ ID NO: 44952 - DNA, 3633 bp, Burkholderia pseudomallei MSHR5858; identical to SEQ ID NO: 44944

SEQ ID NO: 44953 - DNA, 1134 bp, Burkholderia pseudomallei MSHR5858; identical to SEQ ID NO: 44945

SEQ ID NO: 44954 - DNA, 1473 bp, Burkholderia xenovorans LB400; identical to SEQ ID NO: 41729

SEQ ID NO: 44955 - DNA, 834 bp, Burkholderia xenovorans LB400
atgagcttcgagagtgaacaatcggcggcaagtcggccaccattttttcctggctcatcccggagcccgggatcgtccgaagagatgcctgcgaacctgccgtcgaatgttgcccactggctggatacggcagacaacgacgagcctgcgaagcccgccgccccaccatcgacgctgctgttcaacggggacaccggcaatctacggctggacacgcgccggtgcctggtcagtctgctgaacggccccagcgtagatggccgacggcaagccgggttgtggtcagtgctgctgcgagaccgcgaggtcatccagacctacctccacaacatcttcttggacctagtcgtcgacatcgcccagcaggtcgcttttgtacgccaggtaccggacgagagcgagacggacatccccatcttgcttcgccgccaccaactgacgctggttgagtcggccctggtgctgttcctacgccagcgcctgaccgaggcggactcagccaacgaacgcgcggtggtgtccaccgaggagatggtcgagcacctctcgctcttcgaccaggctcgcaataccgacctcgcgcgcttcgaccgacagtgcgacggcgccatcaaaaagtgcaaggcgctcaacctcatccgccccattcgctcaagcgccacgcgtttcgaggtctcaccgacgctaaagctgctgttcaatgccgaggacatccaggccctgaccgccgcgtacgaggcgctcaagagcgcacctggtggcaccagtgagttgaccatggaccaggccatcgccgaaggcgagcgtgaggccgacgaagacgaagatgagtga

SEQ ID NO: 44956 - DNA, 3414 bp, Burkholderia xenovorans LB400; identical to SEQ ID NO: 41731

SEQ ID NO: 44957 - DNA, 1290 bp, Burkholderia xenovorans LB400; identical to SEQ ID NO: 41732

SEQ ID NO: 44958 - DNA, 1323 bp, Pseudomonas aeruginosa
atgctggctgcttatgccagccaggatctttacgagatcgacccggatgcaacgcacatccaggcaggtcgtgaactccgtgaatggatcaagcggcgccttgttgtagagcgagagggccgcatctatgcaaccgacgcgctggagtccgccatacagttcgtcgactcgttggatagtcgtatcatgacctccacggcctctcgcctttcggtggtccagcgcgagattgaaaacctggaaacgggtctgaaccccagcccaagtggccgtattgccagcctgcgccgccgaatccaggacttggagcacgagctagcgcaggtagaagctggccacgtcgtcgtgctggacgaagctcaggcgatagagggtatacgcgaggtatataacctggccaccagcctgcgcgcagactttcgacgagttgaagactcttggcgcgaagctgatcgcgccttgcggcaatccatcatcagcgagcagtctcaccgtggagaaatcgtcgatcggttgctggacggtcaagatgcgttactcaacacaccggaaggacgtgtcttcgaaagtttccagcagcaactgaggcagtccgccgagctggaagtcatgcgtgagcgcttgcgtaccatccttcgtcatccagcggttccgaaggcactgaatcgtccccagcaacgtgagctgcgttggctggcgttacgcttggttcgggagtcgcaggctgtgcttcaggcgcgtgcccgaagcgagcgcgatgtacgtggcttcatgaagacgggcctggccgccgagcatcatcgcgtcggacagttactcaacgatttcttcaatctagcgctcagcgtcgactggcaacgccaggccgtgcgtcgtagcactgtccgtttgccgccggttggcgtagccattaccggagtcccagcgattgagcgtctacgtttcaagaccctggatgacgatgacacgggcgagctggatctgagtctgaagccagcggggctggaacagattgacgatgacttctgggatgctttcgacgggttggatcgcgaagcgctgattcatgacaccctggcggtgctggtggagcaggggcgacctgtgagtctcggggagcttgcgtctttgcttccacctgctcacgacctggaaacctttgcgctctggttggctatggcgcgcgaggcaggtattgaggtgctgacagaggagcgtcagctcgtggagctagttgacgaggatgagcaacgctggcgcttcaatctgccttatgtcggactcgaccacgaggcactcaaggacatcggttgggagttgtga

SEQ ID NO: 44959 - DNA, 750 bp, Pseudomonas aeruginosa; identical to SEQ ID NO: 43742

SEQ ID NO: 44960 - DNA, 3306 bp, Pseudomonas aeruginosa; identical to SEQ ID NO: 43743

SEQ ID NO: 44961 - DNA, 1455 bp, Alcanivorax sp. 19-m-6
atgtttttcagcgacgagcgcgcccaattcttcaagcccctcaccggcaagtaccgcgaacaggtggtcgaatgcctgcgcctgctgcacgagcggctgtacagcgccaaggcggattacggcgaatcgctcaagcgcgaccaggtgctggatgtgttcagcgaagccctggaacgggcgccgctgctggacggcgacgaagacggcggccgctttcgcaataaccgcgaacaggccggctggatcctcaacctgctggtggagcatggctggctgaagcgggacaaggacgaggcctccttccagtccacctacccgttcagccgcaccggccgcctgttcacccagaccctggccgaagtggacgggcgcagcgtgcgcacccgccaccgcaacacccgcaacaccctcaatgccctggccgccttcgtggatcgcggcgaggtctacgacctgctcgacgcccacgaacattccgagcgcatcatcgccgacttcaccgacatcatcgccgagctggaagaacgaaaacgggaactggtgaaagaggtggaatcacaacaactggtccagcaggccagcgaccagttcttcgacttcatggagaaacgcttccaaccagacgtggccatccgcatgtccgcggacagcgtggaaaagcaccgcgaccgcattcagaacaccatcgaacagatcaaacgcaaaccgaaagcctggaaaggcaatgccgaaaacgaactgcgccggctcgccccggacctgatcgtcagccaggatgcctcggtactgttccagctgctggacagcatcgagatgcgcatgcgcaacgcctcggaaatcatgctgccggccctgcgccgcaccctgcagggcttcacccgccgcgccgacatcatcatccgccagctcagctacctgcacagccagaagcacaacgatatcgtcggcctgtgcaaggaactgtccgagctggatgaagccacttacaacgaacgactgcagcaggccggcgatgccctcgccagcctgcacctgggctttgtggaccccgcccaggtccgcctgcgcgaacagcgcagccagcgcgtggtgcacagccgcatggtggaactggatgacccggatgccgacaccctgcgcgaactggctacccagcaattgctggaaaaggccttcaacatcaatggtggcgccctgcgcgattacctgcgcgatgccctcggcgccagccgccgcatcgacaaccgcgacctgcccatcaacaacgcccgcgacctgctggccctgagccacgtgatcgaactgggcagcgccgaccacgccgccaacggcttccgcctgcgcattacccccaccgaccccatcaccgacgaacactactttgtgcgacgtgatggtttcctgctggaactggagcacgatgagccaagcaccgctacaacacgccctgagtga

SEQ ID NO: 44962 - DNA, 699 bp, Alcanivorax sp. 19-m-6
atgagccaagcaccgctacaacacgccctgagtgaagccctcaacgcccgtggcgtcactcaggcgcaattctcggaactgatgatccgcctgctggatcacggcgtgctgtgccgcagcgaaagcaaaaaggaagcggaactctacgaccgctacctgcagattcccgaactggtggaagactacctgagcgtgctgcacatccgcctgcatcatgaacgccgcttcacctccctgcgcctgttcccgcccggcgccgagatccccggcgaagcggacagcgacgacggcttcaacagcggcctgcgcaaccgcctcagccagcaggaagtggccctgatcctggtgctgcgcgccgaatacgacaaatccctgcgtgacggccagatcgacgaacacggccaggccaccctgcccctggaagccatcaacctggccagcaaaaacctgctcggtcgcccgctcccggaaggccgcaccgaacgcgacgccctgttccgccgcatgcgccaactacgcctgatccgcagcgacggcgacaacagcctggaagacaacgaaacctggctcaccatccgcccggacatcaccagcctggtcaccgacaccgtcctctcccaactcctcggcgaaggcgcacgcccagccagcaacgacgacgccgaagagccctcagaaaaagacgagggcgaacaatga

SEQ ID NO: 44963 - DNA, 3654 bp, Alcanivorax sp. 19-m-6
atgtatttaaaacgctccatcaccgtcaactggggcaacctgccccccggcgaactggaatacggcccggtgaacctgttctccggcggcaacggctccggcaagaccaccgccgccgacgccctgcaaaccctgatgaccgccgcccacgacaacctgttcaactacaacccggggcaggacgaaaccacccagcgcggccgcggcggcaaacaggtacgcaccctggcctcctatgtgctcggctgtgacgacggcgcctacgcccgcccgtatgacagcgacggctacatcgccggggtcttccaccccaccaagggcgaaaccgccgaacccttcaccgccgtcatcggcgtgcgcgcccacctggacaaggccggcagcaccagccaggcccggcagcaggaactgctgctgatgatcgtccccggcgaaatgctcaacctgtcccacttcgtacgcgaatacggcggcgaaaaagccacggtgccgatcaccgagatcgccaaccagctgcgccagcagttcggcaaaaaaaacgtggaaacctacgacaagaaaggccagtacctggcgcgcctgtacggtgccctgcgcggcaaacgcgatgccgtctcccaacaggaagccaagaacgccgcccgaaccttcgcccggttcatggcctacaaaccggtggaatccatcaaccagtttgtcgccagcgaagtgctcgaaccccacgacatgggcgacaccctgcgccgcatccgcgatctcatgcgcaccgtccacggcatggccgaagaagccgaacaacttcagcagaacgtgaacctgctcgcccaggcacagagccacaccgacacctacctggacacctggctggaacgcaccacccaggcctacggcgccgccgctcaacaatttcagcgcaaccagaaacaatatctggaaaagaaagaagagcagaacagccttagacaacagcaggaaggcaaccgcgaagaagccgaacaggtacagcagcgcctcgaccaggctcacgcggaactggtggagctgcaagcgcgcatcctcggcatccctgccctgcgcgacaaacagcaactggaaaagcagctggccgacctgacccaacaactccagcaaggcgctcgcccgctccttgaacaagatcagcaacgcaacaaaaacctggaagccctgcgcaacatccagggcctgctggcccgccacagcatcgaactggaactgcccagcttcgccagcaaacactggcgcaacaccagcaaggcgctgctcaccgaacagagcaacgctctgccggacctgaaccagatgctggcgcgggactggatcgacctgtccccactggaagacggcctcacccgggtgcgcagcgaacagcagctgcacaaccagctggccgaacaactgcacagcgaacgggaagacaaacccggccaggaagcactctccgttgcccagcgactggaccgcatcgtcaacaagcgcggccaggccctggaaaccctggaccagcagcaaaagaaaatcgaacaacagatccgcaacctggaatccaaacgggtgaactacccgcaggatgtggagatcgccatccacgccatccgccaggaatgtccccaggcagaaccgcgcgtgctatgcgatcacgtggaagtgcaggacccggactggcagatggccatcgaaggctacatcggcggcgcccgcttcggcattctggtggaacccgaccatgaagccgaagccatccgcatcgtccgccgactcagcggcaaacaacgcaaccgcgcccgcgtgattcaaggcgaacaggcccgccgcgatgcagaacgggtgcagttgcccgacgactccctgttccacgccctgcgcttcagccaccgtaccgccgagcactacctgaaagcctcctacggcagcgtggtgtgtgtggaagacgccgaagcgctacgccgcacccgacgcggcatcaccgccgatggcctcggctccggcggttacgccatgttccgctgcgacctgcccgatagcgatctggtattcggcgaagccgcccgcgaacgcaacctgcacgcccagcgcaacgcgctcatggaactgcaggataactaccagcgcgccgctgacgattatcagtccgtgcgccaactgcacacccaggtcaaagccttccagcccctgcactgggtcaacgccgccacgcaattgctcgacgcccagcgccagctacaggaaaacgaaaaggccctggccaccctggacctgagcgatcacgaagcactggaagaaaagcagcaacaggccaagaccctgcatcaggaactggaagccaaacagaagcagctcaccgaagagaacggcaagctcagcgaaaaactcagcgcctgccgcaagatcatcagcaccctggccgaccagagcgaacgctttcaggaagcccaggaagaagccgaagccaacctgcacggctgcacaaaatactggccggggctcgatgtggaaccgcgcatcgaagccatggatgagcggctgcaaaacgcccacggcgacatcgactttattgccgaagaagaagcgctcaccgggcagctcagcagaaccttcattgcactggaaaaaaccctggaccactacaaccaacaggcccagcccgccgaccagatcctggcagacagcgccgacgccctgcacagcgccccgttcttcggccatgtgcaaagcctgcaccagcaactggacaacctgcacaaccgcctgcgcaacaacgtgctgctggaaaagcaggaaaaactcaccagcctgcgcgacaccttcaacaccaccttcgtcagcgacctgtgcagccagatccaccaggccatccaggacggcgaacgtatcctcaagagcctcaacagcgaactggaacaccaccagttcggcgccgaccgcgagcgctttgaattcgactggcagtggataccggaatacaaggaatactggaacttcttcaaggaagtcatcgacattcccaacctgggcgacggcaccagcctgttcgacacccccctgtccgccaaggccgaagcggtgcgcgaccgcctgctcaacctgctgctggacggcgacgaacaacaggcccttcgcgaactggaacggatcagcgactaccgccgctaccgccagtacgacatcctcaaacacccgcagggcaaacagcccatcagcctcagccagtacggcaccggctccggcgggcaactggaaaccccggcctacatcatccgcgccgccgccatcaccagcgccttccgcttcaacgaaggcgacagccacctgcgcatggtcatcgtcgacgaagccttcatgcacatggacgaaagccgctccaagagcgtcatcaactacctcaccaacaccctgggcctacaactcatcttcatcatgcccaccagcaaggccggccccttcctggacctgatcagcaaccagttcgtattcagcaaagtccccagccccatggccgtgggcgaactcaacacccgggtgctggtagacagacaacaactcaaccaggaacgcatcagtgaactgtgggagcaacacagaagagtgattcgccagcaaggggcactggacttcatggatgagatcagcccatga

SEQ ID NO: 44964 - DNA, 1116 bp, Alcanivorax sp. 19-m-6
atgaccacgcccatctggctcaaggacgagccctggctggccaagtggctaggctggtttctggacaagctggataaccgtgatggcgagccatcccagcgcgccatcacccgccgtatcaagaaaagcactctgccggcactctacgacttcaacgaagacacccaaggccgctggcaactgctacaacacatcgcccgcgagcaccgcatattcgagatcgttctcgacaacaaacgcagcgccttccaggaaccctacgaaaacgcccagtgccgcctgaacccggactgcgaagcactactaagagaatggctgaaccgcccccaacaagacccgctggcacaggcatggcaacaggccatcaacgagcacgccgccaccttcaccgacaacggcgaagccctgctaaaccaaaagccacagattcccggcctcaccccggcagagatcgtcagcgccttcgccagcgtcgagccctaccttaaccagaacttaaccctgcgagaaatcgccgcccgctgtttcaacggcgactcaaagacgctggacaaccgctttgagctactgctcaaactctaccgcgacaacgccaacggcatccaaccccggccactgctcctcaccgcctgggcgccacccggcttcactaaactactcatcgtcgaaaaccaggacagcttcctccgcctggtcgaaaacccacccgaagactacgccctgctctatagcggcggcttccgcgccagcgccacccgcctgagcagcgaacacacccgcttcgccttcctccccggcagcgacccgaagcggttcaaacaacgctggctggataaacgaacgcaatgctacttctggggcgacctggacttcgccggcatgggcatcctgaaagcattaagaaacagcctccccaacctgcaagcctggcaaccgggctaccaacccatgctggaaatcctcaataccggcggcggccacaccccacaacaaaccggcaaaaccgcccaaaccgaccccggcaccaccggctgcccctacaccgacaccatcttgctccccgccctcaggcaacacggaaaatccgtagaccaggaagccatccacatccagtag

SEQ ID NO: 44965 - DNA, 948 bp, Burkholderia pseudomallei
ttggtggatgcctacgaatacgccgagaaggttatcgaggacctcgcggacggcatcgattactttcaagaactggtccggcacttgatgcaagccgcgtctgctcatacgcaatggaacgaattcgttgactttctcgacagattccagcgggactactccaagcaacttacagcggataacgcgacgctgaaccgccaagccattcggcaaaagcttgagaaactccgggccgttccggaggcgaagttcaatcgaatggatgcgcagttgcgcgatatcgcgcactggatggcgaaggagtacaccggaagctcgctctatgattggctgctcggtcgtattgaagacatcgtagacgcggcgtgcgagtctaagcagccgggctttctcaaggccatggagacttatctgaagcgtgtgaacggcctcgctttgcagtcgatgatgctacgctcggggcagactcggcatgcctacttagcagccgttcagaaagtggccgagtctcccaagttggaacaggaccgcttgctgaagcttgttggccagttcctcgcaccagcggaggtgcgcgtcctagacccagctagcttcaagctgaagactgcaacgcagcgccgcaaagcagtaaccgtgtctattcgaccgcgcccgacaagggaagagcggctcgctgcggcgatggcgcgagcagaggccgaagtgttctcaataccgaacgaggatgtcgcgcaggggctgcgtgcggacctgcgactcttccaacatccaatccgcgtttccgcaatgcctacggcaagtgcccgcgacgtcattcgcgcaatgcaagcggtggaagccgcgcgaagcgccatcggcggggacctcatcgtcaagaagctgccgacccgtttggagaatgagttctacggggccaacgactacgaaatcgacctgaaaaaatga

SEQ ID NO: 44966 - DNA, 672 bp, Burkholderia pseudomallei; identical to SEQ ID NO: 44291

SEQ ID NO: 44967 - DNA, 3633 bp, Burkholderia pseudomallei; identical to SEQ ID NO: 44292

SEQ ID NO: 44968 - DNA, 987 bp, Burkholderia pseudomallei
atgtcgccagtggagtcgcagaaggaacacctttgggagcatgtcgtcgcgatggtgcgatgcggatggctagctgtgaagccagaaaccgcgctcaaaagtcggtccggttacgcatcatcgccgcgtgtgagtgtggtcgaccagcgagaactgcgtgcggcggtcggccggcaggaaagggtgaagtcgtccgctgagcgctggcgcgacgccgtgtcgtctggcttactagcaagcgatacggtaaagcgacttgtctcagagtattgcatcgatatccccggtcgcacgatgacggaggtcgtggagcagttgaaccggcttccggcgctggccgagaaatcgatgctgctgcgcgaggtgtcatcgcagttattctgggggatgtccaaggtcctcgacaagcgccaaggattggttgcggccattctaggtatggacgattgcccattcccagagtctcccatccaattgcacgtgttcttgcctgccggcggccatcgtggagtgctcttcattgagaattcggtgagcttcgaatgcgcaatgcgcgagccccgcggagtgttcggtgagttggctttggtctacgcgtccggctttaaagggagtgcgcagcggttgcgcaccacggaggggtgctcgctgttttacgcggcaggcggcggtctcgaacgggacttgcgtgcaacgtttgaaggttggttgttcggccggcaagagataccgtcgtacttctggggcgacctcgacttcgcgggaatgcgcatactcgcggctatgcgggcgaccttttcggggctgacagcctgggtgccgggttatgcgccgatgctaaccgtgctaaagggtggcggagggcacccccctgaggccgccgacaaacaagggcagaagccaatcgcatcgacagggtgcgagtacgccgatgagcaactagtgccagccctgcagaccttccggcgtttcgtagaccaggaatag

SEQ ID NO: 44969 - DNA, 1161 bp, Burkholderia pseudomallei
atggtcattcgggcgctcgtcgcagacggttggctagagcagttcgctgaccggactggcttggttgcagcttttcgtttttcgcgtcccggcaagcttttttcggaggcgctttgggcattggaccgcccaagccgaagccggcagcgcaacatgcgcgggtgccgcaatgcgctcgaggctgcgttgtccgaacgaggcgacgcacatgacttggtggatgcctacgaatacgccgagaaggttatcgaggacctcgcggacggcatcgattactttcaagaactggtccggcacttgatgcaagccgcgtctgctcatacgcaatggaacgaattcgttgactttctcgacagattccagcgggactactccaagcaacttacagcggataacgcgacgctgaaccgccaagccattcggcaaaagcttgagaaactccgggccgttccggaggcgaagttcaatcgaatggatgcgcagttgcgcgatatcgctcactggatggcgaaggagtacaccggaagctcgctctatgattggctgctcggtcgtattgaagacatcgtagacgcggcgtgcgagtctaagcagccgggctttctcaaggccatggagacttatctgaagcgtgtgaacggcctcgctttgcagtcgatgatgctacgctcggggcagactcggcatgcctacttagcagccgttcagaaagtggccgagtctcccaagttggaacaggaccgcttgctgaagcttgttggccagttcctcgcaccagcggaggtgcgcgtcctagacccagctagcttcaagctgaagactgcaacgcagcgccgcaaagcagtaaccgtgtctattcgaccgcgcccgacaagggaagagcggctcgctgcggcgatggcgcgagcagaggccgaagtgttctcaataccgaacgaggatgtcgcgcaggggctgcgtgcggacctgcgactcttccaacatccaatccgcgtttccgcaatgcctacggcaagtgcccgcgacgtcattcgcgcaatgcaagcggtggaagccgcgcgaagcgccatcggcggggacctcatcgtcaagaagctgccgacccgtttggagaatgagttctacggggccaacgactacgaaatcgacctgaaaaaatga

SEQ ID NO: 44970 - DNA, 672 bp, Burkholderia pseudomallei; identical to SEQ ID NO: 44291

SEQ ID NO: 44971 - DNA, 3633 bp, Burkholderia pseudomallei
atgaagctcgaccgcatcgttctggtcaactgggggcagttgcggccgggcgactatgaccttggaaacatgactcttcttaccggcccgacgggcgccggtaagtccactatgctcgatggcctccagaccatcatgactgccgcgtaccagggtatcgtcgcatacaaccctggccaagaagaggtacagcaggggcaacgcagtgggaagtccaagcgcaccttggagtcatttgtcgtcggtgctgagtacagtcgtttctctcgacctcatggcgcgcacgggtatatggcggctgtgttccgccccgggcccgatgaggactcggccaagacctttacggcgctcgtcgccgcatcggcacaggtggatggcatcggggagcgcagggttccgaagctggagcgactcgaactggttatcgtagacgacgccgcgctgaccgttgacgattttctaaaggacgcggagcagagcgagtgggtggctgtcgaagaaatcgtcaagcgattgaaggctcggtattcgaaggtggtgacctatgacgggcataagcgagactacctttgcgcactctacgggcgcttccgggggcgcatctcgattacctgggatgaggcccagaacgctgcgaaggcttggtgccagtcaatagcttacaaaaaaattggctcggtccacgacctcgttcgcgatgacattctggagtatgacggcaagcagttgcaggagagcatcactcgcatcagcgacctgatgcgccaagtcacgaacctgaagcaagaagggcagcgactggaagcgactgttgggcggttgcgagggttgaagactgctatcgcgcaaacgacgtcggcgtttgaagagcaagtccagtatgacttgctgctggccaagatgctggtggcggcggacgacgaacgtatcgcccaagagcagaaacgcatcaacgatgactcggcactggtaacgcggtgcgagcaaaaggtaaaagccgaggagcgactgaaggcaggcgtggaccggagccgcatcgacattgcagcgaagctcagtggaatcgccgccaacgccgagaaagagcgcctggaccagcagctcgagctcgccaattccgcagctcggcacaaactggctgagctcaatactgggcttcaagaggccgcccaaatcgtcaatgcggctaccggtttgttgcggaagcccattccggagcagttccccaagctcaaggcgtcggttgacgcggtcggtcgagttacagcatcgactgacgttgctcgcttggacggtctgttgggcgctgtcctcgatgcctcaagtgatgcgcagcttaacgtcgagaagctgttccgattgacccctgcattcgatggtgtggaagagggactcgccgcgctgcactcatatctagtggggaccgaagatagtgtcttgatggctgttgcgtccgagacgtcggaattgacgcaacgtgtcgaagccactcgcaaggcgcgcaaggaattggctgaccgcaaggagctgttggcgagcggcgctagcgattacaaccgcgacactcgcatggcgcttcctcgcatccgagagtgtctgcccgaagctggtgtccaagttctctgcgacctcgtcgaacctgtgtcggatgaatggcaggaggccatcgaagggtacttggacaatgcccgcttcaatctcattgtgaagcctgagtgggaagcacgaactatcgatttgcttcactcatggggctcgcgctgtaaggtcatccagggtaaacgatgtcttcagcgtgccgatgccggtcgtgtgccatctgactctatcatccatgagctccgcactgaccatcccattgcacgtgcgtatctcatcgagcagtatggcgccgtcgtcaaggtcagggactccgagcaactgcgcgataccgcgcgtgggttgaccaaggacggcaaaggaagcggttctcgcactatgtttgttggtgagcggcgggaccttgttcttgggcgcaaagctcgcgagcaggcgctgcgggctaccatcgagaaactcgatgcggcagaccgaggaattcgagagttcgagcaactgcaggatacgctgtcgagcgttaaacggcttcttggcaacctgcgtgaacccgtattcgatgcgatgccgcttggccaagcagcgggcgaaatcgacagcactcggcgctcgcttgcgcagctggacctcaccgaggtggaacagttgcgggcggagcgagcgaagctggaactgctcatcgcagggcacgatgcggaaattaccgcggtaaacaaagagattaccctggcgagtcagcgtatcacggacgcccaaggcgccattgagcgcatcaatggaggccgagacgcgcgatttcgggagcgtgaagaccagattcgtcggctcgggcagatgtgcgaaacaaactcagagaaaacctacacggttattgccgaggaagtagagggcttgctcaaatcccggaggtttgacgtgcactccgttcaggtgcggctcaacacgctgcgcgcgcagccggacaaattgctgggcgatgtgcgggaaatgctcgcggagtacaacgcgaacgcgcgccaagaggagcgcttccagtcagcgctgcctcatcttcacgacgccaccatgttcgacccgtactatggcccccttgttgcgctcggccgcgcggtgggtgcactccacagcgagcttgagggcattggcctctacaacaatcgggccaaggtggaagaagcggagcgctctttccatgacgtgttcaccaagcagttttgcgtcgaaatcaaaagcaaggtggatgatggcgtccgactgctacggcaacttaatatggagttggaaaggcttaagttcggcacggaccgcttcagcatcgactggtcgaagtgggagccggagttccaggagtactacagcttcttctcggccgtcaccgaccttgcggactcagtcgaaacggtcgacctcttcggagagacggagctcacgccaaagcacgtagaggtacgcgaccgcctggtgaagctcctgctcgactcagaccaagagagagcggggcgggagctattgcgcattgccgactatcgaaactacaggcgctacgaaatttggaatgattcagacagtggggggcgcatcgcgctttcgacatggggcacggggtctggtgggcagcttgagacgccggcttacatagttcgcgcggccgtggtgacgaaccggctaaagttcttcgagaagggacccagcctgaagatgctcgttagtgacgagtcgttctcgacgatggatgaacctcgcgctcgggccgtgctgcagtacctacgcgaaagcctcgatattcaggtcatcagtgcgatgccgacacgaggcgctggtggcttacggccagagttcgaccgggagtacagctatagccgggttcctgttgacgctaacggcgaactcgacttcatcctcgaatacgacgagcgcatcttcaagaaggacaagatgcgagagctctgggaaaagcagcgggcggcggcccgtgcgcaggccgagctggcgtttggcgccgccgaggccgcacagcaggcggaggcgcttaaatga

SEQ ID NO: 44972 - DNA, 987 bp, Burkholderia pseudomallei; identical to SEQ ID NO: 44968

SEQ ID NO: 44973 - DNA, 1008 bp, Burkholderia pseudomallei; identical to SEQ ID NO: 44263

SEQ ID NO: 44974 - DNA, 672 bp, Burkholderia pseudomallei; identical to SEQ ID NO: 42091

SEQ ID NO: 44975 - DNA, 3633 bp, Burkholderia pseudomallei; identical to SEQ ID NO: 42092

SEQ ID NO: 44976 - DNA, 1134 bp, Burkholderia pseudomallei; identical to SEQ ID NO: 44028

SEQ ID NO: 44977 - DNA, 1161 bp, Burkholderia pseudomallei
atggtcattcgggcgctcgtcgcagacggttggctagagcagttcgctgaccggactggcttggttgcagcttttcgtttttcgcgtcccggcaagcttttttcggaggcgctttgggcattggaccgcccaagccgaagccggcagcgcaacatgcgcgggtgccgcaatgcgctcgaggctgcgttgtccgaacgaggcgacgcacatgacttggtggatgcctacgaatacgccgagaaggttatcgaggacctcgcggacggcatcgattactttcaagaactggtccggcacttgatgcaagccgcgtctgctcatacgcaatggaacgaattcgttgactttctcgacagattccagcgggactactccaagcaacttacagcggataacgcgacgctgaaccgccaagccattcggcaaaagcttgagaaactccgggccgttccggaggcgaagttcaatcgaatggatgcgcagttgcgcgatatcgcgcactggatggcgaaggagtacaccggaagctcgctctatgattggctgctcggtcgtattgaagacatcgtagacgcggcgtgcgagtctaagcagccgggctttctcaaggccatggagacttatctgaagcgtgtgaacggcctcgctttgcagtcgatgatgctacgctcggggcagactcggcatgcctacttagcagccgttcagaaagtggccgagtctcccaagttggaacaggaccgcttgctgaagcttgttggccagttcctcgcaccagcggaggtgcgcgtcctagacccagctagcttcaagctgaagactgcaacgcagcgccgcaaagcagtaaccgtgtctattcgaccgcgcccgacaagggaagagcggctcgctgcggcgatggcgcgagcagaggccgaagtgttctcaataccgaacgaggatgtcgcgcaggggctgcgtgcggacctgcgactcttccaacatccaatccgcgtttccgcaatgcctacggcaagtgcccgcgacgtcattcgcgcaatgcaagcggtggaagccgcgcgaagcgccatcggcggggacctcatcgtcaagaagctgccgacccgtttggagaatgagttctacggggccaacgactacgaaatcgacctgaaaaaatga

SEQ ID NO: 44978 - DNA, 672 bp, Burkholderia pseudomallei; identical to SEQ ID NO: 44291

SEQ ID NO: 44979 - DNA, 1203 bp, Burkholderia pseudomallei
atgtgcgaaacaaactcagagaaaacctacacggttattgccgaggaagtagagggcttgctcaaatcccggaggtttgacgtgcactccgttcaggtgcggctcaacacgctgcgcgcgcagccggacaaattgctgggcgatgtgcgggaaatgctcgcggagtacaacgcgaacgcgcgccaagaggagcgcttccagtcagcgctgcctcatcttcacgacgccaccatgttcgacccgtactatggcccccttgttgcgctcggccgcgcggtgggtgcactccacagcgagcttgagggcattggcctctacaacaatcgggccaaggtggaagaagcggagcgctctttccatgacgtgttcaccaagcagttttgcgtcgaaatcaaaagcaaggtggatgatggcgtccgactgctacggcaacttaatatggagttggaaaggcttaagttcggcacggaccgcttcagcatcgactggtcgaagtgggagccggagttccaggagtactacagcttcttctcggccgtcaccgaccttgcggactcagtcgaaacggtcgacctcttcggagagacggagctcacgccaaagcacgtagaggtacgcgaccgcctggtgaagctcctgctcgactcagaccaagagagagcggggcgggagctattgcgcattgccgactatcgaaactacaggcgctacgaaatttggaatgattcagacagtggggggcgcatcgcgctttcgacatggggcacggggtctggtgggcagcttgagacgccggcttacatagttcgcgcggccgtggtgacgaaccggctaaagttcttcgagaagggacccagcctgaagatgctcgttagtgacgagtcgttctcgacgatggatgaacctcgcgctcgggccgtgctgcagtacctacgcgaaagcctcgatattcaggtcatcagtgcgatgccgacacgaggcgctggtggcttacggccagagttcgaccgggagtacagctatagccgggttcctgttgacgctaacggcgaactcgacttcatcctcgaatacgacgagcgcatcttcaagaaggacaagatgcgagagctctgggaaaagcagcgggcggcggcccgtgcgcaggccgagctggcgtttggcgccgccgaggccgcacagcaggcggaggcgcttaaatga

SEQ ID NO: 44980 - DNA, 1134 bp, Burkholderia pseudomallei; identical to SEQ ID NO: 44350

SEQ ID NO: 44981 - DNA, 975 bp, Burkholderia pseudomallei
ttgtccgaacgaggcgacgcacatgacttggtggatgcctacgaatacgccgagaaggtcatcgaggacctcgcggacggcatcgattactttcaagaactggtccggcacttgatgcaagccgcgtctgctcatacgcaatggaacgaattcgttgactttctcgacagattccagcgggactactccaagcaacttacagcggataacgcgacgctgaaccgccaagccattcggcaaaagcttgagaaactccgggccgttccggaggcgaagttcaatcgaatggatgcgcagttgcgcgatatcgcgcactggatggcgaaggagtacaccggaagctcgctctatgattggctgctcggtcgtattgaagacatcgtagacgcggcgtgcgagtctaagcagccgggctttctcaaggccatggagacttatctgaagcgtgtgaacggcctcgctttgcagtcgatgatgctacgctcggggcagactcggcatgcctacttagcagccgttcagaaagtggccgagtctcccaagttggaacaggaccgcttgctgaagcttgttggccagttcctcgcaccagcggaggtgcgcgtcctagacccagctagcttcaagctgaagactgcaacgcagcgccgcaaagcagtaaccgtgtctattcgaccgcgcccgacaagggaagagcggctcgctgcggcgatggcgcgagcagaggccgaagtgttctcaataccgaacgaggatgtcgcgcaggggctgcgtgcggacctgcgactcttccaacatccaatccgcgtttccgcaatgcctacggcaagtgcccgcgacgtcattcgcgcaatgcaagcggtggaagccgcgcgaagcgccatcggcggggacctcatcgtcaagaagctgccgacccgtttggagaatgagttctacggggccaacgactacgaaatcgacctgaaaaaatga

SEQ ID NO: 44982 - DNA, 672 bp, Burkholderia pseudomallei
atgagcctatccaatctaattgacgaacagctcgccatcgcgaatgtcaagcgcgagcggttccgggaaatcttggtgcgcctgatggcctacggggtcatcgtgcgcgacgaagacaaaaccgaacaacttctgtatgacgatgctcggcgcgttgagagtctgttggatgagtacctcgatttcgcgggcttccgccttcatcacgaccgcgacaaccggttctacaggctgtacgccgccggcgcggtcgtagacggcttgccgccggacgtttacgaacctgccccatctttacgcgcgcgcgtgtcccccgatttcgttgcgctggcgcttacgttgcgtttcctctatcagaacaagttgaatgccggcgacatccagcctcagggtgaggcgcttgttaatttcgaggaaatcgccgcgacgatgcaaacgcaattgaagcgagcgcttccatccagcatgggcgacaagatggctctgctggccgagcttaggcgtcataggctgctccggtatgccccagaattttctatctcggatgaggacgcactacttgcgattcgcccgaccatcctgggtgttgtctcaaacgatgcactgaccgctgcgctcgatgcagacggcgtgcttgaacaacagaccaccgttgaggagaaggacgcatga

SEQ ID NO: 44983 - DNA, 3633 bp, Burkholderia pseudomallei; identical to SEQ ID NO: 44292

SEQ ID NO: 44984 - DNA, 1134 bp, Burkholderia pseudomallei; identical to SEQ ID NO: 44350

SEQ ID NO: 44985 - DNA, 975 bp, Burkholderia pseudomallei
ttgtccgaacgaggcgacgcacatgacttggtggatgcctacgaatacgccgagaaggttatcgaggacctcgcggacggcatcgattactttcaagaactggtccggcacttgatgcaagccgcgtctgctcatacgcaatggaacgaattcgttgactttctcgacagattccagcgggactactccaagcaacttacagcggataacgcgacgctgaaccgccaagccattcggcaaaagcttgagaaactccgggccgttccggaggcgaagttcaatcgaatggatgcgcagttgcgcgatatcgcgcactggatggcgaaggagtacaccggaagctcgctctatgattggctgctcggtcgtattgaagacatcgtagacgcggcgtgcgagtctaagcagccgggctttctcaaggccatggagacttatctgaagcgtgtgaacggcctcgctttgcagtcgatgatgctacgctcggggcagactcggcatgcctacttagcagccgttcagaaagtggccgagtctcccaagttggaacaggaccgcttgctgaagcttgttggccagttcctcgcaccagcggaggtgcgcgtcctagacccagctagcttcaagctgaagactgcaacgcagcgccgcaaagcagtaaccgtgtctattcgaccgcgcccgacaagggaagagcggctcgctgcggcgatggcgcgagcagaggccgaagtgttctcaataccgaacgaggatgtcgcgcaggggctgcgtgcggacctgcgactcttccaacatccaatccgcgtttccgcaatgcctacggcaagtgcccgcgacgtcattcgcgcaatgcaagcggtggaagccgcgcgaagcgccatcggcggggacctcatcgtcaagaagctgccgacccgtttggagaatgagttctacggggccaacgactacgaaatcgacctgaaaaaatga

SEQ ID NO: 44986 - DNA, 672 bp, Burkholderia pseudomallei; identical to SEQ ID NO: 42091

SEQ ID NO: 44987 - DNA, 3633 bp, Burkholderia pseudomallei; identical to SEQ ID NO: 42092

SEQ ID NO: 44988 - DNA, 1134 bp, Burkholderia pseudomallei
atgattggcgcgtctctttggctgaagtccatgccagtgcaagaattgctcaacatgcttgttgaccgattggacgcggccgagcagagaggaagcactaaagcgaaatcagtccagctcgacgagcgcacttggccagcgctctacatgtcgccagtggagtcgcagaaggaacacctttgggagcatgtcgtcgcgatggtgcgatgcggatggctagctgtgaagccagaaaccgcgctcaaaagtcggtccggttacgcatcatcgccgcgtgtgagtgtggtcgaccagcgagaactgcgtgcggcggtcggccggcaggaaagggtgaagtcgtccgctgagcgctggcgcgacgccgtgtcgtctggcttactagcaagcgatacggtaaagcgacttgtctcagagtattgcatcgatatccccggtcgcacgatgacggaggtcgtggagcagttgaaccggcttccggcgctggccgagaaatcgatgctgctgcgcgaggtgtcatcgcagttattctgggggatgtccaaggtcctcgacaagcgccaaggattggttgcggccattctaggtatggacgattgcccattcccagagtctcccatccaattgcacgtgttcttgcctgccggcggccatcgtggagtgctcttcattgagaattcggtgagcttcgaatgcgcaatgcgcgagccccgcggagtgttcggtgagttggctttggtctacgcgtccggctttaaagggagtgcgcagcggctgcgcaccacggaggggtgctcgctgttttacgcggcaggcggcggtctcgaacgggacttgcgtgcaacgtttgaaggttggttgttcggccggcaagagataccgtcgtacttctggggcgacctcgacttcgcgggaatgcgcatactcgcggctatgcgggcgaccttttcggggctgacagcttgggtgccgggttatgcgccgatgctaaccgtgctaaagggtggcggagggcacccccctgaggccgccgacaaacaagggcagaagccaatcgcatcgacagggtgcgagtacgccgatgagcaactagtgccagccctgcagaccttccggcgtttcgtagaccaggaatag

SEQ ID NO: 44989 - DNA, 1161 bp, Burkholderia pseudomallei
atggtcattcgggcgctcgtcgcagacggttggctagagcagttcgctgaccggactggcttggttgcagcttttcgtttttcgcgtcccggcaagcttttttcggaggcgctttgggcattggaccgcccaagccgaagccggcagcgcaacatgcgcgggtgccgcaatgcgctcgaggctgcgttgtccgaacgaggcgacgcacatgacttggtggatgcctacgaatacgccgagaaggttatcgaggacctcgcggacggcatcgattactttcaagaactggtccggcacttgatgcaagccgcgtctgctcatacgcaatggaacgaattcgttgactttctcgacagattccagcgggactactccaagcaacttacagcggataacgcgacgctgaaccgccaagccattcggcaaaagcttgagaaactccgggccgttccggaggcgaagttcaatcgaatggatgcgcagttgcgcgatatcgcgcactggatggcgaaggagtacaccggaagctcgctctatgattggctgctcggtcgtattgaagacatcgtagacgcggcgtgcgagtctaagcagccgggctttctcaaggccatggagacttatctgaagcgtgtgaacggcctcgctttgcagtcgatgatgctacgctcggggcagactcggcatgcctacttagcagccgttcagaaagtggccgagtctcccaagttggaacaggaccgcttgctgaagcttgttggccagtttctcgcaccagcggaggtgcgcgtcctagacccagctagcttcaagctgaagactgcaacgcagcgccgcaaagcagtaaccgtgtctattcgaccgcgcccgacaagggaagagcggctcgctgcggcgatggcgcgagcagaggccgaagtgttctcaataccgaacgaggatgtcgcgcaggggctgcgtgcggacctgcgactcttccaacatccaatccgcgtttccgcaatgcctacggcaagtgcccgcgacgtcattcgcgcaatgcaagcggtggaagccgcgcgaagcgccatcggcggggacctcatcgtcaagaagctgccgacccgtttggagaatgagttctacggggccaacgactacgaaatcgacctgaaaaaatga

SEQ ID NO: 44990 - DNA, 672 bp, Burkholderia pseudomallei; identical to SEQ ID NO: 44291

SEQ ID NO: 44991 - DNA, 1203 bp, Burkholderia pseudomallei
atgtgcgaaacaaactcagagaaaacctacacggttattgccgaggaagtagagggcttgctcaaatcccggaggtttgacgtgcactccgttcaggtgcggctcaacacgctgcgcgcgcagccggacaaattgctgggcgatgtgcgggaaatgctcgcggagtacaacgcgaacgcgcgccaagaggagcgcttccagtcagcgctgcctcatcttcacgacgccaccatgttcgacccgtactatggcccccttattgcgctcggccgcgcggtgggtgcactccacagcgagcttgagggcattggcctctacaacaatcgggccaaggtggaagaagcggagcgctctttccatgacgtgttcaccaagcagttttgcgtcgaaatcaaaagcaaggtggatgatggcgtccgactgctacggcaacttaatatggagttggaaaggcttaagttcggcacggaccgcttcagcatcgactggtcgaagtgggagccggagttccaggagtactacagcttcttctcggccgtcaccgaccttgcggactcagtcgaaacggtcgacctcttcggagagacggagctcacgccaaagcacgtagaggtacgcgaccgcctggtgaagctcctgctcgactcagaccaagagagagcggggcgggagctattgcgcattgccgactatcgaaactacaggcgctacgaaatttggaatgattcagacagtggggggcgcatcgcgctttcgacatggggcacggggtctggtgggcagcttgagacgccggcttacatagttcgcgcggccgtggtgacgaaccggctaaagttcttcgagaagggacccagcctgaagatgctcgttagtgacgagtcgttctcgacgatggatgaacctcgcgctcgggccgtgctgcagtacctacgcgaaagcctcgatattcaggtcatcagtgcgatgccgacacgaggcgctggtggcttacggccagagttcgaccgggagtacagctatagccgggttcctgttgacgctaacggcgaactcgacttcatcctcgaatacgacgagcgcatcttcaagaaggacaagatgcgagagctctgggaaaagcagcgggcggcggcccgtgcgcaggccgagctggcgtttggcgccgccgaggccgcacagcaggcggaggcgcttaaatga

SEQ ID NO: 44992 - DNA, 1134 bp, Burkholderia pseudomallei; identical to SEQ ID NO: 44028

SEQ ID NO: 44993 - DNA, 1371 bp, Methylobacterium oryzae CBMB20
atgctgttcgcgcagctgtccgacgagctgttcaagccgctggcttcgccgagccgcagcttcaacgcggccctgctcctgcatctgcaccggcgcgtcctcggggccgagccggtgcgcaaggccgagcttctggccgagatcggcgacttcgccgccggctggagcgatcccgaggtcagcggcgacgagccgatctccgccgatccgaccgagcgccgcacggcgctttaccggcgcctcctcgacaccggctggctgatcgagcgccgcgagcgctacgtccccgtcgcggagttcgaccccgaggcgcggctcctcctggaggagctgtcccggctggaacggggcgagacccgctcctacggcggggccgtgctggaggttctgggtggcctcgagagcgccctgtcggatccggcgaaccgctccgaggctctctccaacgccgcccggggcgcggccgccttcctgtcgcacgtgcgcgggctcgcggccggcatgcgcaaggtcgaggagcgcatcctgcgcgagcccgaccgcgccaagaccttccggctgttcttcgaggatttcgtcgagcgccacctgatcagcgactaccggacgctccacacccgcttcaacccgttccgcttccgcgccagcgtggtgcgcgaggccggccgggcgctgcgcgacgccctcaccgtccgggccctggccgagggcctcatccgggaggggcggagcgccgatctcgacgcggcgcagcgggccgtccggacggatctcgcccagattctcgcggtgttcgaggggctcgacaaccatctcgatgccgtcgacgccgtggtggcgcgtctggagcgccggatcgcctccgccctgcacgtgatggaccgcccggatccgagcggcgtcgagcgcgtggccgcgatgctgcgcgccgtcggcgggtcggagatcgcccccgacgtgccgggcgacgtctcgctgctgcggccgcccatcgggcacgcgcatctccaggcgccgcgggcccgcaaggccgcgatcgacatggagcccctgcccgacatcgaggacgatccggtggtcgacgccttcgcggccgccaaggcggagttccggcgccgcaccaccgtgacgcccgaaagcatgagcgccttcgtggaggcccgactcggaaaggcggtgcggctgcgcgggtcgcagatcgtgatcgcgggcgtcgacgacttcatcgtgttccagcgcctgcgcgagatcgacgtgctgttcgacgccaagctcggcgagcgctacgccgtcacccggctgcccgagcgggtggccaatggctggctcgactgcccggatttccttctggagcgccgcccctatgcttga

SEQ ID NO: 44994 - DNA, 627 bp, Methylobacterium oryzae CBMB20
atgcttgagggcttccgcgcgatcatcgacggcgacgagccgccgccgcccggcgcaagggcgccggatgccgaagagctgagccgtgccctccaagtgcttctgaaggggcaggtgatctacgccgagacccaggggatcggccgctcctacgagctcgcccggcactacgccccgttcttcaccgactacttcgcctgcctcggctacgcgctcacggtctcgcatcgcgaccagatggtctcgctgagcccggccgccgacgcgccccgccacgacatcgtctcggagcgcctgcgcaaggacgagacgctggtgctcctggcgctccggctcctctacgaggagggcctgcgcgaccaccgggccgggactgacgggatcgtcgactgcaccaccgacgagatcgtcgagaagatccgcaccgtggcgcgcaacgagcctcccgaggaggggcggctcgccgacatcctgcgcctctacgcgaagcgcggcggcctgcgcctcggcgagcgcgaccgggtcgagcgggtcaccccgctctcgctcctgccggggctgacggtgctggcttccgacgcctggatggaacgccttcgggcgtggtcggaggccggggaggcctga

SEQ ID NO: 44995 - DNA, 3438 bp, Methylobacterium oryzae CBMB20
gtgtacgtcctcaccgacatcgccatctccaactggtacctgatccgccgcgagcagatccggctgcgcggtgccgccgcgctggtcgggccgacgggggccgggaaatcgacgatcttcgatgcggtcggcacggtgctggccggcaacaacgccagccgcctcgccctcaacgcctcggcctccgggcgcagcgcccgaaccgtgcgcgactattgcttgggctggatcagcgacccggcggaaggcggccgcccgacccgggaatcctgcgagaccgtgctggttctggtcttcgagaatcccgattccggccgcgtggtctcggtcggcctcgccctggccgctcgggccgtggagcccaaggagacggtgctctcgcgcttcatcgcggtcgggcaccggttcgaggtctccgactacgcccgcaccgcccccggcggcacctacacggcgccctggagcgagatcgccgcggacctgcgggcccgcgcggcgagcttcaccgagtaccggacctctggcgaacgcttcacggccgatgtcctcgccaccctgcgcgagggggcgccgtcgccggagccgcgccacttcctgcgcagcttcgccaacgcggtggcgttcaagccgatcttcgacaccagcgccttcgtgcgcgccttcgtgctcgacccggagcccctggacgtcgagcgcgtgcgccactccatcgccaactggcgtcggcttctggagaccatcgccgagctggagagccgcctcggacgcctgcggcgcctgcgcgaccgctacgaagcctggggtgaggcggtcctcgctgccgcgacgcacgagctgcgcgcggcgagcgccgagctgcgccgccggagcctcgacctcatcgccgtccgatcccggctccgggaaggcgccgacaccctgcgcatcgcccgcgagcgcgtcgcggcgagccgcggctatgtccgcgagatcgacggcgagatcgccgagaagaaggcgctggccaccgcgagcgccgccgagggccggctcgccgcctcgacgctgggcctctccatgctggagcgcgaccggaaggagctgatcggccggatcggcgatctcgtcggcctcgtcgggcagatggccaagctccagccggtcgccccgatcctgcgccagagctgcccgcaggcggcccgcctcgccgaggcctgcgcccgggcgggcctgcgtcgggaatcctcccccgaggagatcctgcgccccgaggggccgctcgccgaattggccgacgggctggtgcgcctgcccgatttcgacgaggcgctggagcgggccgccgaggacgcggcgctgaaggcccgcgcccaggagagcgaggccgagcgcacggcgccgcgcaccggcggcggcccgaccgcgcgcctgtcctccgacacggtggcgttccgcggcgagctggagcgccgcggcatcgacgcggtgccgatctgcgaactggccgagatcgtcgacccgacctgggggccggccctcgaaggcctgctggggcgcgcccgcgaggccctggtggttcccccggaccggctgaacgaggcactcggcgtcctgcaatccggccgcgaccggttccaccgctgcatcctggtgaagaccaccgacaccgccaagcagcggtcccgccgctacgacgacggtccactcaccgtgatcgagaccagcgacccgcacgcggaggcgttcctcggcgtgcggctcggcggctacgacctcgcccgggacgacgccgaactggcccgcctcgcccgggcggtcgccccgagcggccggaccacggccgggatggcctattcggtcacccgcagcgtcgacctgctgatgacccgcggccatcgcgggcccaccgccgacagccgccgcgcccacgagatcgccgtcgccgaggcgcggcgcctgcgcggcgaggccgcggtcctgcgcgaggccgcccggacggcggccgcgatccgggcccgcgtcgcccggggcctcgacgacgtggaggcgctacgggccgagctcgacgggctcgacgggcggcggcgcacgctccagaccgagcgggagggtatcgagaagcgtgacacggccgggctcgccgccgagatcgccgcgctgaccaccgagcgggtcggctacctgcgggaattgtcggaggagctggagcccaagctcgaccgcctgctcgccgacgaggcggcgctgcgcgcccggatgggaccggtgcgcgaggccgtccgcgccgctctgtcggcccgccgcgcggccctgcgccagctcagtgccggcgacgccgcgcgggtgcgcctcgcccgcggcgagcccttcgacctcggcgtggtcgccgaggcgcggcgggcgctggccggcctcgatgccaaggcggccgggacccgggtgaccgccgagcgcggcctcgcccgggagtccgccgaggccgcccgctcccacgggcggatcgccgagcgggagctggcggaggcctgcgccgcctggcgggtggagaacccgctcgcctccggggacgccccggcgatcgacggcttcgcctgggtgcggcgggaatacgaggccgtggaggggcacgaactccgccgctacagggcgcaggccgagcgggccgaggtcgagatgcgccgcctgatgaccgaggatctgctgacgcgcctcgccgaccggttcgagcgggtccatgcccggctcgccgccctcaacgagcggctctcggcgcgcagcttcaccggccagacctacgcgttcgaggcggcggtggatcgccgctacgccgccgtgcacgcgctcgccaccgagaccgcccgctcacccgaggccgcgcaggcgctgctcgccggcgaggcggaggggcagatggcggcggcgctcgaggagatcaccgcgctgatcgccggcgaggaggatgcggcgcggctcgccgattaccgcaactacttcgtctacgagatcggcatgcgcgaccgggcgggcaaccgcaccacgatgtcggcccgggcgctgcgcggctccggcggcgaggcccaggcgccgttctacgtggcgatcgccgcctcgctggccagcgcctactatccgggcgaccggccgggcgacgagaatccgggcttgggcctgtgcctgctcgacgaggccttctcgaagctcgacgtgcgcaacagccaggcgctggtcgatctgtaccgggcctgggggctgcagctcctgattgccgcccccgaggacaagcgcaccacgctgaccgaggtgatggatacgatcgtgacggtctataagagcccggatctcacctcggtgcggatcgaggccgaacatcccctcgaggcggcccggcgggcgctgcacgcgatcaaccccgaccagatcgggatcgaggggtttcgccagccggacgcggcggagtga

SEQ ID NO: 44996 - DNA, 1458 bp, Spirochaeta sp. JC230
atgcccctggattacttcgacctccgtaacatgcggagacaccacccggcttggcggctcatgtccgcagactctgcccccctgatcgccggttttttggaccttgcctttcgggatcaaaaccatagaagtatacccgaggccgaactaaccacccgtttggaggactatctctacaccctgcgggacaactattctgaccaagacccggagcaagatccgtttccccggaaagctggtgaatacctggacgactgggcccacattgaaaagggatggctgcggaagtattaccctccgggcagcgacgaagcccactacgatcttacgcccgccaccgaaacagcccttcgttggcttgacagcctcttcgagagggggtttgtgggaacggagagccggctgcaaaccatagtgcagctattgcgggagatttcctcgggggtagagaccgacaaggataaacgtatccgagaacttgaggcgcaacgccggagcctgaaagcggaaatagactccataaaaaacggaagcctgagactcatggatggtagggcgcttcgggaacggtatttccaggttaaccgtatggcaagggagctgttaggtgatttcagggcggtggagcacaacttccgtcagctagaccgggatgtccgtcagcaaatcgcagcctggaccggagggaaacaccagatgctccaaaccatcttcggcgaacacgatgccattacccaatcggaccaaggccggagcttccggtccttctgggactttctcatgagtccaacaagtcaggatgaactcactgaactattagatcggttgtattccctagaagccttggaggatgaaactcgtaacgatccacggctccggcgtatacatttcgactggatggctgcaggcgagcagacccagcggaccgtagcccgtctcagtcgccagttgagaaactacctggacgatcgggcctactacgagaatcggcggatcatcgagcttcacgagaacctcgaggccctggcccttacggtgcggcataggattccaccgggtgattttatggagctgccggacagtaaacccgatgttcggcttccgttggagcgacctctctttcagccccctgtatctacggatctcactaccctaattcagaaagccgatttagagcagctggattcctctgcgctctttgatcagattgtagtagacaaggcgcggctgcgcagaaccatcaagtccgccttggagagtgaatcacaaataacccttggggtcattatacaccggcaccccctaaccgaaggactggcagagttggtcggatatctctctgtggcggcagaggatggtcgtgctcatatagatgaagagactgtggaggaggtttcttggcaggatcggcagggtcggcagcgtaccgccaagattcccctggtactatttatctag

SEQ ID NO: 44997 - DNA, 585 bp, Spirochaeta sp. JC230
atgacggagcacaacagcctatcgcccctcctcatatccctgttcaagggggtgctgtaccgtgaagacaaccagactcagtggcaagagctggtacggcaccagggcagaatacaggattatgtaagcctcctagggctccaggtagtggtagacgagcaggcagggtatggcttcctgcaaaaccgggaagatgaccaggaaaccgagaacctgccccggcttataccccggcggcggctttcctatccggtaagtctgactctggtgctgctgcgccggcgcttggcagatcatgattcctctactggagaggaccggcttattttgagcaccgatgaggtggtggaaatgctgcgcacctttttacctgagggtaatactgaaagccgtaccattgaccggatgtcctccattctatcaaaaatcgcagacctgggattcattcggtttatagactccgcaaaaactaaactggaaataaagcgtattctttcagcgtttgtggatgcccagtggatgaaccagttcgatgaacggctgcgggaatacgctgatcatgcccttgaccgggaggaggaatga

SEQ ID NO: 44998 - DNA, 1185 bp, Spirochaeta sp. JC230
atgaccattccatggccgggcaaagcggagctcatccagcgtcttcgaaaacagtgggatcaaggcaggtttttgcccctggattcggcaccgacccggtttcccctggatgtacccctggttcgtcccagctctcgggagatggttgaccattttcccgcactccaggcctggatagcccagctctcggctatggagaaacccgggagtattgaactgacctggcagaccattaaccaccgtcaactcggccgtaataccattccccgatctctcgtgtttgccgacatcaccgccctggccggactcttgggggttaccaaggagttgcgccgatttttggacttgtcaaagaagctggtaacccaggctccggagcttgagccctgggtgtccagggtcggtctgggtgtattacagtgggagccggatattgagaggctggtaacactgtacctatggataaaagaccatccggataatgggttgttcctccgtgaactgtcgctgccgggcatcgatacgaagtttattgaatctcgctggtccatcctggacagctggcttagtacttccggtgttcccgccgatacagcaccgccctatatgcggggtgttcgccgatttatccaccgctacggattccgccagcctccggatctgattcggtttaggattctagatcaaacacttctatcctgcaccgggggctggcaagatcttaccgtgcccgcccaggagtttgctgccaggcccctgccggtctccagggtatttgtctgcgagaacgacatctctgccctggcttttcctgctctgcctgggtcgatagtggtattcggtcggggatacgattttaccgccctctcccaagcccagtggctgggtcaatgccggttgctctactggggagatattgatacccatgggtttgccatcttaaaccagttccgccaggcctttccccaggctgaatccatgttaatggatcgccaaaccctgcttcgctgcggaacctcttggggcagggaggcaaaacaaaccaaggccgacctcccgaacctaaccccaccagagcgggacctctaccgcgatctgtgtaccaatgccctggctcctcatctgcgtctggaacaagagtatgtaccgtggcggcttgtatgtgaggcgctgaaagaaatgtag

SEQ ID NO: 44999 - DNA, 1461 bp, Mycobacterium abscessus subsp. bolletii; identical to SEQ ID NO: 43072

SEQ ID NO: 45000 - DNA, 750 bp, Mycobacterium abscessus subsp. bolletii; identical to SEQ ID NO: 43073

SEQ ID NO: 45001 - DNA, 3348 bp, Mycobacterium abscessus subsp. bolletii; identical to SEQ ID NO: 43074

SEQ ID NO: 45002 - DNA, 1407 bp, Cedecea neteri
gtgagctttaacacactcaataccaatctgtttaaaccgatctcgggcgagaatggacgatcgatgcttgcgttattagtcgatctcgatactttcttggatccgacacaactggtagatgaacctacgccgcaacaggtacgggtctttctacgagactatatcgccaataagaatttgagccttgagatagcgtcggttgagtcaacgataggaaatcccgctctggaacattatgtctataaccggttgcgagatacggggtggattcgagaagagcaggagagcgggtatcgatacgtcgtctggatggcgcaagatgctcgtaggctgttgaacttccttggcaatatgagtgctgagcatccctcgttaggtgtggtgtgtctggcggtacgctcgaacctttctgaagtggttaaagacccaaccaacggatcgttagtgcgcaaagcggctgatgacatggaggatttcttaaatcgactcagagctctcgtgggcaatatccgcgaaatccaccatgcaattagcggtggttccgtccaaggtagtggccatttcactttttactttgaagaatacttggccgaactctttctacccaatattgagaaactctccctgaaaggaaaccccaaccttcatgccagtaaaattcgtaagctagttagcgatatccgtttcagctcagagcgcctggaagcatgcgctagagcctataagcgtgatgatatttctaatccttcggttcagcttgtggaagcagatctagatcgattgagcaaagcgtttgacggaattgctccactgttcaagaaaacgcaggactatgctcgtcgtataacccggcagatgtatgagaagatcaagtataccgtgcataccccaagtaatatggggcaacagattcaggcgctgcttgagcgcatcgggagtgaagccttgttaggctcattacctagcccgttgataggtgaagaactccttgctgattgccggttggccacacccaaggcaaagtcaatactgcctgttccgacggtgcgcagacagccaaaaccgttgtgggaaaaacgggcatacaaccagctcaagcaagaacatatcagtttccagaaatgcgaccctacacgtgttgccaacttcattgaatcgaatcttggagagcgagtacagatgaccacggatgatcttaggatcgataccgctgatgacatgatggcagcgcttcatttgcgccttttggcacaaggcatatcgaaaactcatccacttttttctctgcagtccatgtactgcgttgagttcgatgaaggggagtggacggaccttaaacagatggccggtcgtcgcatcataattcgtcggatcgtcactatggagaaacgcacacatgaccagtga

SEQ ID NO: 45003 - DNA, 672 bp, Cedecea neteri
atgaccagtgaaattgtgctcagagagttgaaagatatcgaggccaagacatctgctgactatgccgatagcttacgtaacacggcagcatacctactgcagaagcaatgggtatggaagggtaaacgcggccaaaaagagcacttcaagttgtgtgaggataatctggcttattttaacaagctttttgatgggttggatatggggtggtactacgatcgtaacttcggttatgcggggattttaccgcgtggttctggtaagcaactggatatcacctctacgctgttcctgctcattctacggaaaatgtatgacgctgaagcgtcgatgggacgtacggagcttgggtgtgtaacaccgccaacggtcgagcttcttaatcagtacgaacatgtcaggggggagatgccccccataacagaaaccaataatgccctggagaacctaaggaagaagggaattattgaactcggaattaaagaccccgataccaaactccacgagttgaccgttctccctaatattacccgtgtggtcgatcaaacctatgtgggcatgcttaaccgctttatggatagttacacacctgaatctgcgtttggcgaagcggttttcgaaggaactgatgatcttgagacactggaggtctacgatgacagtgcagaataa

SEQ ID NO: 45004 - DNA, 2481 bp, Cedecea neteri
ctgatcgcgtggcaaaattctgatgctgcaagtctgagtagagccgttgatgccgcaaaaagcgccgtttctaaatccacaaacagtcttaccaaccgaatattttcactgcaaaatgctgtgcgtgaagttatccgtcaacgatttcctgacacgctgggtatccagagtttcgagctattagcccggcactgggcgacatccgtggacattctcaatcgggcaggcattgagagcctctcagcatcggaacatgagaatacgcttaaggtaaccgataaacttaaaagcgcaaaaaaattactggacgagatagctgaacgtatagaggtggctgataaaaatgtgagccacgacttaacacaaaccatgcatgaatgtaaggccttgcaggtgcgtattgaacggctgagaaagggactttcggacatcaatccggcgacggctaaggtcatcgaattactcaaacaagagagaatagaatccatgcccgtctgtgacctctgtgagatcgctgatagagactggcaagaagcagtggagtcgtacttgggtccgaatcgcgaagcactggtggtgagtgtacgtgattttgaccatgcattggaagtgtacgaagttgcacagaagcgagagccgcaactcaaacgagtacgcatgattaaccctggtcatgctttagccgccaacaaagcgcccactgaaagaatggtttcaaagctgatcgaaaccagcgatccgatcgctcgtggttttatgaacatcattctggatagaactaagatggcggcaacgcgcgatgaactacgaagagagcgcaaagcgctaatggcatcaggccttgcgaccggtagtggaacggtgggcggtaccgctcatattcgcgggttattgatggggaaacaggctaaagctgagcagcttaagctcctggagcatgaacgggatgtgctcgcacaacggctctctggcgttgagagatcagcacaaacgctgagcaggcttaaccgcaactgggctgggctatctacatctattgtggagggctcatcgtccgtacgggaaaatagtatccgcctgatgcaagataaaaaagcattgtctgccgctcaggaacagttgaaaccgctgacatcaaaagatgaacagctcaaagtcgcaaaggcgcaggctgacgacaattatgaagcatgtaatacggcgatcatcaatgccacggccgaacaaaagaacgctattgcaacgttaaatagcttgaacaccgagattgaaagcctctcaaaaaatagggacgaggcagaacgaatccgcagtgaaacagaaaaatctcctatacacaataccgccaaagcagatgaatactggcaaacttatgagcagaagtttgggggcgaagaaggatgctattccctgattcgaaacaaagcccagaatgaggctcaggttgaacgggagaaggcgctcaatacacgtggagatctgtattacaaggtcgttagattcacgacagactttgcagaggatatagcgaatcgtcaggcgcttcttgaagccgcaaaaactgataacgtgaatacagaggcgtaccactttattgaggcagattgtacggaatgggttgagcgtatcctggcagcacagcttttagtgcatcgtcaggcggcccgggaagctgctgaacagatggaaaaaaactttcgaggcatcatagtaggggagcttcaaagccgctttgagcagatgagatataccttcaatcaactcaataacttgcttaagaaagtcccgtttcacgaccacatctacagcttccacttcaaggttcgcgagatagagagcttgcgcaccgtctacgagtacattacgactgcagatagagaagagaccgagttagttgggacaatgttcgaaacagtatcagaacatcctgctatagacctgttgaaagaggcattgctcagtggtgacgatctaattaatgagatcagtgattatcgcagtttcttcacctatgacatgaagatgcgtaaccctgacaccgggactgagcgcagcgtggcagatatgcaaagcacaggttcaggcggagagcaacaaacaccagcgtatattgcgctggctgcgagttttatgaacgtttacaagattagtggtcattcagatcgaggggcgtctttggtactccttgatgaagcgttcaataacatggatggtggcaatgcgagcgcagcagtggcctttcttaaagaaatcgggttgcaattactgattgctgccccgccagaagtgaccctgaaaattggtaaagagatggagcaaatttataccatttgccgtgaggacagagatgtggtgattgaccacacgcagattttcgaagcagggcaggagcttatagaccaacgtaatccagtttaccatccagagcttgtggctgaacgcgctgctgaattgaaagctaaagccgagatggttgaatga

SEQ ID NO: 45005 - DNA, 1248 bp, Cedecea neteri
ttgaatgatatgaactcttatgttgagaagttcatcaatcaattgatcaagaagatagataaaccagaaggtgtggaacttgagtgcaggatacgtatcacagatcacgcctatcgttggtacttcgccctcaataatagtaccaaaacggcgctgcataagacgttggaatccattgcatacttgaatatccactatcagcgtaaagtcgcgctgggagcgtttaaacatattgagtatatcgagatcgttgatggctacagattaatggatagtcagggagttataccacaggctgatgaaatcaaagtttcatttcggcatttagagacaacggtgttcaatgtaccttggtgggataatacgaagctggagattgccaaggaatggtcgagcaacaagacgttttgtggtgtgaatcgcaaccaggcagaccgactttttgatgcaatgaaagttattgagtggatcgttcaactacctgtctctgagaatgttcccgatattcggaccctcagtgccatgttgtatggcaactccaagaagttagaatgtaagagcttttccggtcttattcgaaagttgatgttgccgcatattgacgatgatgttgtggatttgcttgacgatggggttaagctgctggagtattttgggattagtaaatacccaataccaatgcgtttcaaagccaatgggttgttgcattgcagggggattatcgatttatctgcactccactacggaatcggtgtttccccggatgaagtcaaaggcattgtgtggggacaacggccaccctatgtgcttttcattgaaaatcgtgctagtttcgagcggtatgtgcgcgaaattgatgatttgggtgtgattatttacaccgccggcttcccgccgcgctcttgggtacatgtaatagagatcattatcgctgaactgcgtatggagataccgatttaccattggggtgatcgagatgccggtggctatcgtattcttgcatttttggcgaagcgacttgatattgatattcagccatatctgatgggggtgggggctgaagcattgactcaggctgatgatgagctcgttgataaacctgtagtcgaattaatgcaggcgctggagtcagcaaagcactatccagctattttagcgctttatagagatctagcgaaactccaaattaagaatctaccttggatcgagcaggagcagatagcccctgttagccctcggaaatattga

SEQ ID NO: 45006 - DNA, 1461 bp, Mycobacterium abscessus subsp. bolletii 103; identical to SEQ ID NO: 41997

SEQ ID NO: 45007 - DNA, 750 bp, Mycobacterium abscessus subsp. bolletii 103; identical to SEQ ID NO: 41998

SEQ ID NO: 45008 - DNA, 3348 bp, Mycobacterium abscessus subsp. bolletii 103; identical to SEQ ID NO: 41999

SEQ ID NO: 45009 - DNA, 1461 bp, Mycobacterium abscessus subsp. bolletii; identical to SEQ ID NO: 41997

SEQ ID NO: 45010 - DNA, 750 bp, Mycobacterium abscessus subsp. bolletii; identical to SEQ ID NO: 41998

SEQ ID NO: 45011 - DNA, 3348 bp, Mycobacterium abscessus subsp. bolletii; identical to SEQ ID NO: 41999

SEQ ID NO: 45012 - DNA, 1470 bp, Stenotrophomonas maltophilia
atgaagcatcgcgaacgcatctcccgttaccgccatctgcgcgaacagccccagtggaagctgctcgccgccgaccacgctccggaaatcatcggcctgctgcaggggctgctgatggacggcgagcgcacgctgtcgtcgtcggtgctcaacgagcgcctgcaacgtgcgctggaccagctcaacggcgacgaactgtcgcgcgacctgccgcgtaccgcgcaggcttacatcgcgcactggctggcccagggttggctggaacgccgtttgcccgaaggcgcagaccaggagcagtacgagctgtcgaccgcggcactgcaggcgatccgcttcgccgacggcctggagcaggcccgcgtggccgccaccgaaagccggctggcgctggtcatcgaacagctctcgcagctggccgcgcagaccgagtccgatccggatgcgcgcctgtcggcgctgcgcgacgagcgtgaccgcatcgacgccgagatcgcccgcgtcggcgctggccgcgtgatcgcgctggatggcaagcgcgcgctggagcgtgcgcgccagatcatcggcctggccgacgagctgaccgaggacttccgccgcgtgcgcgacgacttcgagcagctcaaccgcgatttccgcgaacgcatcatcgacgatgagggcgagcgcggcgatgtgctgtcgcagctgttcgaaggcgtggatgtgatcggcgagagcgatgccggccgcagcttccaggcgttctggcgactgctcaacgacgccgaacagagcgcacagcttgatgctgcgctggaagcggtgctggcgcgtggctttgcgcgccgcctggaccgcaacgagcgcaacttcctgcgcggcttcaccagcaccatgctcgagcgcggtggccaggtgcacgatgtgctgcagaacttcgcgcgcagcctgcgtggcttcgtgcagagccgtggctacctggaacagcgccgcctcaaccagctgctgaagcaggcgcagtccgaagcactggccctgcgcgacgagttccccgcacagcgcggcatcggccgtgacctgcagctgaccaccagccgcctgcgctcgtggtcgcagtggaggctgcacgatccacgcagcgcccaggtcgatggcaacgtcgagtacaacgacgcggccgcgatcagcctggaaagcgtcggcgatctggtcgcttcgtccgaaatcgacttccgcaccctgcgccgcgacctgcacgacctgctcgatgcacagccgcggctcagcatcgcccaggcgctgtcgcagcgtgaagcgccgcagggcctgggcagcgtcatcggctacctgtcgctgggcacgcgcttcggcaacgtgatcgccggcgagcaggagcttgccgaatggcgtggtggcgacggccagatccgtcgcgcccgcatcccgctggtttggtttacccaggagagacgccatgagctggcatga

SEQ ID NO: 45013 - DNA, 702 bp, Stenotrophomonas maltophilia
atgagctggcatgaagatcccatcgacgcagcgcaggccgacgtggcggaagacgcctacgaagccgagccggtggcggccgtggcgcagccccgccgtggcaacgacgtgtactacctcggcgataccgggcgcctgccgctggatgcgcgccgtgcgctgtgccagctgctgatcggccccagcatcgaccagctgcgccacgccaagctgtggccggcgctgatccgcagcgaggcggccatccgctcgtcgctggcggacctgttcctggaactggtgctcgaccgtgacagcggcgtggcgttcacccgccaggccgataccgaagacgtggatgcgccggtgctgctgcgcacctcgccgctgaccttcatcgattcggtgctgctgctgtacctgcgccagcagctggccgaggccgatgcgcgcggcaaccgcgcggtggtcgccgacgccgagatggccgaagcgctggccatctacgagaagaacctgtccaccgaccgcgccggcttcaaccgccgcgtcgcctcggcggtgcagaagatgaaggacaaccacatcctgacccgcctcagcggccaggaagaccgccacgaagtctcgccggcgctgaagctgctgttctccgccgaagacgtgtcccagctttcggcggtgtaccgccagctgcgcgaaaccccggccgccgaggcctga

SEQ ID NO: 45014 - DNA, 3381 bp, Stenotrophomonas maltophilia
atggctatctccaagcacactcccgcactgttcaacgaaggcctgccggacccgcgcctgcagcagttccgcatgcgccgcctgcaggtgcacaactggggcaccttcaacggcctgaccgaagtgccgatcgccgagcgcggcttcctgttcgtcggccgttccggctcgggcaagtcgaccctgctcgatgccatgtccgcgctgctgacgccgccggccatcgtcgacttcaacgccgccgcgcgtgaagccgagcgcagtggccgcgaccgcaacctggtgtcctacgtacgtggcgcctgggccgaccaacaggacagcggcaccggcgaaatcgccacccagtacctgcgcaagggcgcgacctggaccgcactggtgctggaataccgcgccggcgatggccgcgtggtcagcctggtgcgcctgctgtggatctccggcaacggcacctcggccggtgacgtgcgcaagcactacatgattgccgagcgcccgttcgacatcgccaaggatcttggcggtttcgacctggacctgcgcaagctcaagcagaagctgtccgacctgcatcacttcgacaccttctccggctatgccgagcgcttccgcgacctgctcggcatcgacaacgaaatggcgctgcgcctgctgcacaagacgcagtcggcgaagaacctgggcgacctcaacgtcttcctgcgcgacttcatgctcgacacgccgaagaccttcgacgccgccgagcgcctggtcagcgacttcgccgagctcgatggcgcgcaccaggccgtggtcaccgcgcgccgccaggtggaaaccctgctgccggcacgcgcctactacaacgacctgaaggaaatgcaccgccagcgcggcgacgacgaagcgctgaagctcggcgtcgacagcttccgcgaaagccgccgccaggcgctgatcgaagcacgcctgcgcgagatggacgtgcgtgaccgtggcctgctcggcgaagaggcccagcgccgcgccgcgctcgacaaccacaccgagcgccttgccgaacttgagttgcagcgccgccagcagggcggtgaacgcatcgaggaactggaacgcgagcagggccgcgccgaagccgagcgcgaccggcgcaaggccaagcgtgaccaggcccaggaagcggcgcagcagctgcaggccgaactgcccgacgatgcccatggcttcgccgagctggtcgagcgcgcgcagaacgaactgcaggaccgccagcgtgcctcggcggcactggacgacgcgatcagcgatcgcctcggcggcaagcgcgatgacgagcgccgcttcggtgaagtgcgcagcgaacttgaagcgatgcagcgcaccccctccaacatcccggcgccgatgcagaagctgcgcgcgcgcctggccgaggaaaccggcatcgccgaagcggcgctgccgttcgtcggcgagctgatccaggtccgctcggaggagcagggctggcagggcgccatcgaacgcgtgctgggtggcttcgcgctgtcgctgctggtcgatgacaagcactacaacgacgtcgccgagtgggtgaaccgtacccatctgggcatgcgcttcacctactaccgcgtgcgccgcaacgatgatgcgttcgcgcgcgagccgtcggcgaagtcgctgctgcacaagctggagctgcgcgagcatgtgttcgaaagctggctgcggcgcgagctcggcaagcgcttcgactacgaatgcgtggatgccaagcagctgcgcaacgtcgaccgcggcatcacccgcgaaggccaggtcaagcatccgggtgaccgtttcgagaaggacgaccgcagcgcggtaggcgaccgccgccgctggatcctgggcttcaacaaccacgacaaggtgggcgccttcgagcgcgaagcacaggaactggccaagcgcatcgccagctgcgagaccgacatcgcgcgcctgcgcggccagcgtgaccgcgacaacgaacgccgcctggcctgccacgagctggtcagcatcagctggaacgagatcgacatcgccgctccgcagcagcgcctgagcgacatcgaggccaccctgcgcgacctgcgcgaaggcaatgccgatctggccaagctggccaagcagatcgacgccgtgcgcgccgacatcgagcagtcccgccgcacctatgaggacgtccgcgtcgagcgcggccagctggtcaaggagcgcgatcgcctcgaccgcgcccgccagcagagccgtgcgctggtgctgccgagcctggcccaggagcaggaagccggcctcgccgagcgcctgcaggagcagggcccgctcagcctggaaacgctggaagcgcacatgcgccaggtcagcaacgcgctgaacgagcagctgtcgtcctcgcagcaggacctcaaccgcatcgagaaccagctgaccggctgcttccgtcgcttcatccagcaatggccggaggaatcgggcgacttcaccgtctcggtggcctcggccgaggacttcctcgcccgcctcgagcgcctggagcgcgatggcctgccgcagcacgaagagcgcttcttcgacctgctgcagaaccagagcaagaacaacctgctggccctgcagcgccacagcgccgaggcccgcaagtcgatcggccagcgcctggacgaagtgaacgccagcctggaacaggtgccgttcaaccgtggcacgctgctgaccatcgaactgagcgaccgccgcctgcccgaagtcggcgagttccacctgcagctgcgcgaggtgctgtcgcagcagcagaccgagcagcgcgagctggccgaatcgcagttcaccgtgctgcgccagctggtcaaccgcctgggttcacaggaaggcgaagacaagcgctggcgcgaactggtgctggacgtgcgcatgcacgtggagttcatcggcgtcgagctggatgcggaaacgcgccagcaggtcgagatctaccgcagcggcgccggcaagtccggcggccagcgccagaagctggctaccacctgcctggcggcggcactgcgctaccagctcggcggcgctgacagccagctgcccagctacgccgcggtcgtgcttgacgaagccttcgacaaggccgacaacgagttcaccgcactggcgatgaacatcttcgacaacttcggcttccagatggtggtggccaccccgctgaagtcggtgatgacgctggaaccgttcatcggtggcgcctgctttgtcgagatcagcggtcgccacgactccggcgtgctgctgatcgagtacgacgaagaaggcaagcgcctgaagctgcccgagcgcagccgccagcaggccaacgaaccggaagaagccgaggcctga

SEQ ID NO: 45015 - DNA, 1461 bp, Phaeodactylibacter xiamenensis
atggaggaccgcttttcaaatatagacgaagtgagcaggctactggaagaccatagcgcggtgcggctattgcgcaaagcacacgccccgatgattgtggctttcctgtggcgtgccttccgcgaagagcgtcggcaggcctacggtagtcaggagctgaataccctattgtctgatttcctgtttgcggctaacgaaggtgcgggggaaggcgggaaaccctacccccgcacttcacggctatacctggaagactggtccaaagagggcttcctgcggcaatactacgaggctggggctgcagaggcaacttttgagctcactcccgccacggagcaggcgctggtctggatagccgagctggacaaaagggaattcgtaggggcggagtcccgcttgctacaacttttcaatatgctgcaggacctcacctacggcagctccaccgatgcacaggaccgcctggagcaactgctggcacagcgccttgagctggaccgggaaatcatggagctggaagaagggcagatcagccgccttgaccccacccgtatgcgcgaacagctcaaattaattgaagaaacggcagccaagctgctggcagacttccggcagattgaggaaaacttccggcaactcaacactaaggcccgggaagagcaaatcaaccggcagcacagccgggggcaggtgctggacgagattttctccgctcaggacgctatcatggaaacggatcagggcaagaccttcactgccttttgggcgttcctgatggatcagggccggcaggaccggctcgaccaaatggctgcgcaattatttgaacagcccgagctggaagcctaccgcaaccactctgtcctgccccgccttaaaatcctcctggtagaggctggcgaacgggtagaccggaccaccacccggcttatcgaacaactgcgccgttttttggcatcccgcacctttttggaaaaccgccgtgccgggcaggttattgaagaaattgagcaactggcgcttcaggtcaagaacgagcctccgcctcagcgcttttttagtgatattgctggcaagcctgcagtgaacctggtgatggaacgccgcctttttcagcctgccgatgagctgcagctggcctccgatcagccggtagcggggaatgccgtcgaagtccttacagagggactttacaatcaaatgtacatcgaccctgaggaactgaagggcagaatacagaaaatgctgcggggcaaacagcaggtgagcctgaaagaagtggtggcccacgccccggtggaaaaggggctcagtgagatagtggcctactttgggctggctacacagtgggaaccccgccaaaaagctgtcatcaataccgggcagcaggaaaagttgttttatgaaagcgagggacaaacttacgccgtggaactgccccaaatcttatttttgaaatga

SEQ ID NO: 45016 - DNA, 585 bp, Phaeodactylibacter xiamenensis
atgagcgaaccaactgtaaaggcggaaatccgtgcgccggccatctacttgctcaagggcatcctgtaccgggagcagcaccttgatgcctggaacctcctcctgcggtaccgggagcgcctgcgggcttacttcgaagtgcttgggctggagctgatcgtggaagagggggacgggtatgcctatttgcggcagcaaccggaggaagaagaagctgatcctcaaccccgcctcatgacccgacgccggctaagctaccaacagacgctccttattgtacttttgcgtaaacgcctcctcgagtttgagtcggaaggcaacgaagtcaggctggtgctccgttatagtgatatcgccgagatgatgcgcctgtactgggatgatacggccgccaacgagcgcaaacaggaggacaagctccgggctgatatcaagaaaatgatcagctttggcttcctgcagactgtgcgggaagaagaccgctacgaagtgagccgcatcctgaaagcctacgtccctatcgaaaaactgaacgaaattctcggacagctcaaagcctacgctgaagcccaaaaagaatcctga

SEQ ID NO: 45017 - DNA, 3483 bp, Phaeodactylibacter xiamenensis
atgctatctccatctgaaataccaagctccccgtccggttaccggctgcaccgcctggaagtcctcaactggggcactttcgacaagcatatctgggaaattagccccaacgggcagaatgccctgcttactggcgatatcggctccggaaaatccacactggtcgatgccatcacgaccttgctggtgccacagcaaaagatcacctacaacaaggcagccggagctgaaagccgggagcgcaacctgctgagctacgtgcgcggtgcttacaaaaatgaaaaggtcaacgcggcaagcaaagggcgggatgtgtatctccggcccgataacaagcacctgaccttactgctggctgtttttgccaatgccgcgcaaaacgatttcgctacgctggcgcaggtttactggatgcaggatgatagcgtcaaacgcttttacgtgctggctgaacaggctctgcaaattgaccccgacttcagtaattttggaacagatatccggcagctcaaaaagcagttgcgcaaacagcggggcgccgagctgttcaatagcttcagtgcttatgcagaccgctttcggcaggtttttggcatccggcagcccgaagccctggagctgttttacaagaccgtctccatgaaatcggtaggcaacctcacggagtttgtccgggagcagatgctggggcagactaatattcaggaggacatcaatgagctggtcgctaaatacgccgatcttaatacggcccaccgattagtagcgcaggccaggcagcagcgcgatctcctgcagcctatgattgaagaagcggacgagcgcaggaaagcattgcataaaattggtgagctggaagcacttttggaggaaatccccggctattttgcgaaagcaaaactacaggcagctatccggggtatggggcgtctgcaacaagactgggagactctggaggccgaaatgctggctttacggcagcaggagcaggcagcacaagaggagctggctcgcctgaaagctgcccgggatagcctgaatgttaatcagcagctggctcaaatcaaactgcaaatcaaagagctcggggcagagcgtgcgcgccgccaggatcaggcccgtacctatgaagaccggctcgcagaacttggtcgtttcctgccgaaagggcacgggcttccactcgggatgccggaagacgtaggcggtttcatggcacagaaacatcagttcacagcacaacgggagcaggcgctgataacgctggaagaactgcaggatgcccgggatcccttagctgttcggatagacaaacaccgggcacgcctggaagagctggacaaggagctgcaatccctcagacaaaggcccacgcaaattccgcaacgcaatttaaggctacggcaaaaactgctcaccgggctgtatcttacggaagaggacctgccctttgcgggtgaactgctacaggtgctcccggaggaggctaagtgggagggggcaatcgagcggcagctacggggcttcggccttagcctgctggtacccgaccaacactacgaagctgtcagcaattatctggatcgcattcatcttggtgggaaactggtctatttgcgcaccctgcctcatccggacagggatagccgcgagccggaagccaactctttggtgcgcaaagtgcagatcaaagcggataccccgttttacgaatggttggaaaaggagctgatcaggcgttacgattatacctgttgcgacacgatggctgcgttccggcgggcgccccgggcgcttaccgtcgaagggcagagcaaagacagccgggtgcggcataccaaagacgaccgctatgatgtcaacgaccggcggcagtatatcctgggctggagcaataaaccgaaaatcaaggccctggaagcggaacagcgggaagtggaagcggaattagctcaggcggagaccgaatatcagcgactgcgcaatgcagaacgggcattggacaagcagcggggtatacttgagcggctgctggagtacccttcctttgaaaacctgaatttcaagcccttgatcatacggattcaggcactgcgggaagagcagcagcgcctggaagccggctcagaggagctgcggcatctgcaggaaaaaataacagaggcggaagctgcggtaagtcagctgagtgctcaggtcggcgttaagtttgagcagaaaggcgttcagaaaaacgaactcacgaaattgcttggtgcaatcacggcattactccaccaaaccgggttgccgccactccctctgagcgcactgggcgcagtggtcaccaatgaggcggcgcaccgggtgttcagcgattgcagggcagtcacgataccccaacaggcaccttccagccatttgcaaaagcacctgcctgagctgagcccggaagcacctgcagaggcgtgggcacaggcggagcaaaagcttaaagaaaaaattgaaggcaataatgggatgatccggaagtaccgtgatcaggaaagccggctggcacagcgcatcgtcaggcaaatgaccaccttcaagcaacagtttccggaggaagtcatagatgtggatgcggacatccggtctgtggaggagttccgcgagcgttatgtgcggctgcaaaaggatgacatcccacggcatgaagaacgcttccgggagctgttgcgcaccaagaccatacagagcatcctgatgttcaagtcgaagctcgacacttttgaacaggacattaaccgcaaaatagaggaaatcaatcagcacctgcgcgagatcgactacaatcccggtcggttcatccgcatttcgaaggagccggttcacagagaggatatcagcaccttcaagcaagatctgagggcctgcctgtccaacacctacggagatgtggccgacgaagatctgtataccgaagagaaatttgagcatgtcaaaaagctcctcgaccgtttcgccggggggacggaagaagatagccgctggacaaagaaggtgactgatgtaagacagtggtacacctttggtgccgaagagctttaccgggagaccaacgagctgcatgagtatttcagtgattcttccggtaagtccggcgggcaaaaggaaaaactggcctatacgatcctggcttctgctattgcctttcagtttgggctggaatgggggcgctcccgctctcgctccttccgctttgtggtcattgatgaagcctttgggcgcggatcggatgagagtacgaggtacgggcttcagctgtttgagcggcttaatttgcagttgcttatcgtgacgcccttgcaaaagatcaatgtcatcgaaaagcatatctcgacggtgcactacgtgtccaaccccaaagggcaatcttccatggtacgcaacatcagtattgaggagtaccaggcagagaaagcagcccgggagcaagccgttaatacttcaaagtcatga

SEQ ID NO: 45018 - DNA, 1194 bp, Phaeodactylibacter xiamenensis
atgattaccgaaaaagcagcccttcagcagctggaaaagtggtggccaaaggtgttgcgggccggattggagcaggaagattactttccgcgctctctgagccgcatcggcaagcctaagccaaaggagtggatcgaaaactttgagcaggtacgatcggcacaggagcagtggctaaagcgcagccaaccgtataaatctaaaggctggagcctaagctgggaagagcgcgactaccgcagcattggtcgcaaccgctttattcagagtattgatgtggcaacccttgaagattatctgtacctgctaaagcgcgaacaggtatatgctcaggtcatggcagatgcagcgatggtttccgaggtaattccagggctgcaagattggtgcatcgcttccccccttgatgtggaaagccatcacacccaatggaatgagctgttaaaagtagtccgttacttcatggaggagcacagaccggggcaatattacatccgggagctgcccctggatatccccaccaagtttattgaaacccataaacggctactcatcagcttgctggatgaagtgctgccggggtcccgcatcaatgatcaatttcggggtgtgcgccattttgaacagcgctacgggctaaaataccggcagccgatggtccgcctccggctgatggatgtatctctggcggatcagtacttctccggggtacaggatctggcgctgccccttgatgcacttgcacagctgaagttgacagtgcgccgggtcatcattttggaaaacaagaccaactataccaacctgatgaatttactgacgctcccgcaggcaaaggagacgattggtattttcggaagtggctttggggtgggagcgctatcggaagtggcctggctatcagaagttgagctgttctactggggagatattgacgcacacgggctgcaaatcctctcccggttgagggcccaccatcctcatgtccggcctttcctgatggatgaggagacgctgaacaccttttcggcattcagcaggcatgatgccccgaagagcccggtggggcacctgcccgggcttactgaaacggagcaggcattttttgactacctcaaggagtaccaattgaggctggagcaagagcatatccccctggactatgtcaaacagatctttgaggcgttgttttag

SEQ ID NO: 45019 - DNA, 1455 bp, Oligella urethralis DNF00040
atgaactttcaacttgcgcaagcgcaatatcgtcgctattttgaggagcatcaggcttgggtgctgctgcgtgccgataatgcgccttatatttttgcttttattgagacgctttttagtgataatgctgaggtcacctatggacaggcgcgtcagttattagatgcggaactggtgcagagccgtgatctgggcgtctgggagagtaacacgcctgccactacctatttaaatcaatggattcagcaaggctatttgcgtgagttaaatgatcagcttagtaccaccgatgcttttcagagcgcattgcgttttgttaaggccttggatgagcgttctgccggtaccacagcctcacacttgaggattgtgcaggaggcggtgcgggattgtgtggtggcgctcagtacggagccagaggataagttagcccatctgcagcagaaaaaaaccgagattcaggctgaaattgatgccattgaggcaggggtgattattgagttggatgaagccaccaaacgtgagcgtatgcgtgaggtatatcatcttgcctttcagttaagcggagattttcgtcatttagaggaggagattcgcctacttgacaaggatattcgcacgcaaatgatcacggatgatgccacccgtggcgaaattctacaaaagctgatggatcaggaagcggaattgcttagaaccgaggcgggtagtgcctttgatggtttttttcaattgttatgtgatccgcatcggcagcaggagtttcgtgagcaattgcggttcttggcagaaagtgatgcggcagggtatttgactgcatcacagcaatattatttggcagagttgttgacggtgctttctaaagaaagcgatcaagtgattcgtatgcgtcgccgtaccgagcaggagctacgtcaatatattgagagtggtcaggccacggaaaatcatcaggtgaatcgcctgatgattgagttggaaaaggcagcgattgcgttggatatcgaccccgccatgttgcgtcaaaaaaccgcacttagtctagccattgaacccatttcttttttctccttagattcatggcgcttacgagcaccggcagaacgcctagaaattaataccgatgaagaggagaatttgcagcatttggatgctcatgtattggccgaattagaaactgtgaatacgatggcggtggtcagtgagctccatcaaattctgcaacaagatggggtgagaaccatccgggaattagcagagcgccgagtgattcatttgggtttggaggagttaatggtctatgtacgcttggctaaggccattgatgccgtggaattgacgggtcgtgaaagctttgtgatttacgatagaaagcagccgcttcgagtgtcggtaccgaagcttttactaagtgcagagagttttccgccgtctttggatagtctagtgatttag

SEQ ID NO: 45020 - DNA, 3345 bp, Oligella urethralis DNF00040
atcgaaaccggcggcagaaaagggcaggtacgtttatcggaaatctcggtctacaattggggttctttttctgagcgcatacatacggcacccattgatagagagggcacgctcatcaccggggacaatggctcgggtaaatccaccttaatcgacggtttaatggccttattacaagcacctggtcgtgccagttttaatattgccgcggcccagggcgataagcgtgatagaaatctagtgtcttatatgcggggtagctacggcacctcgcatgacggagccggtacccgtgtcttaaataaacgtcctaaggcggtggtgactggtttgcgggcgcagtatcagttcgacggtggcagtgtcgtgagcttgatggcgatattttttatcaaagatgccagtaacagctacagtgatgttaataaactgtattttattgccgatgaggatattagtcttaaaacgctgttggacgctttttctaagtcaagcatgcgcgagtttaagcgttgggttgagcaacaggtcaatttacgttgttttgacgatcgtttcagcgaatatcagacggtttatcgacaaaaactcaccatggggaatgaaaatgcccctgccttgttggctcgtgccttgggtttaaaaaagattgatgacttaaccaaactgattcgggaattggtgttggagcccggtaatatccgggaattagcacgtgatattgtgcacgagtttgccgatcttttagccacgcatgagcgtttggtggatacgcgcgagcgagttaagcatttgcagcgattactgcccctccatcaagcattgcaggaggttgaaaagctgctagcgcagttggagcaagataaggccggtctacccatttttgaagcaaagcaacaagttatcgctttagctgagcgcattcatcgcttagaggaagaaatggcggtgcttaaagaggcgatggagcgattaagtgcagaagagcaaacggcagacgcttatacggatcaatgctacgccgcttatctgcagttgggcggcagtcaaattgagcctttgcgtcaacagctgagtgcattgcaggagcgcctgggacgtatggtgcgtgacagtcagcgctatcagaagctctgtcgtgatttacagttaagctatgacttagtaggcagcgtgtttcgcgataatcagcgtgtggccaatgagcagctgcggcaagcggagtttgaattgccgcaccttgaagaagccttttttgccaacaaacaaaagctaattgagcttgatgctgagtaccgggaattaagttcgctgattcatgagatgcaacagcgtccaaactccaatattgatattaaataccaacagctgcgcgatcgtatggtggaagagctggggattgccgaagaaaagttggtctttattggcgaattgattgatgtggcagaacttgagttgccctggaaaggggcaattgagcgtgccttgggtcagcgtaaattgaatttattggtaccggaagcggatgctaagcgtgttacgcgctggttgaatcaacgtcatttaggtttaaacctaagcgtggagctagtgggtgcagtgatgcaaacggtgagctcgtttgaggcgggcggctttttagaaaaattgatttggcgtgatcacgcatatcaaaattggcttaaaaatcatttaagccgctttgatctctggtgcgtagacacggtggaggaattgaatcgtacgccttactccatgacggtagagggcttaatccacctgaaacagggttcttttgagaaaaaagatcgtcacaaagtcgatgatcgacgtcaatggcaattgggttttgacgctaaagccaaactgaatttgttattggcgcagcagcaagcattgcaagcctcgttagtcacggccaaagaacaggcagtgaaaagccaacagcagcgggatgactatcgtgagcaaagtcaatggtgtcagcaattattgacctttgactgggatagtattgatgtgccacgttatgaaaaagagcgtgaggagttaagtaaacgcttagcagccttggaagatgatcaaggcgatttacaacaggccaaattccgttgggaggaggccaaaaaagcagttgtcacgattcaaaagcaaaaagaggcgcaaaacaaaaaaatcggcgctctggaaaacgcattaaaatcagccgaaactcaacatgcagagaaattacccttggcacaagaggctttggatgaggtggtgcaagctcgtctcgctttgcgattagacgcatatgatgagaatgataaatcagcttattatgcgcttagtaaagccctggagcgagagtatgctcaagcacagaatcgccaaatcaaggataaggaagcggtagcgagtttattaggtagctttagaggacgagaaaaatggcagccttataccgtggattgggtgagtggttttgaagcactgtatgacgccttaacctatcttgagtatttggaaaaagaaggcttgcctgtcttagttgagcaatatcaggagcgtttaaataaaaatatgacgcaatcgattgctttactgtataccaatattgaagcggagttcgctgatattcgcgatcgtatcagccggattaatcgggtgctgagtaaaacagaattcagacccaatagttatttaaaactgaatccacgccgtgagcgctatcctgcgattcaagattttacgcaaaaaatgaatttggccttaagtagtatgaatgatgccgatcaggataagcgctttagcttggtaaatgacgtggtcagtattttaaagaatgccttggagtccggtcgtgtggatgatgagcgcttattggatccgcgtaagcaaatgtccttttatgctgaagaaattcagttgggcacagagcaagtgttggatgtattagattcctctagcggtaaatcaggtggtgaaaaggaggcctttgccggtacgattgtagcagctagcttagcctatgtattgacgcctaaggatgaggagtatccggtgtatgcgacggtgtttttagatgaggctttttcgaatgcagcagagggtgtggcggcacgagtgattaaggtgtttaaggcattaaagttacatgtgaacttaattacgccttataaaaatctgaatgtggcgcgtgaagcggcacgcagtttgattttgacggagcgtaaggctgaaactcatgaaagtcgattacgagaaattagttgggagctgattgacgagcagcaggctaagcgtcagcgggacttaaagcaatatgcacagagccaaggggttcaagtgtatgagcagtaa

SEQ ID NO: 45021 - DNA, 1233 bp, Oligella urethralis DNF00040
atgagcagtaaggcaccggactggggtgtgttagtgacgacagcgcgcgagcgttggcgtagtcgctttttggataatgctaaaaactaccgcagtgtattagccggcgagattgagtttccgctgacactaccattaaaaccacccaaaagcgctaaggacattcttgcgcatacggcgcactttcaagctttttatcaacaatggcaagccttggagcgcagcttggcgaatactgcctgtgaggtggtgtgggagcttaagcgctttcagtcggtggccgaacagaggttgccggtgcgtttggtggtgcacgatgcggccggattaatgcgttttattggcgcctcggcttatcagcaatggcagagctcagagcgcttattgcatactttggtagcgggaattggtggtacagactcagtgagtctacgcacaaccttgattaagcatttagccaccttagaagccatgagcgaggacaagctgcgcttattgttaggtgtcttaccacagttgcaagcgcagatggggcggggtgaatacttaagagccttgccggtcgtgggtgttgataccaaatttattgagcagcatggttatttgctagaagctattttagatgtgttgcatgagggggcgatcagcgccgccggtggtttatcgtcttggttagcttgcctggaaaagccgcgtgattggttattggtgcggcccctatgtgctaagcctttagcggcgttggcggggatgccgattttacgcctctcaacggagacgctatggcacatgcctttgccagcacacaatattttaattattgaaaatgagcagtcctgcttggctttaagccatattccggagactatcgttgttgctggtggcggtaaaaacctaagttggttaggggcggagtggttggctgataaacgagtggcttattggggtgacattgactccgaaggctttgccatgctcagtcaggcgcgcgctaaggtgcctcagctgaaggcgttgatgatggatgcggctaccgttgagcgctttgctgagcggatggtggaggagcctcactcggtctttaaagcaccggaatgcttgcttgaggcggagcaacatgtatttcaaaatttacgtcgtggtgtttatcagcaagggcgtctagagcaagagcgcttagatagagattatatacagcagcaggtattagcatgggctgtagcggaggaatag

SEQ ID NO: 45022 - DNA, 1353 bp, Pseudomonas aeruginosa; identical to SEQ ID NO: 43230

SEQ ID NO: 45023 - DNA, 663 bp, Pseudomonas aeruginosa
atggatgatgaacagcctctcatgagcgccgctgtacaggtcgatgagcgccggacgccgcaacgggtacgggaggccgtacaggaaatgctcaagtacggtctgctggaagagagtcacaagcccaacctgtatcgctcagcgctttccaatatcgaggcggtcgacagaatcctggagccgctcgaccttgccatgggggtcgacgaggttcgggggctggtgttcgttatcgttcgccagggcgaggtggccgagcaggatgactggtcgcaccccctagtgcgtcggcaaaggctgaatctggagcagtctctgctgatagccatcctgcgccagcagttcatcgcctacgaacaggaaagcggtacgggcgccagtcaggcatcggtagtggtcgatgagctgattccccaattgcaggtttacctgggcgagctgggcagtgaggcaaaggagcgcaatcgcatcatcacgctgctggatcagctcaaggggcatggcctggtgtcggctttggacgcccatgatcgcgtcatcatccgtcccatcattacccacttggctaacccggagaacctgcaggcactcgtggcatggctgcgagagcaggtggagggcgcggcgacgccggctgccgatggcgaggaggatatggcatga

SEQ ID NO: 45024 - DNA, 2940 bp, Pseudomonas aeruginosa
ctgggggccgtgctctggttcgaaggcacaagctcctcggcatcggatctgaaaaaactgtggctgttaagcgagtcccccgagcagactctggagcattggctcagccagcatcacgcaggcggtatgcgggctttgcgtcagatggagaaggatgggacgggtatctggccttatcccagcaagaaagctttcttggccaggctgagggattacttcgaggtcggtgaaaacgcattcaccttgctcaaccgcgctgccggcctgaagcagctcaatagcattgacgagatctttcgcgagttggtgctggatgaccgttccgccttcgagcgggccgccgaggtcgccggcagcttcgatgatctaaccgacattcaccgagaactggaaacggctagaaagcagcagcgctcattgcaaccggtcgccgatggctgggagcgttaccaggtcttgcaagaacagctgcacgataagcaggctctcgaaggtatcctcccggtttggttcgccgagcaggggtatcgactgtggttggctgaaaccaacaggctcgagaaggagtacaaaaaggccgaactggatcaggagcaatgcaaaagtcagcttgaggcccagaaaggtgtggtcgatcaacatcgccagcgctacctgcgagtagggggcgcagggatagatcaattgcgcgagcgcatcgctgattgggtgagggagtgcgataagcgcagcctgaaagccgagcaataccaactcttggccaaaggccttggactagcggatgagttatcggccgctgctctcaaggagaatcagcagcatatcgcggcacgcctggaaatactggaccaacaaattactgacgcgcgccaaaaggcgttcgacgcaggcctcgtccagcaggaactcaatggtcgcctacagaccttacagcaggagggtgctgaggttgagaaacggccaggctcgaacctgcccgggcaatttcatgctttccgaagcgatctggcgcaggcgcttggtgtcaatgagtcggccctgcctttcgttgccgagctggtgcaggtcaagcccgaggagctggactggcgtggcgccatcgagcgggcaatcggtagccaccggctacgcatcctggtgccgcaggactcatcccaggccgcactgcgttgggtgaatcaacggcacaaccgcttgcatgtgcgcttgttggaggtacaggagccgacgtcgcgccccgtgttcttcgacgatggttttacccgcaagctgaccttcaaggagcatccgtaccgagaagccataaaggcactgctggcggacaatgaccgccactgcgtcgaaagcccggagcaattacgtcatacccctcatgccatgacggcccaggggctgatgtcgggcaaagaacgcttcttcgacaagcaggaccagaagcgtctggacgaagactggctgaccggcttcgataaccgtgaccgtctggccttcctggctgagcagattcgcgaggtcaatgagcagctcgagccagccaagctcgccttggatgctgcccagggcgacgttcgtcagttggagactcaagcttcgctgctgaatcgtgtcaaagaactgcagttcgaggatattgatctgccgggtgcccagagtcagctggagtcgctgcgtacgcaactggccaccctgacgcgccccgattctaaccttgccatgatcaaggtcgagctggatgcggccgaggccctgcaggagtctctggatcaacagctccgccaactgatcgaacagtacgttcagttaaaaactcagtttgaccaggccgcatccgctacccgtaaggcctataacagcgcggagaaagggctgaacgatacgcagcgtgaactggcgcaagcgcatttcccgactctgaccgcggatgacctcggcgatattgtcgagctggagcgcaagcatacgcgtgagcttcaagggcagctcaaagcgcttggcgagaaactgggcgatcagaaatcagagcttgccaaacgtatgtctgatgccctcaaggtagacaccggggcgcttgcagaggtcgggcgagagctggtggatgtccccaggtatctggagcgtctgcgtgtgctgaccgaggaagccttgccagagaaactcaagcgcttcctggaatacctcaatcgctcctcggatgacggcgtcacccaactgctcagctatatcgaccatgaagtctcgatgatcgaggaacgcctggatgacctgaatagtacgatgcagcgtgtcgactttcagcccggacgctatctgcgcctggttgcaggcaaggtcatccatgaaagcctgcgtaccctgcagcgcgcccagcgccaactgaactcggcgcgtttcatcgatgatgaaggcgagagccattacaaggcattgcaggatctcgtggggttgctcaaggacgcctgcgaacacagcaggaatcagggagccaaggcgcttctggatccgcgcttccgcctggagttcgcagtatcggtgatcgatcgagaaagcaggaatgtcatcgaaacccgaacaggttctcagggcggtagcggtggcgagaaggagatcattgcctcctacgtgctgaccgcttccctgagctatgcgctttgtcccgacggcagcagccggccgttgttcggcaccatcgttctcgacgaggcgttctcgcgcagctcccatgcggttgcaggtcggatcatcgctgcgttgagggaattcggcctgcacgctgtcttcatcacgcccaacaaggaaatgcgcctgttacgccaccacacgcgttcggcagtcgtcgttcatcggcgcggcctggagtccagtctggtttccctgagctgggaagctttggatgagcatcatcaacagcgcatcaaggctatgcatgaagtcgcccactga

SEQ ID NO: 45025 - DNA, 1182 bp, Pseudomonas aeruginosa; identical to SEQ ID NO: 44163

SEQ ID NO: 45026 - DNA, 1506 bp, Comamonas testosteroni
gtgataaccactaagcaggcggggcccgcactttggagcgtgggagtgaaagcagacaaagccatcgcgacctaccggcgcatgcgggcgcagccgctgtggcgcctgcttgcctcgaacactgggcctaccgtcattggcctgcttcaagcccatctctacgagagtgagcgaagccttcctgcctcaatttttcacgaacgaatcacaagggatctggaagagctgcgcgcccaaggtgaagacttcccccaaacggcacaagcgtatgtcgccagctggctcgccgatgggtatctggagcgacgattcccggctggggcttcagaggaggaatatgaactctccacggccgccgtcgaagccattcgatttgtctctggcctggcgcagccgcactcagccgcaaccgaaagccgcctgacgctcgttatcgagggactggccaggcttgcagaggacaccgacaccgataaattccgccgcatcgaccggctcatggccgagcaagcccgcatcgacaaggaaatagacgccatccagaaggggcagatgcgcgtattgccccatacaaccgcacttgagcgcacgcgggagatcatcacgctggccgacgatcttgcaggcgatttccgccgcgtccgcgatcagttcgaccagctcaatcgagatctccgtgaacgcatcatggacaacgatggcaatcgcggggacgtgctggattcgctgttcgccggaatcgacctgatttcagaaagcgacgcgggaaggactttctccgctttctggcgattgcttacggacccagagcaagccgccacgcttgatcaggcgcttgatagcgtcatgtcgcgggagttcgtggggcaactcgaagccaaggagcgacgattccttctgcggctgacacggacccttctcgagcagggcggcatggttcacgaggtgctccagaccttcgcgcgcagcctgaagcacttcgtccagagccgtgaatacctcgagcaacgccgactcaatcacctgctgaaagacgctcagcgagcagcactcgccctgaaggacgaagtcagggctacagaaaccctccagtacacgcttgagctcacgagcagccgtttgcgctccttgtctcaatgggtgctgtacgacccctccctacaagctttgcccggccagatggcggaaggggacgccccgccaatcgacctggagtctgtcagtgaactggtcgcccagtccgagatcgacttccgaacattgaaggccaacgtgctggcggtcctggagcaacggtcccaggcatcgattgccgacgtgctggagcagttccccgccgcacagggtttgggcagcgtcgtcggcctgcttgcattgggcagtcggcatggtttcaaagccgaccatagcgaaaccgtaggctgggttggaggcgacgacgagcttcgtagcgcccgaattccaaagatcttctttttgagggagcgggccaatgaactggtctga

SEQ ID NO: 45027 - DNA, 678 bp, Comamonas testosteroni
atgccagccgaagcacaagcgccagatgctgcgcaggcacctgccaacacccttttcatgggtgacagcggcgagttggcgctggatacccggcgcgccctggtgcagctgctggcagggccatcgctcgacggacgtcgacatccaaaactctggccgatattggtgcgagacgaagcggtgatacgtcggcgtcttgccgaactgtttctcgaactggtcatcgaccgggacgtacaagttgccttcacccgtcaagcagataccggcgaccttgaagtgccactcctgctgcgtcgcgcgcagctgaccttcattgactccattctgctgctccaccttcgccagcgattgacccaagcggactcgcagggcgaccgtgccgtggcatcgactgacgagatcatggagtttcttaccctctatgagcatgcctccaacaccgaccgcgcaggattcgtgaaacgtgttcatgcatccatcgagaagatcaagaagcacagcatcctccagaaaattcgctcgagtgaagatcgtttcgagatttcgccaacgctgaagctcctcttctctgcagaagaaatacaagccctgacccacttgtatcaacgcatggccgccggtgagacgccagcgcaactggctcagactgagtccgatgaggaggccgaccaatga

SEQ ID NO: 45028 - DNA, 3375 bp, Comamonas testosteroni
atgatctcggaaccccaaaccgcgtccttgttcgcccgggagcaattccggatgactcgcctgcaggtttacaactggggcactttttctggcctgcatgacgtaccgatcagcgaacgaggctttctgtttgtcggtcgatcaggggcgggaaaatcgacgcttctcgacgctttttcggcgttgctggtgccacctcgctggattgacttcaacgctgccgcgcgcgaggcggaccgcagtggccgtgaccgaaacctcgtcacctacatacgcggcgcgtgggccgaacagaaggatggagagtcgggtgagatcgccacccgctacttgcgctcggggacaacgtggtctgccctggcactgacctaccagaacgcactgggccagtctgtggtgctggttcaggtgttctggcttcgcggcaatgcgaatggaagcaccgacgtcaaacgccactaccttgtcctggagagggcctttgacctgcgcgagctggaggacttcggccaatccaacttcgacatccgaaagctcaagcagtctttccccgaggcgttcgctcgcgacgagtttcgtccctattgcgaacgattctgccgcctgctcggtatcgagagcgaaatggcgttgcgtttgctgcacaaaacccagtcggccaagaatctcggcgacctcaataccttcctgcgcgacttcatgctcgacaagcccgagaccttcgaggtggcggatcgcttggtcagcgaatttggtgaactcaatgctgcccaccaggcggtagtgacagctcgcgagcaggttcaaacgctcgcgccagcgcgggagcaatatcagcgcagagattcgttgatgctgcaacgcaatgggctggatgagcttcggctgggcgttgatggctaccgggaaacccgccgcattgaactcctcaagcagcatgtcgagtccctggacgtgcaagccagcggctcggaaggtgaagtaagtcgacgtcagagcatcctggataaccacaccacaaccttgcgcgatctggagcgacagcaccgtgaagcaggcggtgatcagatcgagcaatgggaagcagagaaatctgggctggagggccagcgcaaggatcgcctgcgcaaacgcggccaggctgaagatgcgtgcaagaagcttggctggagtctcccggattcgcctcaggccttagctgaactgttgggcaacgctcggcaggaagtcgaaaactgggagcagcgcagcaacgagaaccgcgaagaacagttccgcttggcaggtcaaaagagagacgctgagacggctttttcgcaagcggtgaaggaggtgcaggcactccagcgccagccatcgaacattcctgccgatatgctcgaaatgcgccgagacatcgccgcagctattggggtagcagaatcggctctgcccttcgtcggcgaactcattgaggtgaagcctgacgaggccgagtggcaaggtgccatcgagcgcgtactgcacggattcgcgctctcactcttggtggacgaacggcagtattcggcgctggcgaatcacatcaacaacacccatcttgggcaacgtctggtgtactaccgaactggtcgcccggagacctggcaggcgaagcccatcggcgctaactcgctcgtcctcaagttgaacgtcaaagagggtacgtgtgccgactggctgcaggccgagctacggcaacgcttcgattacgcgtgcgtcgactccattcagtcgttcaggagcgctgatcgagccatcacccgtgagggccaggtcaagcacagcaaaacccggcatgagaaagacgaccggagaagtgtcggtgaccgacgaaactgggcgctcgggttcgataaccgcgagaagcttgcgctctttcaagcccaggcccaggagctggctgccacgattacgcgcctcggaggagaaatcgaaaccctcgccgaccaagacaagaatcgtgcgacccgagcgatgcagtgccagaccttggtgaatctccagtggcaggaaattgatgtaatcccgttgctagaccgcatttccaccatcgaacggcagattcgcgaagcgcaggaaggcaatacagccttacagcaaatcagtgagcggatcgacaagcaaaagaactttgttgatcaagcagacaaggacctccgagaagccaaggtcgcgcacgactcagttctcaagcagatcaacgacagcacgcagaagctggaatccctccttcaagatgcttccagagttccattgactccccatcagatgaaggggctcgacgaacgcttcaccaagcagtcagacgcggtcaggctcgaaagcctcgacaaggtagcaaccgctgttgagagagggctcaacacagaaatcggtgagatcaaagatgagatcggcgattgcgagaaggaaatagaaacacgctttgccgatttcaaacggcagtggccaatggatgctggcgacatggacacgagcctcgccagcgcaccggactttttcgcaaagttggttcgactggaaacggatggcctgcccgcctatgagcagcgattctttgaactgctgcagaaccaaagccaccagaatctggcagcactctccacctacctgaacgatgcgcgtaaggccatcctagaacggatggatctggtcaacgacagtcttggccaggtgccgttcaaccaaagcgccaatcaacgcacctatctccacatcgacgccagtgaccggcaacttgctgacgtcaaggagttcaagcaggagatccagcaggcacttagccatgcgtggacggaggaccgcgagtttgccgaggcacggttcctggccctgcgccgacttgttgatcgactcgccagtcaggaccccgagcaaaaacgttggcgtgagactgtgctcgacgttcgacagcatgttgagttcatcggacgggagatcgatgaaggcggcgttgaggtggagatttatcgcagcggcgctggtaagtctggaggccaacgccagaagctggccaccacgtgtttggccgcagccctgcggtatcaactgggagggaacgaccacggcgtcccgatgtatgcacccgtcgtgcttgatgaggcattcgacaaggctgacaacgagttcaccgctttggcgatgaacatctttaccaatttcggttttcaaatggtcgtcgctacgccgctgaagtctgtcatgaccctcgaaccattcatcggtggcgcctgcttcgtagatatcagcgaccggcgagtgtcaggcgtcctgctgatcgagtacgacggtgatcgtcagcggttgaaactgccggagcacgctcgagaggaggctagcgttgaagcttcctga

SEQ ID NO: 45029 - DNA, 1164 bp, Comamonas testosteroni
ttgaagcttcctgaagatgtcagacagtttcttgtccgtcgctttcagagcaaacaccgcgagtggttgatcggtgatgctggcgagagccaatggccactggaagttccgctcggcataccgacggaacaggctgctctgcggcaagtcgacggcgtccgcgcttgggtaagcgcatggcaacactggcaaggaatcggcaccctttcctggtgtgagcgccggtggaaagcgcttggcgtccagcgactgccagaaaaactagcgttacgcggtcctgaagatgttgccaggtggattggtgaatccagacggtgggagcgagcccagtctcgttaccaaacgctcactgctcgctggccggttctggcgcagcagttgccgaggtactttgacatcctcgctgactacagcgataccgattttcgccggctggcagagatgctggattggatcaatctcaatccgaaatccaatctctacccacgacaaattccggttgccggtgccgacagcaaatggttggaatcgcgcaaggggcttatctctgatctggttgcaacgattcagaatgacccaacaggggatcgcgacttctttaggcgctgcggtttgaggccgcagccgccgttaatgcgcatgcgcgttctggacccagagctgagagcccgtttgggcggccttggcgatatctctgcaccttgtgaggatgtggcaagcattggcatacagccaacgaatgtcttcattgttgagaaccttcaaaccggacttgcctttgatgagctggcaggggctgttgtgatcatgcgactgggttacgcggttgacgttttggggcagcttccatggctacaacaggcgcaatgtatctattggggtgacattgatacgcatggctttgccattcttaatcgagccagaacatacatccctagcctgaagactgtgcttatggatgagtcaacgctgatgaatcatcgagatttatgggtggaagagaaggaccagcatctttccatcgaactcccattactcaccagcacagaacaaaagctctatcagttgctgaagagcaatacctgtgggcaacaagtccgcctcgaacaggagcgggtgcgctgggatgtggcgtggacagccatacaggcaagtattcgatga

SEQ ID NO: 45030 - DNA, 1437 bp, Mycobacterium rufum
gtggaccagcacggggggccatcggttgctgacctgctcgagtcgaaccgcgacctgcagggttcgccgaccgtccggctgttggccgccaccaacgtgagcctgtacgcgaccctgatggaccgtcacctgtccggcggcgtggtcgccgagaccgagctcgtcgtccgtctggagcgtgacctcgtcgacctcgccgacgaccagtccggcctcgcgctgatcaaggcgtgggccagccagggttggctgcaccggatcgtcgatgagcgcaccgaccagaacgtctgctacctgacccaggacgcccgccgcgcgctggacttcctgcggggcatgcgccgccaggacacgatcgccaccggcggctcgatccacggcatcgccggccggctccgccacgtggcgctcaaggtcggcaacgaccccgcccgcatccgcaagcacatcgagagcgagatcgagtcgctgcgccgcgaactcgacgagctggaggccggcgagcggccggagcccgacgtcaccgacgcctacgacgaggccagggcgatcgctctgcagatggaacgcctcatcaccgacatcggtcagtacggcacgatgatcgagcaggccaccgcggcgctggacgagccgatcgacagcaatgtggagtaccgcgaccggcagcggcagatgtacgccgactaccaggcggcgtgggactcgcagggccgcgacagccaccgggcgttcctgcgcatgatcaacgaccccgatcagcgcgcggagttcgaggccgacgtcgcggccgtcgccggcgcactgccgcacctcgacccggcgctgcggacggtgatggccgggttcttcgaactggtcggccatcagatcgacgaggtcgaacgcatccagcagcgctgcgcgcagcgggtcaagcggttcaccgcgttcggcaccctcgagcagagtcgcggcgtggcgcggcaactgggcgaggcgatcggcgcggcccgcaccctgctcaagacctcgctcatcgattcgcggctggacctcgaactccccctggcccgccatgcgatcagctccgtcggtgcgctcagcttcaagatcggcgatctgtcgaatccccagcccgccaagcccgcaggcagcgacgtcgacctggccagcttcgccgcgctcaccacccaggtcgacgcgcccgcgatgtcggagatgctcaacgccgccgtcgcccgcgggccggtgtcgctgcccgacgccgtcgcgatgctcgatagcgcgtacctcggccacgtcatcgtgctgtggtcctgggcgctgaaacaaccgaacgacgacaccggcaggtcgacgaccgtccggttccggtcgctggacggccgggatcgcgaaatggccgtcccggacctgtctttcaccgaaccgatcaccgcaggagtggcctcgtga

SEQ ID NO: 45031 - DNA, 690 bp, Mycobacterium rufum
gtgagcaccgatacagcggccgacttcgctgcgttttctgacctgccgcaggtcgaccagagcgcgcggcccccgcaccagcgccgaccccgcttcgacggcgacgtctccgaactgcccgaccgcgcctgctgggcgctgcagcacctgctgacccggcgctacatcagcgccgagtccgacgccgacatctacgcgtgggtgctcgagtaccgccagcagctgtcggtccggctgtccgaactcgatcttttgctgcgggtcgtcgacgggaccgaggtggcgttcgtggagcaggcccgctacgaatccgccaagggcatcaagcttctccggcgcgagccgctgggcacctacgactcgatcctcgcgctgcatctggcgcagatgatgcgcgcctcgggcgggcagagcgtgttgatctcccgcgaggagatgcacggcctgttctccggtgtgctcaacgatgtcgaccgcgacgcggtgacgttcgccgggcgcatcgacgccgcgatcgcccgcctgacgggtctggagatcctgcggcgcagccgcgacgacgaggacagctacaccatcagcccggtgatcaccgcggtgatgacggccagcgtgatcaccgagttgcagcagcagttcgagctgttggccaccggcggcgcgagtacgcaggagacccctcgtgactga

SEQ ID NO: 45032 - DNA, 3396 bp, Mycobacterium rufum
gtgactgagcagttccacctgtcccggctgcaggtcatcaactggggcgtgttcgacgggtaccactcgattccgttcagcgagggcggcgcgttgatcgccggcgcctccggcagcggcaaatcctcactgctggatgccatttcgctcggcttcctgccgttcaaccggcgcaacttcaacgcctcgggcgacaacaccgcggccgggtcgagcgccggccggcgcaccgtcgacaagtacgtgcgcggcgcgtggggtcagcgcagcgatggcggcaccagccgggtgatgtatctgcgcggcgacgggacggcgtggtcggcggtcgcggtgacctacgccagcgacagcgggcgcaccgtgacggggctggtgctcaagtggctgaccggtgagtcacgcaacgactcgtcgagccggttcgtgctcggcgacggcgacctcggcatcgaggacgtgtgcaaccgttgggcggcaggacgtttcgacaccggggtgttcaaggaggaccggggcgagcgaagcgacgggagaagccacggctggcggttcaccaccaaggtggagtcgcagtacctggcccagctgtacgcgaccatcggcatccgtgcctccgacgccgctcagcagttgctcggcaaggcgaagtcgctcaagagcgtcggcggcctcgagcagttcgtgcgcgagttcatgctcgacgaacccgacagcctggcgcgactgcccgaggcgctcaagcagatcgacccgctggtggaggcccgcgaactgctggcggtggcgcagaagaagcgcaagatcctcggcgacatcgagaagatccagcagcgctacgcctcggagtccaccgatctgggcatcatcgatctggtcgacctgccgatggtgcgcgcctacaccgatcacgtccgactcgcgcagtgcccgccgcagatcgcgcaactcgacaccaccgtcgatcagctcgacaacgagtacgaggacgtcacccgtgcgctgaatctggccaaggcggaagcggattcgctcaacgcgcagatcagcggcaccagcgccaacatcgggccactgcagagccaggtgaccgccgccgagaccgaggccgagcaggtgtcgcgccgccgcagcgcctacgaggacctgctcgtcgcgcaggacctcgacgtgcccgacagcgccgacgagttctggaacctgcgcgaagacctgctgagccaggccaccgaactgctcgccaaggtcgagcgccaccgcgaggcgtccaccgacgccgagtacgcccagaaggcggcccgcatcgcacgcgacgacgcggccaaggaactcaagcgggtcgagcacgtcggctcggcgctgcccgaattcgccctgctgatgcgcgaccagatctgcgccgccgtcggcgtcgacgcctccgcgctgccctacgtcgccgagctgatggatctgcgcgccgaccagacgcggtggcgcaccgcggtggagaaggtgctgcgcggtgtcgggctgcggctgatggtgcccgaccagcactggacggccgtgctgaccttcgtcaacgagacgaacatgcggggacggctggcgctgcaccacgtgcgggccaggatgctgggcgccgatccggtcgaccccgagccgaacacgttggcgggcaagctgttcgcggtcgaccccgcgcatccgtgcgcggccgaggccgtcgacgtcgtcacggccgccggcgaccacgtctgcgtcgacaccccggaggtgttcgcgcggttccgccgcgcggtcacggacaccgggctctacaaggactccgaccggctggccatcaaggacgaccgccgcccgctcaagcagtcggaatacttgtaccagggcgacgtgtcggcgaagatcaacgcgctgaccgtcgatctggccgcggccgaggaggcctaccagaaggcgcggcgcaccgccgacgacatcgccgcgcagcgccagcagtggcgcgaccgcgcggcggcgtgcaaggcgatctgcgagcagttcccgcagtggagccagatcgacaccgagaccgccgacgggcacgccgaccggctgcgcgaacagtacgagctgctgctcgccgacaaccccgacatcgaggcgctcaacgcgcgcgccgacgaatgctggtcgcagatccagaaactgatgacacggcgcggcgcgatccagacccgccgcgacgatctggacgcccgccgcacccggctgctcgagctctcggagcggttgtcccccgcgttcgtgtcggagccgctgaccgaactgctggaccgctacgccggtcaggtgccggtcgggctggagctgctggaccccgaaccgcaccgcgacgcgctgttctccgcgatcaagaaggaacgcgaacagctgcgggagagccgccgccgctcctacgacgaactggcccgcatcctcaacacgttcgacaccgcgttccccgacgcgatcccgaacgattcggagaatttcgacgagcgggtgcacgactacgtcgcgctgtgccggcacattgacgaacgggaactgcccgaggcgtacgagcggatgatgcgtctggtcaccgagcaggccccggacgcgatcctgacgctgcaccgggtggccgagcaggaggcgcggcgcatcgccgagcagatcgaacgcgtgaacaccgggctcggcgccgtggagttcaaccgcggtacccggctgacgctgcgggccaccccgcgcagcctgaccgcggtgtcggagctgacggagatcgtgcgtgccatctcgcggcgcatcgccgaggtggggctgggtgacaagcaggcgatcctcgatcaatacgccgacatcctgcggctgcgcaatcggctggcgtcgacggcgccggaggacagggcgtggacccgcgacgcgctcgacgtccggaaccggttcacgttcgactgcgccgaatgggacgtggcgtccgacgagctgatccgcacgcacagcaacgccggcgacaactccggcggcgagcaggagaagctgatggcgttctgcttggccggtgcgctcagcttcaacctggcagcgcccgagagccgagacaacaggccggtgttcgcccagttgatgctcgacgaggcgttctcgaagtccgatccgcagttcgcccagcaggcgctgcaggcgttccgcaagttcgggttccagctggtgatcgtcgcgacggtgcagaacgcgacgacgatccagccctacatcgacagcgtggtgatggtcagcaagaccgaggcgacgggccgcaacgcgcggccggtggcgacggtggccacccggtcgatctcggagttcaccgagctgcgccaccagatgcgatccagcgaaaaagtgcctgcgctggcgcgctga

SEQ ID NO: 45033 - DNA, 1479 bp, Eggerthella lenta 1_1_60AFAA
atggcagtcgtatccagcacgcttgctttcatatctctacagcaggacaacgttgcctggaagcttcttcatgcacaaaacgcgcctatcatcctctccatactcgacgagaatttggggaaagagaccggcaaaagaaccgttgccgatctagtcagccttgtcgatgcggatctcgaagtgctacgcgagcgggttcccgagatagggccaaagcgctcggcgcgggactattgcgagcagtggagacgcgacggataccttgtgcgcaagccgctcgcggattcgcgccaggagacctacgagctttccgcaggcgctttggcagccatcagcttcgccaaagggttggcgaagccccatagggcagcgacgaaatcgaggctgaacatgatcctcgaccagatagcggaattgtcgctcgcaaccgactgcgacatcgaccggcgccgcaaagtcctcctggccgagaagcagcgtatagaagaccagcttgcggaactcgatcaaggcaccttggacacgatggatcccgatcaggcattggagcaagcgcgcgacatcctcaatctcgctcaggagataccgcgcgacttcgtcagcgtcagcgccgagttcgaggagatcgcgaaaaacctgtacatcaaacttatcggctatgaagaaggctatcaagacacgctcgaaggcgtgttcgccggcatcgaccatatcacgcagtctcctcctggccagtcgttcgggggcttctatgcgcttttgcgcgactcagaggcgctcgagaaacttcaagacgacatcgactccatcctcgacaccgatttcgcgtgcatgctcgaagcggaagagcgccgattcctcagaagattcgtgcaaacactgctcgatcaagcgcgcgacgtgaacgagaccaaaacagggttgtcgcgcggtttgaggaagcttgtgcagagccagagttttcagcaagaccgcgtgctgcgaagatttctcgaccagaccctcggcatggcaagcgtgctcacggaatcgtatagctgcaccttcgctcttccgatcgagctcgagctcaccaaaaccatgatcgcgcccatctcccgattggagctgtacaaccctgccgacgcaagcgcacagcccattcccgcgagcgcgttcgaagagaacggcaggctcacgttggccgagctgtacgagcaggtacgcgaggttgaaatcgattacgacgagctggtcggcaacgtgaatgcgttcttcgcggagcgcgacgcctccaattcaaagcatccctcgatcggcgagatcctggataagtatcccgcgactcaaggtatcgcaagcatcgcagggctcatggtgctcgcctccgatcagggcatcaggaccaatgaatcggaaatcattcgctggcagtcgaaaagcgggagacaccttcaagcccgcgtcgacacattcctgttcgtgaaagaggtgcgctga

SEQ ID NO: 45034 - DNA, 684 bp, Eggerthella lenta 1_1_60AFAA
atggacgacttctggaatccttcgcctgacaccgtggagaggtgcgacgaggatcggcctcttgacgagaggcacttgtggccacaggacacgggaaagcttccctatgatgcgcgatgcgcgttgctgcagctgatcaagggaccgtacatcgacgaaagcgacccgctatggtcggccgtcttgaacaaccagcaggatctgtcctcgcaccttgccgacatgcttcttgaactctacgtggacgcagagaccggaatcgctttcgcgcgtaacgcctcgacaggcgagagaacggtgctgaaggcaacgcgaagcaacgtgatgactctgctcgacaccatcatggtgctcacgttgcgcaaagagctgcagatgggcggcaccaaccgagtattcatcgggcaaagcgagcttttcgagcaattggctcagtatcgacgcttggaaagtcaagatcagtcgagctaccaaagcaagctgaaagcatcgtggaacaggctcgtggaagctcgcatactgttgaagagcgacatcgaagaccgtttcgaaatatctccggtcctcaagttgatattcggaaccgaagaagcggcggcagtcagcgaggaattcgagctcatgctcaaacgagcgcagcaagccgttccgaaccaaggagagccccatgacgacgaccgttaa

SEQ ID NO: 45035 - DNA, 3411 bp, Eggerthella lenta 1_1_60AFAA; identical to SEQ ID NO: 41968

SEQ ID NO: 45036 - DNA, 1242 bp, Eggerthella lenta 1_1_60AFAA; identical to SEQ ID NO: 41969

SEQ ID NO: 45037 - DNA, 1425 bp, Clostridium innocuum
atgtccttatttgagaaaatggatccatccttctttaccatactggtatcgaagaaccgggatatttatgtggatctgcttctgcagattcatgactgcatttatcgcaatcagaccatgagcatggagcgtgccctgcttcaggatttactggaagattatgtgcaggataaaaaatatgaaatcgactttcaggaggaagcggaatacagcgatatcgagaatgagctgcgcagtgagaaggatgtttatgaccgggatatccagtttctgttacggctgtttgagaagcatacctggatcaatgtcgatctgcatatggatacgatgaaaaaaatggtgtctctgccctatcacagccgggtgttcatctccttcgtgaatgatattatcaaggaacgggaacagatcggctatctgattcgcatccatgcctccctgaaggatatggatgatcccgtgaaaatagaagacagctatcagcatatccgcaatgcctatgccgatttcaaggagctgattctgacactggaacagaccaatgccagaatacgggattattatgcgattcaggtgaaaaaggcatcgacgaaaatctatcatgatttctttgatgtttattatggcgatattgtggagggctatgtttttccaactcttgtggaggacagcttaaaacggtttaaaaacccggtcgcaggtattttggaaacccttctgcaggaggaagcagtcaaggagaaaattgtagacagtgcggtaagtcactatcgtgttgccagccgtgatacggcaaaaaagcatatcgaggaaatgctgtatgccatgtacaatgatttgaatatcgtggaaacactgactgcccagctggtggacagcgacgcgggttaccgcagactggcaaagcagaaaattatgtatctgtgcaacagtgatcaggggttaaagggaaagctggtggaactgatccatcatatgaaggaagagccgcagagagtgtgtgagcagatcagtgaatccatcaatatccagcagacccgctacatggagcgtgatgaggtgtacacctttgaacgacgcaggcgtagggatgagcgggaagtgatgaccttcacctttgaagagagcacccagaatcaggaggagcttgaaaagcgcattggctttgaccgctatgcccgctttacccgtgaaagcatatcggcttactatgcagagaagctgcatggggaagcggtaggaaagctgaaggatatcggggtgaaggatatggatgactatatccgctccattctggtgtatgtatatggaagagaccgcaaaatggatgtgcaggcaaccctgattcccaatcagacggaagggattacagaaggggatttccattaccccaatctgttgattaaaaggaaggtaaaaaaatga

SEQ ID NO: 45038 - DNA, 669 bp, Clostridium innocuum
atgaaggtagaacaactggatctgaaggaccgcgaggaattcggacggatcgtcaatatattactggcagaaaactgcatttaccagtatgcgaaaatcagacagtttgagaaaaaggaacgaaatgcagactatgtgtttatccatgatcactgggactgcttcgaggaatatctccgctatgcgggatggctgctgtgcagggagcgttcatcttatatggggatgatttatctggtcaatgagcgggaggactgcagctgccgctatcgtctgacaaagctggaaacgcagcttctgctgattctgcgtaattattatgaggagaaaatgctggagctggatgcatctctcaccatacgtatttctgtcaatgagctgctgcagctgctggtggatgtgcatgcgatggtaagcgtaaggccttcgatgcaatacatccatgcggcattacagtccttacaaagactgaatattcttcagaaatacacacagggggatgaggagctgatctgggtactgccttatatcacctgtgttctcacaccgaagcgggtggaggaaattctgatgaagctgcgtaatgaggaaggagaggaagacgatgaagctgaagaaaatgctgctggtcaactggctgtattacgagaagacgatcctgagctttga

SEQ ID NO: 45039 - DNA, 3282 bp, Clostridium innocuum
atgctgctggtcaactggctgtattacgagaagacgatcctgagctttgaggatatcgtctttctgagcggtaaaaccggtgaggggaagtcagcgctgattgatgccatgcagctggtcattctcggtcgaaccgacaattccattttcaataaatccgcaaatgataaaacaacccgtgatctgatgggatatctgaagggcaaatacaaggatggtacctttaagcgtgataaagggatgttcagctcacatctgtgtatggaatttgaggatgaacagcatagaatttactgctttggtatcgtatttgacgtaaacgggcctacgcggggggacatggagtattgctactatatgatgaatcagccgattcccgggcattgctttacggatgagggaacggtattcaatatccgtcgtatgaagaagctgctggccagctttcaggatcgcagctgtcgttcctttaccacacatatggattacaaaaactatttccgtcagcgcatgctgatcaaggaccagcggtttttcgatgtctttaaaatggcagttgcttacacaccgatgatgaatatttccgaattcatcgtaaaaaatatctgtcaggaggaagaagacctgaatctcgaagagatgcaggaggaaattcaggattaccgacagatgaaggaacagctggaaacggtacagcagaaaaaggcccagctttctctgatccatgaacagtatatggatatctgcggggaacaggagcgtgttgcgaacttgcgtgtggagcaaaaggcagctgtatatcacggtatgctggtggaacatgatgaggcagccgcgcaatatgaggtatatacaaagagctatcagaagctgacaaaggaatcaagggaaactgaggagcagcgggcactgctggaacagaacatggaagccttacgggatgcacgcagggataatgcggcagatattctggaacgaaagatacaggcgcatctggagcagcgaaacaccctgcaaagagatacgaccgccgttcagcagcagctggttacgaagggagaatttctgaaggaacagatagagcagctggaggaaatcgaggattatgacggcttgcagctggaggacttcgatttgtccgcaatcaagctgtctatacaaaggtccgtgcatgcggcacagcagctggctgcgtttaacctggatgcctatatggatattcagcgacagatgagagacatcgagaataccctgtccactgtgcgccaaaccatgcaaaacagcctgcagacatgcagggaggagcaggaggtgcttgcggcaaatcgccgtgcgctggaagccgggaaaaagacatatccgaaaaagctgctcgttttaaagcaggagctggaggaacggctttatcagcaggtgggaaaaccggtagaggtatgcatactcgcagacctgttcagcattcaggaggaggcgtggacaaatgcgattgaaggctacatccataaccagaagctgaatctggtggttgaggcagaatatttcatggatgcctatcgcatttaccgctccattaaggaagaaaaaaagattcatacctattccattgtggatatcgcaaaggcaaagccggggaaacgtcccgatgcaaaaacactgtatgactgcgtgcaggtggaacgcgaggatgtgcgcccctatgtggaatatctgctgggcagagtcgtatgctgtgaagcggaggagacactgcgaagctatccggtaagcatcaccagcgactgtatgctgtacagcggctatgcagtgtcgcatatgaatccggaattgtataaggtaccctttatcggtgccgattccatagaaaagcagctgcaggagctgattatccgccagcaaaagctcacctccacctgccgcaagctggaaacagtcacaaggacattgcaggcggtacagctgcaaaccgttatcagtgatgactttatccgtcagctggaggatggacagtgcaaggccaaagaggtggagcagctggaacaaaagatcaaagagctgcgtgccgctcagacaccggaatccctgcaggagcttctgctgctggatcaaaaactggatgaggcaaagaaaaagaaaaacgaactgtatatgctgcaggtggaacaggaaagccggcgccgtcagctggaagaggatatgaagctttgcaatgcacgtatacaggagcttcagcagcaggttaaggaagcgaaaaagcccgagcaaggcataccggacacaatcggggcaatcaccacggcagacggtatccgcaggaaacagaaacagctggaggaagcactgcgggagctgaacagccgtgttgaaatttccaagctggagctgataacgaaaaaaacacattacaatgataccttccgtattgccctcaacccgaattttttatgcgatgattatgagcgggaatatgaaaagcattcggataatattgttgaggactatatcgataaatgccgcctcgcacagcagaaggcatatgagtgcttccagaataatttctttagtgcgctcaatagtaaaatcgaaaatgtgcgaatgcagattgaccggctgaaccgctctatccgcaggcataaattcggtcgctccagctatgaatttgtgtgtacctgcaatgaggattaccgtgagtattacaatctgatcaccaacaaggaattaaacgggcacaatctgttgaacacgaaggtgtatgaggaaaatgaggagctgattcatgagctgtttgataaaatttcttccttatcctccatgcaggaccccaaaaagtatcaggagctgcaaaaagaggttcagctgctttcccgcttcaccacctatctgaaatttgatattctggaaaacggaaactcgctgcgtgccacgatcggctccagctccggtggagaaacacagacaccgttttatgtcgctgtactggtatcgctgttcagcgtatatgatgcaggaaacgacggtctgcagctggcaatctttgatgaggccttcgataaaatggataatgagcgaatcgaggaatgcatttacctgttgaaatcactcggctttcaggcaattatcgtaacaccgacggataagatatccaatctgagcaaggttgcggatgcgacgctgattgcgacaacggatgagaaaaacggccagcgggtttccaccgttcagaaatggagtcagaaagaaaacatagccattcccgactcggaaatgagacaggaagaagtataa

SEQ ID NO: 45040 - DNA, 1032 bp, Nonlabens ulvanivorans
ttggaatatactgatgaagacatacttaagaggaaacaaattcttcaaaaacgtaagttagatatacaacatcaaattgacaagcttgaggctggtgaagctgtaccagtttatgataaaacccagattaccgaacgttttcaagatgttttaagaacagcaaaagatttattgattgattttaatgaagtagaatataatttcaaaaagatttcaaaggatatctcttccaaatatgccactaatgagatgcttaaaaaggaggcgttagatttaacctttacggcgcttaatgaattagaagatagtaatcaaggtaagagtttttatgcattttggaaatttctaatagatactgattatcaagaagattggaataaacttatcgatgaactttactcaaggttagaaaaaaatgagatcgctcatcaagatacttttctgaaaaacttaaagcgcaatctaaaccaagcagcacttaaagttactgatgcaaattctaaaatggcatcaaaggttgcaaaaattatcaaggatagtggtgtaaatcataaaataactcaacaactcatttttgatattaaaaaggagttagtagagataagtaaacaaagtgaagaacctaaagtaggaatagaaatagaatctaaaacgcactttgtcctacccttagaacctaagcttacttatactattaaagacgaggtgatattcactaaaaagcctgaacgagcaaaggatgggcctattgagacaaggagccttaaaagactgttggaacattctggagttgacttgctggcaattagaaaacgaattaaaaccgctttagatgaaaaagaacaaacaaccttagaagaaattatagaaacaaatggtggaataacagaaggtctctctgaactctttgggtatatcggagaactcagaaaatttaagcaccagtataatgctgacaaaaatattatggtagcttttgataaagctactggtaagagtataaaaatcccagaaataatattagtaagatga

SEQ ID NO: 45041 - DNA, 441 bp, Nonlabens ulvanivorans
atgggtttagagttagtaattaagagagaagacggatatgcatatctcaaacaggctgacttagatggagaaggcgaaacaataggcctggtgagtaagcgcaggttaagctttagtgcgtcggttattttagtgattttaaggcaaatgctatatgactttgaaaaagatattgattcatatgacaccttagaaaaatttgtgtctgaggaagaattaaaatctgaaattgaagactttttacccaagggatatgaccttgtaggtttctataaaaatctagaaaataacattacaagaatcaaagaattaggctttattaaaaagaaaacaactgatgatggtgaaacagtttacatcatccataagattataaaggagaaagtgaatatagacaccttgttacaatttaaaaagaatttagaaaactatggagtataa

SEQ ID NO: 45042 - DNA, 435 bp, Nonlabens ulvanivorans
atggagtataaattattcccccccactaataccgataccgctggataccgacttgattatatggaagtttataattggggaacttttaataacaaagtttggcatatcgacccagaaggacacactaccttactaacaggaggtaatgggtctggtaaaacaacttttatcgatgctttattaacattaattgttccttttaaaaaggacagattttacaatcaatcctctggagaagaacagaaaggtgccagaagtgaaaaaagttatgttttaggacactacggaaataaacaagaggaaggagctttaagtgagactaaacaaatgttgagagatgagactgcggtatctattttgctagccagttttaaaaatgaagacaaaaagtctgtaccatatttcaatgcaggtggttctctaacggtgatttaa

SEQ ID NO: 45043 - DNA, 1470 bp, Xanthomonas sp. Nyagatare
atgaaacatctcgcccggatcgcccgctatcgcagcctgcgtgagagcccgttgtggaagctgctggccgccgatcatgcgccggaagtgatcggcttgctgcagtcgttgctgctggacggtgagcgcctgctcccggcggcggtcctgcacgaacgcctgcagcgcatgctcgacgaactcaacgccgaacagcttgcacgcgacctgccgcgcaccgcccaggcctatgtggcgcactggctggcacagggctggctggagcgtcacctgcccgagggcgcgcagcaggagcagttcgagctgtccacccaggccgcgcaggcgatccgcttcgtcgatgggctggagcacagccgtggcgcggcaaccgagagccggttggcgttggtgatgcagcagctggcccagttggccgccttgaccgagaccaacccggatgcacgcctgtcggcgctgcgcgatgagcgcgaccgcatcgatgctgagatcgcgcgggtggctgccggcaaggtcgcctcgctggacggcaagcgcgcgctggaacgcacccgccaggtgattgcgctggccgatgaactgactgaggacttccgccgcgtgcgcgacgacttcgagcagctcaaccggcaatttcgcgaacgcatcatcgacgacgagggcgagcgcggcgacgtgctgacccggctgttcgaaggcgtggacgtgatcggcgacagcgatgccggacgcagcttccaggcgttctgggcgctgctcaacgacgccgaacagagtgcgcagctggatgcggccctggagaccgtgctggggcgtgccttcgcgcgcaagctggaccggcgcgaacgcagctttctgcgcgggctcaccgcgaccatgctcgagcggggcgggcaggtgcacgatgtcatgcagcatttcgcgcgcagcctgcgtggttttgtgcagagccgcggttacctcgaacagcgccggctcaaccgcctgctcaagcaggcgcaggccgatgcgctcagcctgcgcgagcacgtaccggcgcagcgcctgatcggccgcgatctgatgctcaccaccagccggctgcgctcgctggcgcaatggcgcctgcacgacccgcgccagcagcaggtcgatggcaacatccagcgtaacgaggcagcggccatctcactggacagcgtgggcgatctggtcgcgcagtcggagatcgacttccgcagcctgcgccgcgatctgttcgagctgctcgacgcccggccgcaggtttccatcgcccaggcactggagcagcgccaggccacccaggggctgggcagcgtcatcggctatctgtcgctcggcacgcgccacggcgtggtcgacgccaaccagttcgaactggcgcactggcgcggcaacgatggccaatggcgtcgcgcgcgcattccgttgatctggtttacccgggagaaacgccatgaactggcctga

SEQ ID NO: 45044 - DNA, 711 bp, Xanthomonas sp. Nyagatare
atgaactggcctgagcacgaccacggacatgatccggacgagatcgacgccgccgccgccgcgctggccgatccgtcaccgacgccggccaacggcctgtttccgggcgacaccgggcagctgccggtcgaggcgcggcgggcgctgtgccagttgctcagcggccccagcgtggacgcacagcggcatggccgcctgtggccagccttgctgcggagcgaggcggcaatccgcagcgccctggccgagctgttcctggaactggtgctcgatcgcgacaccggcatcgccttcacccgccaggcggacaccggtgagctggagacgccggtgctgctgcgttcctcgccgctgaccttcatcgactcggtgctgctgctgcatctgcgtcagcaactggccgacgccgacgcgcgtggcgtccgggcggtggtggaagacgcagagctgagcgatgcattggccgtgtacgaaaagaatctctccaccgaccgcgccggcttcctgcgccgggtggccacggcggtgcagaagatgaaggacaaccacgtgctcacccggctgcgcggcgacgaggcgcgctatgaagtgtcgcccgcgctcaagctattgttctcggctgaggatgtcgcagcgctggggcaggtctatcgccaactgcgcgaaggcccggcagacaccgacaccgacgcgccgaccgcgcgcacctag

SEQ ID NO: 45045 - DNA, 3390 bp, Xanthomonas sp. Nyagatare
atgacttccgccgcctcttccagcctgttcggcaacgacctgcccgacccacgcctgcagcaatttcgcatgcggcgtctgcaggtctacaactggggcacgttttccggcctgaccgaagtgccgattgccgaacgcggctttctgttcgtcggtcgctccggctccggaaaatccaccttgctggacgcgatgtcggcactgctcaccccacccagcatcgtcgacttcaacgccgccgcgcgcgaggccgagcgcagcggccgcgaccgaaacctggtgtcgtatgtgcgcggcgcctgggccgaccagcaggacagcgcctccggcgaaatcgccacgcaatacctgcgcaagggcgccacctggaccgcactggtgctggaataccgcaacggcgaagaccgcgtggtcagcctggtgcggctgttctggatcgccggcagcagcgcggccacagctgacgtgcaaaagcactacatggtggccgagcgcgccttcgacgtggcgcaggacctggccggcttcgacctggatcggcgcaagctcaagcagcgcctgcaggacgtgcatcacttcgacagtttcgccggctacgccgaacgcttccgccaccagctgggcatccacaacgagatggcgctgcggctgttgcacaagacccagtcggccaagaacctgggcgatctcaacgcgtttctgcgtggcttcatgctcgaagaacccaagaccttcgatgcggccgagcgcctggtcggcgacttcgccgaactggacggcgcccaccatgcggtagtgaccgcgcggcggcaggtggagaccctgctgcctgcccgcacccaccatgccgagctgctgcagctacgccgccagcgcagcgaactggaagaactcaaactcggcatcgatgcctatcgcgaacagcgccgtctcgcactgctggatgcacgtctgcaggaactggacgtgcaggaccgtggactggctggcgaagaaggccaacgccgggcggccctggacaaccacacccgccatctggacgacctggaggcgcagcgccgcgcccagggcggcgaacgcatcgatgcgctggagcgcgaacagacccagctgcaggccgagcgcgatcgccgcgccgccaagcgtgcgcaggccgagcaggcctgccgcgcactggaacaggcactggccggcagcgcgcacggctttgccgaacagaccgccctggcacgcgtggcgctggaagacggccagcgtctggccgccgaacgcgacgaggcgatcagcgcacgcatggccgccaagcacgacgacagcaagcgctttgtcgaggtgcgcgccgagatcgaggcgctcacccgccatccttccaatatccccgccccgatgcagagcctgcgcgcgcgcctgagcgccgacaccggcgtgcccgaggcggcgctgccgttcgtcggcgagctgatccaggtgcgcgaggacgcagcggcctggcgcggcgccatcgaacgcgtactgcatggatttgcgcaatcgttgttggtggacgagcgccattacgccgaggtcgccgactgggtcaaccgcacccacctgggcacgcggctggtgtattaccgcgtgcgtggcaacgagtcggcgctgagcgggcgcgaacccggcgccgcctcgctgctgcacaagttgcaactgcgcgagcatgccttcgccagctggctacgccgcgagctgggcaaacgcttcgattacgactgcgtcgacagcgccaaggccttgcgccacgccgagcgcgccatcacgcgcgagggtcaggtcaagcatccgggcgagcgctacgaaaaggacgaccgtcatgccgtcggcgatcgccgccgctggttgctgggtttcgacaaccgcgacaagctggcgctgttcgaacgcgaaggtcaggagctggcgcaacgcatcgccgcctgcgacgccgaggtggccgatctgcgcgcacagcgcgagcgcgacgggacgcgccgcctggcctacaacaccctggtcaatctgagctgggaagaaatcgatgttgccgcctcgctgcagcggttgagccagatcgccgacacgctgcagcaactgcgcgaaggcgatgccaacctgcgcgcgctcggcgaggcgatcgatcgcacccgcgccgacatcgcccaggccacgcgcacctatgaggacgtacgcaaggagcgcatcaccctgggcgccgagcgcagccggctggaaaagcagcagctcgaatgcgccgacgcgcacagccgtgtcgtcacccccctgcagcaacagggtctggccgagcgcctgcagacgctcggcgaggtgagcctggacacgctgcaggagcgcttccgtcatctcgaacgcggcctggatgcgcagctggcgctcagcaaggacgaactcacccgcctcgagcaactgctgctcggctgctttcgccgctattgccagcaatggcccgaagacagtggcgacttcaccgtcaacatcggcagcgccgacgatttcctcgcccgcctgcagcgcctggaacgcgatggcctgccgcagcatgaggcacgtttcttcgatctgctgcagagccagagcaagaacaacctgcttgccttgcaacggcataccgccgaggcgcgcaaatcgatcgctcagcgcctggacgaggtcaatgccagcctggaacaggtgccgttcaatcacggcaccttgctgaccatcgaattgagcgaccgccgcctgccggaggtgatcgaattccatcaacgcctgcgcgatgtgctcggtcaccaccagaccgaacagcgcgaggtggccgaacagcaattttccgtgctgcgcgagctggtgggcaaactcggctcgcaggagggcgaagacaagcgttggcgcgagctggtgctggacgtgcgcctgcatgtggaattcgtcggcgtcgaactggacgcggccacgcggcaacaggtggaaatctaccgcagcggcgccggcaagtccggcggtcagcgccagaagctggcaaccacctgcctggcggcggcgctgcgttaccagctcggcggcgaagacggcgaactgccgcgctacgcggccgtggtgctggacgaagccttcgacaaggcggataacgaattcaccgcattggcgatgaatatcttcgaaaatttcggctttcagatggtggtggccacgccgttgaaatcggtgatgacgctggagcccttcattggcggcgcctgtttcgtggagatcagcggccgtcacgattcaggcgtgctgctgatcgaatacgacgagcagtcgcgccggctcaggttgcccgagcgcacccgtcgcggcgcagctgacaccgatgcggtgaccgggcaggactga

SEQ ID NO: 45046 - DNA, 1194 bp, Xanthomonas sp. Nyagatare
atggcccgcgcccactgcatgctgctaccgcctgccgcgctgcaggccctgcgcgggcaatggcaacgccaccgtggcgactggctgatcggcgcggcggcaccgcggccgatcgccctgcatccccccacccaggcccaggccagcgcacagttcgatgccttcggcgcatggttgcgggcctggcagcgagccgggctgccggggcgcttggagatgcggcacgtgtcctggccgcaattggggccgcaacagctgccgcagacctgggtgtgcgctaccccggccgaggccgccgccgcgctgcaggaacacgagcgctggcagcgtgccagtgctcgttgcgccagcctgttgcagcgttggccggacgcggtcgggctggctgcgcgtctgcgtcgccagttcgatctgctggccgacggtgcgcagaccgagatcgagcggatggccgacgtcgtcgactggctgcaccgtcaccgcgacagcggcctgttcctgcgtcagctgccgatcgccggcatcgacagcaaatgggtgcatgcccatcgcggcattatcgccgactggctggccggactgcgcggattgaccgaaccgcgtagcttcgacagcctgtccggcttgcgcaaggcgcccgaccgcgtgcgcgtgcgcctgctcgaccctgcgttatgcgcccaggttggcggcttgaacgatctgaccgttccgatcgatcaactggccgcgctgcgcttgccgatcacgcgcatgctgatcgtcgaaaatctcgaaaccggcctggcctgcgaattcttgccagggaccgcagtgctgatggcccgtggttacgcgctcgattatgtgcgcagcgtcggctggctgcgcgcgatgccattgttctattggggtgacatcgacacccatggcctggcgatcctgcatcggcttcgcctgcatgccccgcagacccgtgccgtgttgatggatgaagccaccttgcacgccacgcctcgcgcgctgtggggccacgaaccacggccgcaccgtgcgcaacgcctggccgcgctgacggccgatgagcaggcgctctataccggcctgcgcgatggccgtttcggcgccgcacccaggctggagcaggaacgtatcgattggagctacgcctggccgcgcgtgcaggctgcgctgactgcgccaacccggttgtag

SEQ ID NO: 45047 - DNA, 1470 bp, Xanthomonas fuscans subsp. fuscans
atgaagcaccaggcccgtatcgccggctatcggcaactgcgcgagcagccggtatggaaactgcttgccgccgaccacgcacccgaactgatcggcctgctgcagacggtgctgatggacggcgaacgccgcctgccttcggccgtgttgcacgagcgtttgcagcgccagctcgacgccttgcgcgccgacgagctctcgcgcgaactgccgcgcaccgcacaggcgtatctggcgcattggttggcacagggctggctggaacgccgcctgcccgaaggcgcagccgaagaagaatacgaactctcgcgtgccgcgacccaggccatccgcttcatcgtcggcctgcgcgaaagcagcagcagcgccaccgaaagccgcctgtcgctggtgatccagcaactggtgcagttggccggacagaccgaagccgatccagagctccggctggccgcgctgcgcgacgaacgtgcgcgcatcgatgccgagatcgaacgcgtggcttccggccgcgtggcggcgctggacggcaaacgcgcgctggaacgtgcacgcgacctgatccatctctccgacgagctggccgaagatttccatcgcgtgcgcgacgatttcgagcagctcaaccgccaattccgcgagcgcatcatcgacgacgaaggcgcgcgcggcgatgtgctcgaacaactgttcgacggcgtggatgtgattgcagacagcgaagccgggcgcactttcgaggcgttctggagtctgctcaacgacacccagcaaagcagccagctcgaccaggcgctggatgcgctgcttgcccgtgggtttgcgcgcaagctcgatcgtcgcgaacgcgcctttttgcgtgggctgaccggcacgctgctggagcgcggtggcgaggtgcacacggtgatgcagcatttcgcgcgcagcctgcgcggtttcgtgcaaagccgtgggtatctggaacagcgccggctcaatcaattgctcaagcaggcgcagggcgaagccttgcaattgcgcgacagcctgcacgccaccaccgccaccggctatacgcaggcgctcagcagcagccgcctgcgctcgttgtcgcaatggcggctgcacgatccacggctcacccaggtcgatggacgcgtgcaggccgccgacgcggccgagatctcgctggacagcgtgggcgatctggtggcgcaatcggagatcgatgtgcgcagcctgcgcaacgacctgcatgagctgctcggccaacgcccgcggctgacgatcggcgacgccttgcaacaacgcccggccgtgcagggcctgggcagcgtgatcggatacctgtcgctgggcacgcgccacggcatggtgatcgaaggacagatggaaacggtgcaatgggaaggcagcgacggcgccgtgcggcgcgcgcgcattcccttggtgtggtttacccgggagaaacgcaatgaactggtctga

SEQ ID NO: 45048 - DNA, 702 bp, Xanthomonas fuscans subsp. fuscans
atgaactggtctgaggacacgcgcttggacgccgacgaggacaccggggcgccggccatcgacgaccgcatgccgatgacgcaaacctccagtgccgagccacgcggcgagctgtttttgggcgacaccggcacgctgccgttcgacgcgcggcgtgcactgtgccagttgctggcagggcccagcatcgatgcgcaacgtcacggcgcgctgtggccggcgttgttgcgcaacgaggtggcgatccgccaggtgctgtgcgagctgtttctggagttggtgctcgaccgcgagggcggggtggcctttacccgtcaggccgacaccgcagagctggaatcgcccaccttgctgcgcagtgcgccgctgacgtttatcgagtcggtattgctgctgttcttgcgccagcaactggccgaggccgacacgcgcggcgagcgtgcagtggtggacgaggcgcagttggtggaagccttgtcggtgtacgaaaagaacgtgtccaccgatcgggcgggcttcgcgcggcgggtgatgacggcgatcggcaagatgcgcgacaaccagttgctgtcgcgcttgcgcggcagcgaggagcgctatgaagtgtcgccggtgttgaagctgttgttttcggcagaagatgtgcaggccttggtggtggcctatcgggagctgcgtgagggcgaggttgcgctggattga

SEQ ID NO: 45049 - DNA, 4023 bp, Xanthomonas fuscans subsp. fuscans
atgaattcccagtccaatctgtcgccggcgcagccgggtgcctccttgtttgccgagacgctcgccgagcaacgtgcgcagcagttccgcatgcggcgcttgcaggtgcacaactggggcaccttcaacgggctgaccgaagtgccgatcgcggagaagggcttcctgttcgtggggcgttcggggtcgggcaagtccaccttgctggatgcgatgtcggcactgctgacgccgccgagcatcgtcgacttcaacgctgccgcgcgcgaagccgaacgcagtgggcgcgatcggagtctggtgtcgtatgtacgcggtgcgtgggccgatcagcaggacagcgcgtccggcgaaatcgccacgcaatacctgcgcaagggcgccacctggaccgcattggtgttggagtacgcaaacgcgcattgccagacggtgagcctgatccggttgttctggatcgccggcagcggtaacgcggcggccgatgtgcggcgccactacatggtcgcgccacgccgtttggacgtggcgaccgagctggatggcttcgatctcgacctgcgcaggctcaaggcgcggttgggcgatgacgttgcgcatttcgacggcttcgccggctacgccgaacgtttccggcatgcgctgggcatcggcaacgaaatggcgttgcggctgttgcacaagacccagtcggccaagaacctgggcgatctcaatgcattcctgcgcggtttcatgctggacgagccgcggaccttcgaagcggccgaccggctggtggaagattttgccgaactcgatggcgcgcaccatgcagtggtcaccgcacggcgccaggtagaaaccctgagccctgcgcgcgagcaccacgcggcgctgatggcgctgcgccacagcgtcggcgagttgcgcgagctgcagctgggtgtggacagctaccgcgagcagcagcggttggccttgctggatgaacggctgcaggagctggacaaccaggaccgtggactggccggcgaagaaggccagcggcgcgaatcgctggataaccacgagcagaagctgctcggcttggagcgcgagcagcgcgccgccggcggcgagcagatcgaagaactggaacgcgaacgcgcacgcgtcgagcgcgagcgcgacgaacgcctgcgccgccgtgcgcagatcgaacaggcctgccgtcagctcggtaccgcgttggcggccggtgccagcggctttgccgcgcagattgcgcatgcgcagaccgtgctggataacggcaagcacgacgccagcgcgctggacgaggccatcgccgagcgcatgggcgcgcggcgtgacgacgagcgccgctttgccgagatccgcgccgaactggaggcactgaaaaaagcgccgtcgagcatgccggcaccgatgcaggccctgcgcgcgcggctgtgcgaagacaccggcattgccgaggccgcgctgccgttcgttggcgagctggtgcaggtacgcgaggaccagatcgcctggcgcggcgcgatcgagcgtgtgctgcacggctttgcgcaatcgctgctggtggacgagcggcattacgcgcaggtcagcgaatgggtcaaccgcacccatatcggtacgcgtctggtgtacttccgtgtgcgccgtaacgacgagctgcattcgcggcgggtcgaccccggcgcgctgcccggcaagctgcaattgcgcgagcacgcctttaccgaatggctgcgcaacgagctgacccgccgtttcgactacgcctgcgtggacaacgccgcagcactgcgcaacgccgaccgcgcgatcacccgcgagggccaggtcaagcatcctggcgatcgctatgagaaggacgaccgccacgcggtcaacgaccgcaagcgctggctgctcggtcacgacaaccgcgacaagctcaaggtgttcgaacgcgaagcgcagacgctggcgcagcgcatcgccagctgcgatgccgatgttgcagcgctgcgcaagcagcgtgagcaggaccaggaacgccaactggccgcgcacaccctggtggagcgcgactgggacgagatcgacgtcggccccaagctgcagcgcctgagcgatatcgacgaacagttggtgcagctgcgcgaaggcaacagcggcttgcgcgcgctcggccaggccatcgacaccgcacgtaccctgcgcgaccaggccaagcgcacctacgaggatgtgcggctggagcgcgcgcaactggcgcgcgagcgcgtgcggctcgaacagcagcaggcggcatgcgcgggccgcgccggtaccgccacgctcacgcccacccagttgcagggcttgcgggaacggcttgccgcattgacgccgctgtcgctggacaatctggaagcgcatttccgcgtggtcgagcgtggcctggccgagcagctggccgacagccagggccgcgacagccggctcagcgcgcaattgctggaatgcttccgcaagtattgccagcagtggcccgaagacagcggcgatttcaccgtgagccttgccagcgccgacgatttcctcgcgcgcctggaccggctggaaagcgatggcctgccgcgtcacgagcatcgtttcttcgacctgttgcagacccagagcaagaacaacctgctggccttgcagcgccacaccgccgaggcccacaagggcatcaagcagcgcatggacgaggtcaacgccagcctggagcaggtgccgttcaaccgcgacaccatcctgaccatcgaggtcggcgaccgccgcctggccgaggtgcaggaattccagcagcagttgcgcgcggtgctgtcgcatcaacagaccgaagaccgtgccctggccgaagcgcagttttccaccttgcgtgcgctggtagcgcgcctgggcgcgcaggaaccggaggcacgccgctggcgcgaacaggtgctggatgtgcgcctgcatgtggagttcatcggtgtggaactggacgcgcagacgcgcgcgcaggtggagatctaccgcagcggcgccggcaaatccggcggtcagcgccagaaacttgcaaccacgtgcctggcggccgcgctgcgttaccagctcggcggcgaagacggcgaactgccgcgctactgcgcggtggtgctggacgaagccttcgacaaggccgacaacgaattcaccgcgctggcgatgaatatcttcgagaacttcggcttccagatggtggtcgccacgccgctgaagtcggtgatgaccttggagcccttcatcggtggtgcgtgctttgtcgaaatcagcggccgccacaactccggcgtgttgctgatcgaatacgacgagcaggcacagcgattgaagctgccggagcgctcgcgtggcgatgagccggcagttgccgatgccactgacgctgcgccgtcgatcgaggctgcgggcgagcctgcaggagtgcagggcgctgccagcgcagatggcacggcaaccgacggcgtcccactgcacacggcatcgcctgcgacggaggagaccccgcccgcagcgcaggaaacgcagactggtcagcgcaagccggcagtcgcgacgacgaacaagcagaacaagaccgccaagaccgcatcttccacgcgcgctgcggcacagcctcaagcaaaacgcccgaagaaatcgccttcgcgcattccggctctggctggcaagccggcatcggacaaacgcacagccggcgtgccggcggtgtcgtcaaaagccgcatccaggtccaacgtgggcaagaccacgcggtcttcaaaaacgccgggcaagccgattgcggccacaagcgcatccaacgccacgtccaggaaggtcgccgccgcatctgcggcattgaaaactgccgcagccaagccacgtgcaacagccgcctcggtcgggcgaccagcgcgtggcgccggcaagacaaccgcgacgcgcgcggcgacgaaaccgtcaccggccgcaacgcgcggcgccaaggcaggcactgcgcaggcgcgcggcaagcgctga

SEQ ID NO: 45050 - DNA, 1393 bp, Desulfosporosinus sp. HMP52
gctcctttatgaacaacataaaagcaaccgtttcggaatcgaatatgacctgatgcgtgacctttttcaggaattgattgagactcagcaggagttgggttacgccttcgattctgaggaagatcaaattgacacgggtgcgtccgccttggttgagcctgatttgagcgaaatggaccttttccgtgcccaggcgaatacgatcttgcgacgcttgaagaacctcggctggttggaagtggaaaccagagataacttcaagcagtatatcgttctgccccattattcaagccggattctccaagtgctgaaggaactttgtgaagagcggactgttgagttccagcgattcgcctttgtgacctaccagctcttaaccagtgaggaagccaagcggcgtcctgcattcgcgatgatcgaagcggaaaaaatgacggaacagtttattggggagctgacgattctggtcaataacatgaagcatcatgccgagcaagtggcggctaaagccagcctccaggaagtcttggatcatcattttgacgagtataaaaccaaaattgtcgaccgcagttatcatcgcttgaaaacttccgaccacgtctcccgttaccgtcatcagatcttggactgcgttcaaacctggttaatggactctgctttttttcaggaagctattgaagatgggctgcgcagtgaattttttacaacccgtgccgacgcggaattcaagcttcgcgccgcacttttaaccatagaagaagtttatcgggaattggatgaggtatttaaccggattgacctgcgtcataatcaatatttgcgtgcctcctatgaccgggctcggtacttaagccaacattcccaaggggtggatcaacggctggccgggatcttagattggctgtccgcacgaggccgtcagggggatcgggaagcggataaaattctcgggtcggagggactgcattttctgaccatttctcaactttctgatacttccctgcttcctgcccgtaaaaaacgtgcccctttgcagcccgctgattatgaagtcctggaaattccggaaggtcttaaaaatgagcttcgggaaaagtccctggctaaaatgcgccacagcatctcccgggataaggttagatcctatgttctagagcgcttgggacaaagggaagagatggggatctcggaattggccccccagacacttgaagagttcctctatttaacctatgtttacttatacggttatgatggggagacgggctatattctggatcgaagaaataagcgcatcttagacatcggaggctaccgcttctatgatcgtcagattcgccgcgtacaagtaaggaagggaggcacgcgccgtgttcgaaactctcagtga

SEQ ID NO: 45051 - DNA, 609 bp, Desulfosporosinus sp. HMP52
gtgttcgaaactctcagtgaacaagaacgggaaaagttacgtgatctgatcaatcgtttgcttaaggtgaactttttaatcaaggaattggaacgggagcgctatcaggcagcccgaaaactccgtcctcagcttgaagaattctttaagttcttaaattgggatttccaactggatgaccggcatgagtgcgttttcgctttctccaaggatggtgctcaccggctgagattgaccagggatgaaagcattgccctcttagtgctgcgcctaatttatcaggaaaaacgtcaaggggttattctaaccgagtttcctctcaccacgaagtatgaaatccgggctaaatatgaaaccttccgacttcctttcccgggaaagacccgtttcctggaactgatcagactctttacccaatataagcttctccagcccttggatgaagaggttaacctggatgattgtcgtttcaggctttttcacaccatgctctatgctttagatgcggattccatcgagagaatccatgagcgaatcaaggcctatgacctagaactcgatgaagaggagttattcgatgaagtggatgaaacagctgcggctcgttaa

SEQ ID NO: 45052 - DNA, 1302 bp, Desulfosporosinus sp. HMP52
atggcacagaaatccgttgatcagtacaaacgaaggattctctcactactgttaaagaaatatgaacgcagtcagtccttccaggccggaattcccggtaaacagcgcccccaaatgaccatcaaaggttcagaactggccaaggattatgacgatgagatggattatcgaaaacgagaattgatccacaatgctctccaagaactctgtcatgagggaatcacagaagttacttggcctaaacataaggagaatattgaggtaggaaaagtctaccttaactttgaaggagtggagagagcctatctgcataccggtgaaaaacctaaaggtgacaaaattcgtcaacttgcagagctcttaattcctctagtccatcatccctgggactgggttcgaacttggggagaagagacttacaggaggctggaggaaagaagaccttccgggctggacttagacgatcatcagggatatggggacctggttcaggttcttttggcactccccgggctggaggagaatactcccaaacgagttctcagccaaaaactttttcaagacagcaagcgctttgaacaaggtgtcgaacggcgtttgttgagcctgttgcgcaaaatttatcccgaagaattagagaaagatgaggattatctggatcaagtggggattgtcgaaaatccaaaaatgacactggtttttggcccccttgaaatagaaatgccgactgagttagttggtaactcagcaactgaagaggacagggcaaagagccttggatttaactttagggcctttcaaggcggacttggactatccgcagaatccatcaaagagctctccatccgggacattcctgccagagcaattctccttgtcgaaaatctcacgacttaccatgaagtgattcgacatccagtccagctttctgcgccgttgcttgtcatctatacaggaggtttcccccataagtcgacccagagactccttaagaaaatttccacctttatcgagactcagaaccctctgtcgctggaaggaatttatcactggggggatatcgattacggggggattcgaatctttgagtatttgaaagagcacttctttccttccttacggccttaccgaatggatgtcgtgacttatttggactatgtaactaccggactctcctttggggaagaacagtgtctgaaacttgaacagttgttgacgttacccggttatgagacatggcatcctgtaattacggaacttttgcggcataggaaacgggtagagcaggaaagtatccgttag

SEQ ID NO: 45053 - DNA, 1434 bp, Cellulomonas cellasea DSM 20118
atgctcgacctgctgcacaaacggcacgcacccctcgtcgtgtccctgctctcggtcgtcttcaccgcggagcgcccgagcgtccccgtcgccgacgcgcacaccgagatcggcgacgcgctcgagcagctgcgcgccgcgggccacggcgacgacctgcccgtgggcaccgcgcgcgagctgtgccggcagtggtccgacgcgggctggctcgtgcgccacgtgctcgaggacgacgtcgaggtctaccggctgtccgcgcacgccgtcggcgcgctcgaggtcgccgggcgcgcgggcggcacccgggcccgggtctcgcagtcgcgggtgcggaccctgctcgacgcggtcgagcgcctcgcccaggacgccgacccggacgtgctcgtgcgcctcgcgcggctggactcggagatccggcggctgcgcgccgaggtcgcgcgcatcgagcggaccggagcggtcgacgaggtcgacgaggagcagctgctcgaggaggccgagaacgtcctgcacctcgtgcgcgagctcccggccgacttcgcgcgcgtcgcggagtcgatcaaggcgatgcagcgcgacgtcgtgaccgcgctgcgccaggacgagcggccgacgggtgacgtgctgcgcgagtacctcgcacgcggcgagcacgtcatggagtcgacgtccgagggtcgcgcgttcgccggcgccctgcgcctcatcggcgacccgcagcgcctcgacgagctcgcgacgcacctcgacgtcgtgctgcggcaccggttcgcccggcggctgcccgcgccgcagcgcaccgagctgcgcgagatcggccggcgcatcgagcagggcctcgaccaggtgttcaccgcgcagcgcgaggcctcatacgtcatcacgacgcaggtccgcaaccacgacccgctgcgcgaccgccaggtcgacgagctcctgcgcgacgtcatgaccggcctccaggcgtgggtgcccgacgcgcggcgcgggcagtccgtcgagccgctgcgccgactgccggtcgcggaggtcgaccacctgcgccagaccgccggcgacctgcgcccgccccaggcgcccgcgccgctgagcgaccgggacgacgacgacgcggacgtgtcccaggacgaggtgcgcgcctggggaggaccccgctacgccgagctcgacgcgcacctcgcggcgctcgcggacgggtcgggggaggtcgacgtcgcggcggcgttccgcgcggcgcccgacgcgatgcgacggcccgtcgacctgctcggcctgctggagatcgcgcaccggtacggcatgacggagaccggcgaggtcgcctacgtcgacgcggtccgccccgacgggacccggcgacggttcgcgttcgagggcgtgacgacgacggcggccaccgcgtccacgacggaggagacccatggctga

SEQ ID NO: 45054 - DNA, 738 bp, Cellulomonas cellasea DSM 20118
atggctgagacgaccgacgcgccgcccgacgcggcccccgaggtgccggtcgccggcgctgcccccgcggccgaccctgcgaccgaccccggcgcggagaacggcttcatcgcgcccgtccccatggaggaggaccccgccgagctgttcgcgggcgactccgggacgctcgacgccgaggtgcgcacagtgctcgtccgcctcctgcagcgccgcttcctgaccgccgagaggaaccgcgcgcagtggcggacgctgctcgaccaccagcaggtcatcgagtcgcggctgcacgacctgttcgtgcacctcgtcgtcgaccacgagcgcggcgtcgcctacaagaagcaggtccgctccgccgagctcgacgtgcccgtgctgctgcgcgacgacgcctacagccgcgccgagaccctcgtcctggtgcacctgcgcacggtgttccagcgtgagcgcggcgcgggggagacctcggtgcgcgtcgacgtcgaggagctcgagcagacggccctgacgtacttcgaccccgacgacacgaacgtcgcgacccgccagcgggagatccgcgcggcggtcacgcgcctcgcgaaggacgggctgatcgaggaggagtcggaggggcgctacagggtgaccccgctggtcgaggtggtgctgagcaacgagcggctcgccgagctgcgcgactggctgcgcgcgcaggcggcgcacacgggtgaggacggcgcggcatga

SEQ ID NO: 45055 - DNA, 3375 bp, Cellulomonas cellasea DSM 20118
atgacgatggtcgacacgctcttcgggctcgtcccggtgacctcgacgggccagcagtgggtcgcccgcgacctccagctcgtcaactggggcgggtacgacgggcaccaccgcgtgcggctcgcgtccaccgcgacgctgctctcgggcggctccggctccggcaagtcgacgctcatggacgcgtacatcgcgctgctcatgccccacacgacgccgttcaacggcgcgtcgaacggcggggtcgtcgggcggccgcgcggcaaggaccagcgcaacgtcctgtcctacgcgcgcggcaaggtggacgaggcgcgcaccgaggacggcacccgggagagcgtgctgcgcggtgacgggcgcgacacctggtcggcgatcgcgatgacgtgggccgaccaggcggggcgcgagctcactgccgtgcgggcctggtacgtgccggccgccgcgcgcgtgctcgacgacgtcgtcgccgtgcgggcgacctgcgacgggccgttcgacctgcgcgacctcgagcccgccgccgcggaccggctcggccgcgcggccgtgaccgccgcgggcctcacgccgttcgacaccgaccgcgagctcaccgcccggctgcactcgaccctcggcatcggcgccacgggcgacggcaacaaggcggtcgcgctgctcggccgcatccaggcgggccagcagatcaccacggtcgacgcgctgtacaaggcgatggtgctcgaggagcccgacacgttcgcgaccgccgacgccgtcgtcgagcagttcgacaagctcaccggcacgcgcgaccagatgatcaccgcgcgccagcaggtcaaggcgctcgagccgatccgcgcgcaccgcgccgacatcgaggcggccgcccggcggctgcgcgtcatcgagcaggccgggtcgttcgacgacgggacgtccccggccgcgctgtggcgccacgagcgccggctcgggctgctgcgcgcggtcgagcaggacctgcagcgccgtcaccaggacgcgcagcggctcgccgccgagacctccgggcgcgtcgacgcgtcgcgctccgagctcgacggcgtcaaggagacgctgtgggcgtcgggcggcgaccggctcgcgaccgcgcagcgcgagctcaccggcgcgcagcagcgcctggaccgcgtcgtgcgggcgcgcgagcggctcgacggcgtggtggggaccgcgctcggcgccgcgccggcctcggcggaggagttcgccgcgctcgcggagcgggcgggggacgcgctcgcggacggggacacgaaggccggtgcgcgccgcgcgttcggcgacgcgatggcggagaagaaggacgcgaaggacgagctcgccgggctcgcggccgagcgtgcgcgcgtcgagcggcggcagggcaacatcccgggcgacctgcaccaggcgcgcgctgcgctcgcgcaggtcgcggggctcacggtcgaggacctgcccttcgtcgccgagctcgtcgaggtccgcaccgagcacgagccgtggcgcgacgcgttcaacctcgcgctcggcggcttcgcgacgctcctgctgctcgacgcggcgcacctgcgcgccttccgcgcggcgatcgacgcggtgcccaccgcgcgccggatccggttcgagggtgtgccgacggggctcgagaccgacgtcgcgctcgacccgcgcacgctgcccggccgcctcgacctgcgcgccacgtcgttcaccgggtggctccgcagcgagctcgggagccggttcgcgtacgtgtgcgtcgacaccccgggcgagctcgcgcagcacgccaaggcgctcacgcgcgccggtcaggtctccgacgggcggcagggcgcgcacggcgggcagagccgggccaacgtgctgggcttcacgaacacgcggctgctcggccacctcgaccagcagatcgcccgggcgcagcagcggctcgagctcgccgaggcgcaggtcgtcgccgccgaggggcagctcgaccggcacgaggtcgagcggcgcgcgttcgaggcgctgcgcgaggtcacgtgggaccaggtcgacgtcgtgactgctcagggcgaggtggcccgctggtcgcaggtcatcgaggacgtcacgtccggcaaccccgaggtgacccggctgcagcgtcgcgcgaccgagctcgagacggcgatccgcacgctcaccgaggagctcggccggaccaagggcgccgcgcaggagctcgccgagcgctggtcggcgacgaccgacgacgtcgacgcggcgcagcgcgcgctcgacgaggcccggaccggcggcacgacggtcgcacccggcgcgcgcgcgtacctcgacgcgctgctcggcggcgaggtcggcagcggcacggcggccgagatggcgacgccggccggtgccctcgccgcgttcgacgccgtggtggcgcgcgcgagcgacctgctgcggtcggaccgccaggcggcccagggggtcgtcgggaccgcgcgggacgcgctgcggcgcacgttcgagaccttcgtcgagcgctggcccgaccccgacctcggtaccgaccccgacgcgtcgtacgccgacttcgcgcgcctgctcgccgagctcgagacgcacggcctgcacgagctcgagggggagtggcgcacgagcctcctgcggctgtcgggcaacgacctcaccgacctgcacaacgctctgagccgctcggtccgggagatcaaggagcggatccggcccgtcaacgagatcctcgccgacctgcccttcgccgacgacggccaccggctgcgcatcgacgcgcgcgacacgcagtcgacggtcgtcgcccggttccgcaaggagctccgcgacctgcgcgaggtgctgcagaccgaggcgacggacgccgagcgcgagcgccggtacgtccggatggccaaggtcatcgaccgcatccgccggacgtcgccggacttcgccgacctggtcgacgtgcgccgccacgtgcggctcagcgccgagaaggtcgacctcgagggccggcacgttgcgctctacgaccacatcggcgagaagtccggcggcgagtcccaggagctcgtcgcgttcatcgtcggcgccgcgctgcgctaccagctcggcgacgccggggccgaccgaccccgctacgcccccgtgttcctcgacgaggcgctcatcaaggccgacgcgcggttcaccgggcgggcgatcggcgcgtggcgcgggctcggctttcagctcgtgatcggcgcccccaacgacaagttcggtgcgctcgagccgcacgtcgacctcaagtacgtcgtgctcaaggacgccacgggacgctcgcgcaccaagctcgtcgcgggcgtgccggacgggaccggcgcctga

SEQ ID NO: 45056 - DNA, 1476 bp, Cellulomonas bogoriensis 69B4 = DSM 16987
atgatgacgcgagccgaaggtgcgtacctgggtgcggtgcgggccttccagaacccgatgctggccctgctgcacaagcgtcacgcccctctggtggtcgcgctgctgtcgttggtgttcaccgcggagcgtccgacggtgccggtggccgacgcgcacacggagatcggtgacgcgttggaccagctgcgggtggcgggtcatgacgaggccctgccgggggccacggcccgtgagctgtgtcggcagtgggcggacgcggggtggttggtgcggcacgtgctggatgacgacgtcgaggtgtaccggttgtccgcgcacgcggtgggggcgctggaggtcgcggggcgggccggtggggcccgtgcgcgggtgtcgcagtcgcgggtgcggacgttgctggacgcggtggagcgcctgtcccaggacgccgaccccgacgtgatggtgcggatggcgcgcctggactcccagatcgagcgtctgcgtggggagctcgcccggatccagcggaccgggacggtggaggtggtcgacgacgagcagctggtcgaggaggccgagaacgtcctgcacctggtgcgtgagctgcccgcggacttcgcccgggtggcggagtcgatcaaggccatgcagcgggacgtggtgacggcgttgcggcaggacgagcgccccacgggcgaggtgctgcgcgagtacctgcaacgtggggagcacgtgatggagtccacggtggaggggcgggcgttcgcgggggcgttgcggctgatcggtgacccgcggcgcctggaggagctgtcggaccagctcgaggtgatcctgaggcacccgttcacccggcgcctgccggcgccccggcgcaccgagctgcgggagatcggacgccggatcgagcagggcctggaccaggtgttcagcgctcagcgggaggcgtcctacgtgatcaccacccaggtgcgcaaccacgacccgttgcgggaccggcaggtcgacgagctgctgcgggacgtcatgaccggcctgcaggggtggatgcccgggtcgcgccgcgggcaccaggtcgagccgttgcggcggttgccggtggccgaggtcgaccacctgcgccagacacccggcgacctgcggccggcgcaaccgccctcgccgttgagcgagtgggacgacggtgtgccgggggtcctgccggaggaggcgcgggcctggggcgggcccaggtacgcgacgttgcacgagcacctggctggcctggcaggtggggacgggggtgtggacgtggcggccgcgttcgaggccgccccggtgggtgcccgccgcccggtggacctgctgggcctgctggagatcgcgcacgacctggggatgaccgagaccgacgaggtggcgttcgtcgaggcggtccgcccggacggcacccgacgcaggttcgcgttcggtgccgtcaccgcacggacgaggggcgaggacgatgactga

SEQ ID NO: 45057 - DNA, 651 bp, Cellulomonas bogoriensis 69B4 = DSM 16987
atgactgagacgacgggcgcgttcatcagcccggtccccatggaggaggacccggcgcagctgttcgccggggactgcggcaccctggacgcggacgtgcgccggttgctggtgcggctgctgcagcgccggttcctgctcgcggaccgcaaccccgcccagtggcgcaccctggtggagaaccagcaggtcgtggagtcgcgtctgcacgacctgttcgtgcacctggtcgtggaccaccagcggggcatcgcgtacaagaagcaggtgcggtccgcggagctggacgtgccggtcctgctgcgcgacgaggcctacacccgggccgagacgctggtgctggtgcacctgcgcaccgtgttccagcgcgagcggggtgcgggggagtcctcggtgcgggtggacgtggaggaggtcgagcagaccgccctgacgtacttcgaccccgacgacacgaacgtcgcggcccgccagcgggagatccgggccgcggtggcccggttggtcaaggacggtctgctggaggaggagtccgagggccggtaccgggtcaccccgttggtggaggtggtgctgagcaacgcgcgcctgaccgagctgcgggactggttgcgtacgcaggtccgtgccgagggtgaggagcaggcctga

SEQ ID NO: 45058 - DNA, 3372 bp, Cellulomonas bogoriensis 69B4 = DSM 16987
atgacgatggtggacacgctgttcgggttgctgcccgaggcctcgaccggtcagcagtgggtggggcgtgagctgcagctggtgaactggggcgggtacgacgggcaccacgcggtgcgtctggcgtccacggcgacgttgctgtcaggtgggtcgggctcgggcaagtccacgctcatggacgcctacatcgcactcctgatgccgcacacgacccccttcaacggggcgtccaacggtggcgtggtggggcggccccgcggcaaggaccagcgcaacatcctgtcctacgcacggggcaagctcgacgagtcccgcaccgaggacggcacccgggagagggtgctgcgcggtgagggccgggacacgtggtctgccgtcgcgatgacctgggcggaccaggccgggagcctgttcaccgcggtgcgggcctggtacgtgcccgcggcggcccgcaccctggacgaggtggtcgccgtgcgggcgacctgcgacgggccgttcgacctgcgtgacctgcagggcccggccacccaccggttgggtcgtgcggcgttgaccgaggcgggcctgacgtcgttcgacaccgaccgggagtacaccgcgcgcctgcacctgacgttggggatcggggcctcgggcgggggcaccaaggccgtcgcgctgctgggacggatccaggccggccagcagatcaccaccgtcgacgccctgtacaaggcgatggtgctggaggagccgggcacgttcgcgacggcggacgcggtcgtggagcagttcgaccggttgagcggcacacgcgagcagatgatcaccgccaggcagcaggtcaaggcgctggagccgatccgggagcaccgggacgcgatcaccggtgccgccgagcggttgcgggtggtggacgcgctgggtgcggtcgaggaccgtacctccccggtggcgctgtggcgcgccgagcaccgtctgggactgctgcgcgcggtggagggggagctgcaggtcgagcaccagcaggcccgccgtctggtcagcgagaccagcagccgggtggacgcggcccgggccgagctcgacggggtcaggcagacgctgtggtcctcgggcggggacaggttggtcaacgcacgacgggagctgcgtgccgcggagcagcggcgggaccgggtcgtggcggcccgcgcgcgcctggaccagaccttgcaggcggcgttcggcgacaccgtgacgtccgaggcgggcttcgccgacctggtggagcgtgcgaccacgaccctgcgggacgcaggcaccaagaccaccgcccggcaggcgttcgccgaggcgatggccgaccgcaaggaggcacgcgcggacctggcggccctgcgtgaggagcgcgggcgtgtggcccgccgtgccgggaacgtgcccggtgacctgcaccaggcgcgcgaggctctggcccgggccgcgggtctggagccgcaggacctgccgttcgtggccgagctggtcgaggtgcgcaccgagcacgagccgtggcgggaggcgttcaacctggcactgggtgggttcgcgaccctggtgctgatcgacgccgcgcacctgcgtgccttccgtgccgccatcgacgacgtgcccaccgcccgccggatccgcttcgagggggtccccaccggcacccggcacgacgtggtcctggaccagcggacgctgcccggccggctggagttccgcaacggacccttcaccgggtggttgcgcagcgagctggcgaaccggttcgactacgtgtgcgtcgacacccccggcgagctgtcccagcacacccgggccctgacccgctcaggtcagctgtcccagggcaggcagggcgcccacgggggtcggggccgggccaacgtcctggggttcaccaacacgcgcctgctgacccacctggaccagcagatcctccgcgccgaggaacgcctggcccaggccgaggagcacgtcaccgacaccgagggccggttggaccgccacgaggtccagcgagcggcgttcgccgccgtcctggagacgacctgggagcaggtggacgtcgacggggccgacgccgaggtcacccgatgggagcaggtcgccggggacgtgacctccggcaaccctgaggtcacgcggttgcagcagcaggccgacgccctcgaggcctcgatccgtgggctcaccgaggagctgggccggacgaagggcaccgcggaggacctcggtgcccggtgggcggcgaccaccgacgaggtcgacgccgcccaaggtgcactggacgccgcccgagcggcgggcaccaccctggacgccgcacagcgcacctacctcgaccggctcctcggctccggcgacgacgcgagcgggccgggaggcccggtcgtcgcgttgcggtccttcgacgacatcctcgcccgggccgcgcagctcctgcgcgccgaccgtgacgccgcccaccaggcggtggccaccgcccgtgaggccctgcgccgcatcttcgagacgttcaccgagcgctggcccgaccccgatctcggtaccgacccggacgcctcctacgaggacttcgagcggatcctggtcgacctggagaccaacggcctgcacgacctggagcaggactggcgcaggagcctgctgcggttgtccggcaacgacctggccgacctgcacaacgccctgacccgcgcggtccgtgagatcaaggagcgcatcggccccgtcaacgacatcctcgccgacctcccgttcgccgacgacgaccaccgcctgcgcatcgaggcccgcgacacccggtccacggtggtggcgaagttccgtgccgagctgcgcgagctgggcgaacccgtcgcccccgacgccaccgatgccgagcgcgaacgccggtacgcccggatggcgaaggtcatcgacaggatccgccgcaccgccccggacttcgccgacctggtcgacgtgcgccggcacgtgcgcctcagcgccgagaaggtcgaccgggagggtcgccacgtcgccctgtacgaccacatcggggagaagtccggtggggagtcccaggagctcgtggcgttcatcgtgggtgccgccctgcgctaccagctcggtgacgccggcgccgaccggccccggtacgcaccggtgttcctggacgaggcgctcatcaaggccgacgcccggttcaccggccgggcgatcggggcctggcgcggtctggggttccagctcgtcatcggcgcccccaacgacaagttcggcgccctggaaccccacgtcgacctcaagtacgtcgtgctgaaggacacctcgggacggtcccggaccaaacccgtggtgggcgtcgaggaggaggtccccacctcggcctga

SEQ ID NO: 45059 - DNA, 1533 bp, Xylella fastidiosa; identical to SEQ ID NO: 41854

SEQ ID NO: 45060 - DNA, 714 bp, Xylella fastidiosa; identical to SEQ ID NO: 41642

SEQ ID NO: 45061 - DNA, 3432 bp, Xylella fastidiosa; identical to SEQ ID NO: 42631

SEQ ID NO: 45062 - DNA, 1206 bp, Xylella fastidiosa; identical to SEQ ID NO: 41644

SEQ ID NO: 45063 - DNA, 1431 bp, Mycobacterium smegmatis str. MC2 155; identical to SEQ ID NO: 41766

SEQ ID NO: 45064 - DNA, 579 bp, Mycobacterium smegmatis str. MC2 155
atgagcaacgaacgtgcagtggcaaccgccatcattcgtctgatgcagggcgtcgtctaccgcgatgcggatgaggacacgtggctgacgctggaacgtgcgggggccggcgttcgggaccacttcgccaccatcggaatcgatgtggtggtcgacgacgccgagggttacgcctacctgcgctcccggccttcggaggacggtgaggaggagttgccgcgcctggtgcgcaggcgcgcgctgacctacaacgtcagtctgctgctggtgctgctgcgtaagcggctcgtcgagttcgagaccagcggcggcgacggccgtctggtcctgagcaccgaacagatcgtggagatgctgcggctgttccaagccgactccaccaacgacgcccgagtcgtggaccaggcggagaccaccatcaggaagaccgcagagttcggcttcctgcggcagctgcgcgggcagcgcgaccactgggaggtgcgacgcatcctcaaggcctatgtcgatgcccagaccctgtcggacttcgcggccaaactgcgccaatacgctggagcaggagcaggcgatgagtaa

SEQ ID NO: 45065 - DNA, 3384 bp, Mycobacterium smegmatis str. MC2 155
atgagtaaaacgatctctcggacagccgaactgagcgtgcgtcccggggcgggatatcgactccagtacgccgagatctacaactggggaacgttcgacggccaggtttggcggttcactcccggcgccgagaccgcattgctgaccggtgacatcggatcgggcaagtccacgatcgtggatgcgctcaccacgctgctggtgccgtcgcacaaagccgcttacaacaaggctgccggcgcggacgccaaggaacgcaccctgcgctcctacgtcgaaggccattaccgatccgaacgaaacgaggccaccggaaagtctcggccgaaggggctgcgggagaacagacggacctactcggtgatcctcggtgtcttccgcaaccacggccacgacgagacggtcacgctcgcccaggttttccagcagcgtgagagcaccggacagccctatcggttcttcgtcaccgcaaccaaggagctgtcgatcgccgtcgacttcgccgacttcggctccgatctgcgcgaactgcgaaagcggctgcgatccgcaggagcggagatcttcgacgagttccccaagtacgcgacctcgttgcgacggctgttgggaatccggtcggaacaggcactcgagctgttccaccagacggtctcgatgaaatccgtgggaaacctcaacgatttcgtgcgcgaccacatgctcgagccgagcgactcgaccgaacgcattcgcgagatcatcagccacttcgacgacttgaccagggcccacgacgccgtcaagcgggcacgtgagcagctcgaagcgctggaaccgattgccgacactgcggccaaatacgatgccgcactggctgaacgcgacggcctggagcacgaacgatcggcagttcggctcttcatcgccgaactccgttccggacttctcgccgatgagatcggtcggttagaggccgacggcgccgctctatggcagcaacaggatgccgccgaagccgaccagcgcagactcaaccacgaacgcgactccctgatcgaggagcgtgccaaggccggtggggatcgcatcggcgagttggagcggctggcccacgaggcccgtgcccaggccgagtcacggcggcaggccaggacattgttcgactccgcggtcggcgaggccgggctgacgaccgtcgccgatgaagaggcgttcctcaacctgcccactctggtcgctgccgaacgcaccaggctggccgccgagaagcgcgaggtcgatgccgccactgtcgacgcgatcggccgtgagcgtgactgtgaacgcaagtgcaccaccctcagcgcggagatcgagagccttgaacagcgcaccagcaacctgcctcatgagcaggtcgtgatgcgcgaagagttgtgtgccgcaatcggactgacaccggagcagctgccctacgccggtgagctcctcgatgtgtacgacgaacgcgccgagtggcgaggtgccgctgaacgagtgctgcggggcttcgcactctcgctgctggtgccgcagccgcactacgacgccgtgacccgatgggtcaacgaacgcaggctcaccgtcgccggcaggggtgccaaactggtctatgagcgggtcgctgcgcgccgcgtgcggctgcagccagcggagtctgacgggctgctgctggccgactgcatcgaagttcgggagggcccgttcgaggagtacctccgcaacgaactgatgaagcgcgccgacttccggtgcgccaccacactccaggagttccgtgacctgcgacgcgcggtcacccgagaggggcaggtgcggtccggtgaccggcacgagaaggacgatcggcaccgcgtcgacgacccacgccgctgggtgctgggctgggtcaacgaacgaaagctcaccgccctgcgcgacgagttcgccgacctggaacgcgatcggcaggaggccgctgccgtcgcggccgccctgagtgcgcgcagggaagtgctgcagcatcggctggacgcccttgtgcgaatcgagggctttcggtcctggactgagctcgatgccgacgaggccgtatcgcgcgccggggcccacgacgcggagcgggctcggttgcagtcaggatcctctcgactggaggagatcacgagggcactggaacgcaatgccgaagaagccggcgttgtcgccgagcggatcagacaactcaccggtcagctcgccaccacggccgcagccgtgcagcgcgcgcagcaggaccgaaaacgagatcaggagttcgtgactgcacagtcacccgagcaactcgaggtggcgcgggcgtcctaccccgctctcgaccgccggctcgctgcgagccggcccactcgagccgacgactgcgccgccgccgagtcggcgctgtcggaagacctgtaccggcgcatcgagcgattgacccgtgagctcggcgggtatggccagagcctggcacagtacatgctggaggtgcttcgccggtggcccgagctgcgtgcggacatggatgccaccgtcgaggcacgcggcgacttcctggccttccgccgccgcgtggcgaccgatgacctgccgcgttttgagtcggagttcaaggaacagctcaacaagaacgctatccaggagcttgcggggttcaacaactggctcagccggcaggcctcggccatcgacgaacgcatcgaccgcatcaacgaggcgttgggcgcggtgccctacaacccaggccgcttcatccggttggagaaggagcccaccaccaatcaggatgtcgcacagttccgttcagatcttcgcaacctgaccaacgacgcgctggcggtcgacggcgaccagtactccgaacagcgcttcctcgacgtgaagcggatcatcgagcgtttccgaggtcgcgagggctacgccgaatcggaccggaactggacccggcgggtcaccgatgtccgcaactggttcgtgttctcagcctcggaacgagacgtagacacgggcgccgagtgggagcactacagcgactcggacggcaaatccggcgggcagaaggagaagctcgcctacaccatcctagcggcgtcgctggcctaccagttcgggctcgaatggggcgccgaggagtcacgcgacttccgcttcgccgtcatcgacgaggcgttcgggcgcggatcggacgtgtcgacacggtacgcgctcgatctcttcgcaactctcgggctccaactgttgatcgtcacaccgctgcagaaggtgcacgtcatcgaaccgtacgtgaaggcgatcggcatcgtggacaacccgaccggaacatattcgcgtctgcagaccatgacgatcgaggagtatcgcgcccggcgcaacggaactcggccgtga

SEQ ID NO: 45066 - DNA, 1170 bp, Mycobacterium smegmatis str. MC2 155; identical to SEQ ID NO: 41769

SEQ ID NO: 45067 - DNA, 1467 bp, Mycobacterium smegmatis str. MC2 155; identical to SEQ ID NO: 41770

SEQ ID NO: 45068 - DNA, 723 bp, Mycobacterium smegmatis str. MC2 155; identical to SEQ ID NO: 41771

SEQ ID NO: 45069 - DNA, 3357 bp, Mycobacterium smegmatis str. MC2 155; identical to SEQ ID NO: 41772

SEQ ID NO: 45070 - DNA, 1431 bp, Mycobacterium smegmatis; identical to SEQ ID NO: 41766

SEQ ID NO: 45071 - DNA, 579 bp, Mycobacterium smegmatis; identical to SEQ ID NO: 45064

SEQ ID NO: 45072 - DNA, 3384 bp, Mycobacterium smegmatis; identical to SEQ ID NO: 45065

SEQ ID NO: 45073 - DNA, 1170 bp, Mycobacterium smegmatis; identical to SEQ ID NO: 41769

SEQ ID NO: 45074 - DNA, 1467 bp, Mycobacterium smegmatis; identical to SEQ ID NO: 41770

SEQ ID NO: 45075 - DNA, 723 bp, Mycobacterium smegmatis; identical to SEQ ID NO: 41771

SEQ ID NO: 45076 - DNA, 3357 bp, Mycobacterium smegmatis; identical to SEQ ID NO: 41772

SEQ ID NO: 45077 - DNA, 1431 bp, Mycobacterium smegmatis; identical to SEQ ID NO: 41766

SEQ ID NO: 45078 - DNA, 579 bp, Mycobacterium smegmatis; identical to SEQ ID NO: 45064

SEQ ID NO: 45079 - DNA, 3384 bp, Mycobacterium smegmatis; identical to SEQ ID NO: 45065

SEQ ID NO: 45080 - DNA, 1170 bp, Mycobacterium smegmatis; identical to SEQ ID NO: 41769

SEQ ID NO: 45081 - DNA, 1467 bp, Mycobacterium smegmatis; identical to SEQ ID NO: 41770

SEQ ID NO: 45082 - DNA, 723 bp, Mycobacterium smegmatis; identical to SEQ ID NO: 41771

SEQ ID NO: 45083 - DNA, 3357 bp, Mycobacterium smegmatis; identical to SEQ ID NO: 41772

SEQ ID NO: 45084 - DNA, 1392 bp, Clostridium beijerinckii ATCC 35702; identical to SEQ ID NO: 41804

SEQ ID NO: 45085 - DNA, 606 bp, Clostridium beijerinckii ATCC 35702; identical to SEQ ID NO: 41805

SEQ ID NO: 45086 - DNA, 3255 bp, Clostridium beijerinckii ATCC 35702; identical to SEQ ID NO: 41806

SEQ ID NO: 45087 - DNA, 1182 bp, Clostridium beijerinckii ATCC 35702; identical to SEQ ID NO: 41807

SEQ ID NO: 45088 - DNA, 1461 bp, Photorhabdus luminescens
ttgaatttccaagggttacaggcaaagtatcgccgtctatttcaggaaagtgccgcctggaaactgttaagagccgataattcccctttaattttggcgtttctgggggagttgttttctgaggagagtgaagtcccttttagtcgtgcccgcgtgtcacttggtgcagaactggtacgctgtcgtgaacttggtctttgggaaactgaaacgggagcgggtacgtatcttaataaatggattcgggaaggctggttgcgtgagatggacgacatgttaaccaaaacggatgccagtgaagttgcacttcgttttagtcaggggcttgatgaacgcagtacaggaaccaccgcatctcaccttagaattgttcaagaagcggtcagggactttgcagtagcgattagtccgaatgtcgatgaacgtgtcacgcttttggaatatagaaaagctgaaatccaaagagagattgatgctctgagagctggcgtggtgcttgaactgaccgagcttgagcagcgggagagaattcgtgagatctaccagttggcctctgttttaacgggtgattttcgtcgtgttgaagatgaaattcgtcaactggatcaggaaattcgcattcaaattattgaaggagattccaccagaggggatgttcttctctctgttttagaaaaagaagcgctattggcgaaaacggatgcgggtagtgcgtttgagagtttctttgatttgttatgcgatcaaaatagaacaatggaactgcgggatcaacttcgaagcattttaaatcgtcccgcagcagaacatttgactacccagcaacgacagttcttaaatcagctcatgagggaactgagccgcgagagtgacagagtttttcaaatcaggcgaagaacggaagagagtttgcgtgcttatatagagagtggcactgcgcaagaaaatcgtgctgttgatagattgcttggtcaattggaacgactcgccgttgaattgaggaactcaggttatgacttgcaaacggcgacaactctgtcactgcccgttggcgcggcaagtattagctctcctgaaagcatgctccttaaatcacctgatgaaaaactagatacttcaggtgctgaagaacagatcaactctcgagaaccgagtatgcagatgctggattgtcttgatgttgttcaaattcgattaatcgctgagagaacattagcaacgttaaaagagtttggcccaatgacgattgcatctgttgcaaattatcacccacttaattcagggttggaggagttagttgcctatttgcgggtggcgaaatctgtcggggctgcatcattggaaggaaaagaatcaattgaaatcagcgataaacggggagttcgcttgcgggcgtctatacctacttttctgttgagtgccgacctgtttccagacagtttggatgaattagttctttaa

SEQ ID NO: 45089 - DNA, 792 bp, Photorhabdus luminescens
ttgataaaacaccatacgcaatcagagtataacccgcttacagatacagccggtgttgaatctaatgttgctttttcggttgttaatcaaagcccatcctgtgacgttgatgatgtattagtcagtgagcacgctgagaactcaaacagtgatatgccgcctgatgcgcgtcgggtgctggttagcttgttgcgtcagggcgttattttgtcttcgcagaaagctaaactgtttgaattactttgtcgataccaatctgctgtacgcaaacatctatcagaagtctatttgaagttagttttggatgaaaaagcaggtgttgcctttatagctggctttcaaaatgaggaagatactgaatcattgggtatagatgatgacgaggttgtctctctgattagccgaaggacgctctctttatacgatacattgttgctgttagtgctgcgtaaacactatcaagaccgggaaacatcgggagaacaaaggattatcattgatattgaacgtatagaatcccatctgacgccgtttttaccgctgacaaacagtactaaatctgaccggagaaaactcaagggcgctcttgataaaatggtgacgaaaaaaatattgagttcggtccggggaagcgaagatcgcttcgagattacgccggtgatccgctatgtagtcagcgctgaatttcttgaaagcatgcttaatgaatacctgaaaatggcgagagagaagggtattgagctaaataaaaatggcggcgacgctgttgattatcaagatgaagaggaatag

SEQ ID NO: 45090 - DNA, 1197 bp, Photorhabdus luminescens
atgaaaaaagggcagtatgaggtgcgttgggggttattgccagcgcaagttaagagcatcattaggcagcgtgagtgggataaccgttcctcactaaaagaccggctactgggcaacagggcatttcctattcgcgttggattaaaaccacccaaagggaattctgccatattagatatcgctcattttcaacggtttattgatgagtggagatcatttcactatcaagatgttgtggagtggtcttctaagaatttcagggaattatctgaacaacgtattccaacttttgttgtcattgaatcgatgcaacatttgattcaatttttagggaatgatgccctttcccgaagtaaggtatgggaaagaaatatgaagccatttttgcggattgataaagatctctatcctgcattggtgaaatgtatagatattgtggaaaaactctcgttgagagatgcggaattattagcagaattgctaccacaattaaagcagggcttaggggaaggacaatatttaagagcactgccgctcattgggattgatactaagtttcttgagaaccaccagatcctgattgaagagttggccgatattattcacaagggggctgtttcggcatcaggtggtcttatttcctggttagggtgtgcaataaatcccaaaggttggttaactatcaggccgctctgccatgccgcgactgcggcgcttgggggaatgccaatactacaaatacccggcgaattacttagaaagtacgaacttccggcatcgaatattctaatagtagaaaatttacagtctggtttggcattgcctgaaatgcttgacacgatagcggtgatcggaggaggtaaaaacattgcttggatggatgcggcatggctgagaaataaacgtgtaggatattggggagatattgatacttgggggttgtctattctcagtgatgccagaaacaagtttgtggatattgagccactgatgatggatgttgaaaccgttaaaattcatgaagacagaatggtccctgaatcaaatccagtagaatccaatccttcatcgctaaatgaggatgaaacaaagttgtttaatgatctcatttctggtcgtttccaatcttcacgtttagagcaagaacgcctttcagctgattacattagaaataagcttatggattggctgtcgtga

SEQ ID NO: 45091 - DNA, 615 bp, Clostridium novyi A str. 4552
ttgaaggtagagcagtttaatataaggaacaaggaaaactttaaaaaagtatgcaataagcttttaagtgtatgttttatatgtaagaaaaaagaagatacaaaaggcgattactattttatagagagcaatttggaacctctaaatgaatacctaggcttattagactatgagatagaactaaataaaaccattggagttgctcagcttataaataaaaataattcaaataaggttaatcttaagcttatagatagcatattgcttttgattcttagaatactttaccatgaaaaaatggaggaactaagtcttacagaggatataatggttcagatatcagagatacaagaaaagttcatagctttagaatttcaagataaaataattgataaaacaaagcttttagacagcttaagggttttaaaaagatacaacataattcaaaacttagattcaaatatgaccttaggagattcaaggattataatatatccttctatacttatggcattaagaatggaggatataacaaaggtatatgaaaagttaaatacttataagagaaaggaggtaaaggaagatgaagaagttaacagccatgaggcttattaa

SEQ ID NO: 45092 - DNA, 3261 bp, Clostridium novyi A str. 4552
atgaagaagttaacagccatgaggcttattaattggcatgcttttgtagatgaaaccatagagataaagaattcggtattgctttcaggtgaaaatggagcaggaaaatctactatattagatgctatacaatttgttttgacttgtagtaaatataattttaataaagctgccaatgaggagtcaaagagaaagcttacaggttatgtaagatataagacaggaagagaaggaagcgaatatttaaggacaggagatgtaacctctcatgtagctttagaattttatgaagaaaacagaaaaaattattttataataggtgctgttattgattcatcctctgaaacctctgaaaaagttatgttttacagaatagaaaagcatagaataaaggatttaagttatatagctaatgaagttcctttagatatatctaaatttaaaactacctataggaataagagtattcaagcatacactaactatggtgatgcaagaaaggattttctaaataagctcggtagaataggggataagtttaataacttattgccaaaggctcttgcctttaaacctattacagatgttaaggactttgtttatcagtatatattagaagaaaaggcccttagtatagataacttaagggaaaatataagaacctataaagaatgccaaaatctagtggatgacgttagaaaaagaatagaaaagcttcgaaatataaaagaaagctacgtggaatatgaaagggcagtaagcaacgtaaagcttcattcctttattattgatatagtggaaagagaaatattaaaggaagagatagaagatttagaagaaaaaataaaacgtggtaaggataataaactattaggggaaagaaggcaagaagaattaaataatttaataagacaaaatgaaaataaaaaagataaccttcaaataaccttaaacactaacgaagaatatttagcattaagagatataaataaaaatatatcagaaaaggaaattaacattcaaagattagcaagtagtaaaagaacttttgttaacaaattaagagaagaagaaagaagacttcaaagattaagaaatcttggaattgaaagaataggaataagtaccttcttagacttaactaaagatcttaatgaagaattagataactttataaatattgcaagagatttaagtaagaaattagatgaaaaaagagaagaagagttaagaaattcatttaattatgaaatagacattaagaaacaaaaggaagaattaaagaaagttgaagaaagcataaaagaattagaaaagaggaatcttcaatatcctaagaatgttattaccttgaaggaggaaatagtagctaaatttaaagctttaggaataaatgatgaacctaaaatattatgtgaagtattagaggttacagatccaaagtggaaaaatgcagtggaaggatatttaaacactcaaagattttatcttatagtggaaggaaataattttgacaaggctcttgttgagtatgatagattggtaaagaaaaaaggaatacattctgtaggacttataaacactttaaagttagataaatatgatgaggtagatacgaactctttagctgccgttgttacatctaaaagtagagatggtaaaagatttatcaatatgattttaggaaaagtaatacgagaaaaagatattaataaacttaaggaacataaaacagccattacaccaaattgtatggtttatcaaaatcatgtggcgagggctattgataagggaatatacaaaagaccttatataggagaagaagcttataagattcaactagaggagtttaaaaagaaaagggaaatacttaaagaacacatagatgatttattagcaaagaaaaaggacttggataatataacaagtattataaagaatataaagctagagaagataagcgaagaggcttatgtggttagagaagaaaaaaatgaaattttatcactagcatctcttaaaaaagaaaaagaggaattgtcgaataatagtacttttatggaactaaactttaagttagaagaagttaaaaaagaaattgacagattaaaagaggaatataggaagttagttaaaaacatagggtcattagaaaccgatatgaaatatgatagagaacatttaaataataaggttaattatctagagcataaagaagaggatttaaaggaaaaaagtttaaaggactcaattgtctttgaagaaggagaaaaaagagttgaggcagaaagaaaaattaaaaaactagaaactataaaaataaatttcacaacctcaaaaaacaacaatgaaacaagaagacaaaatagactagaaaagttaaaggagctccaaggggattataatagagagtatgagtttggagcagcagtgggagaagaaggggtagatggttttttaggagaacttgaaaagcttagaaaaagtactattatagaatatgaggacaatgtaaagaaagcaaaggaaagagcggagttagaatttagagaacactttatatcaaaaataaatgaaaatataactgtggcaaaaaaagaatttaaacagttaaatagagctcttcaaggagttaaatttggaaatgaagagtatgagtttaagatagaaaagagcaaggatgcaaaggtaaataaatattacgatatgataatggatgataggaatataggggaaggatttacattatttactgaagaatatgaggataaatataaggaagtattagaagagctttttgataagttaactatagataatgaaagtgaagataaagaactacagcgttttacagattatagaacctatatgaattatgatataaaaatcaaacattctaatggagaacattcgttgttttcaaaggtttgtaaggaaaaaagcggtggagaaactcaaacaccatattatgtggctatggcagcttcttttgttcagctttattctatgccaacaaattccgaaccaataggattaatattatttgatgaggcctttgacaaaatggatgaaagcagaatagttgctatgatggagttttttaatagattgccgctacaattaataattgcatcaccaccacaaaaaatagatactatagctccttttgtaaatactactttattggttataaagggagaagattatagcttaatagagggatattgtaatgaaaaaatacaaggaaaagatattaaataa

SEQ ID NO: 45093 - DNA, 1197 bp, Clostridium novyi A str. 4552
atgaaaaaatacaaggaaaagatattaaataatttaatagatgtctatgaaagaagttccttatacaaggggacttctttaaatgaaagaaatatatcatttaagtttacagttaaaaatataaaagattattttgatgaagacaattatttaaaaaaagaagaaatagagcaaagtgctaaagagttagaaggactagagcttatcaaaataatttggggtaagggatacgaagatcatcttataaagagagtagatttaaatgtgaatagaatcaatgaggcttacaagctattgaaaagaaaatcaaagggaaatagtgaaaaagagtgcattaatttattaaaaaaatatgtagaagaaggttttgtgttaggaaaattttcaagggaaatgataaataagttagaggaaaaagcttctataaaaaagtatttagatatagaaaatatcgaagagtgtaagaatatactaaacgcccttaagaatgttataagtcaacaagaggagatatttaaaagaaatttttctataaggatatttaatgattcaaagaggtttgaagccatagaaggaaaggttttaaggatattgaaagattttactagtgaagaaacattgactttagaagaatttaatatattcaataatccaagttatgtttatttcaaaggaaatactagattaaagctaaagaataaggtcttagatatagttgatctaaaatttggcataggaataagttcgcaagatttaaatgaaataagagaggtagagataaacacatctaaaataataaccatagaaaacctaacaacttttaatacatttaatgaagatgattttgtttgtatatacttaggaggatttcacaataatgcaagaagggagcttcttaaaagaataaagaaggataatggaggtaaaaagttttatcatttcggagatatagattgtgggggatttaagatacttaagcatttaagggaaaaaacttctatagactttattccatataacatgaatttagaaactttaattaatggaagaagttattgcaaggagttaacacaaaatgataagagagtgttagaggaaatgcttaaggaagaaagctttaaggaattttatgatgtttttgagtatatgttaaaagaaaatataaaacttgaacaagagcatttatgttatgaatga

SEQ ID NO: 45094 - DNA, 1461 bp, Mycobacterium abscessus subsp. bolletii; identical to SEQ ID NO: 41997

SEQ ID NO: 45095 - DNA, 750 bp, Mycobacterium abscessus subsp. bolletii; identical to SEQ ID NO: 41998

SEQ ID NO: 45096 - DNA, 3348 bp, Mycobacterium abscessus subsp. bolletii; identical to SEQ ID NO: 41999

SEQ ID NO: 45097 - DNA, 1461 bp, Mycobacterium abscessus subsp. abscessus; identical to SEQ ID NO: 42721

SEQ ID NO: 45098 - DNA, 750 bp, Mycobacterium abscessus subsp. abscessus; identical to SEQ ID NO: 42722

SEQ ID NO: 45099 - DNA, 3348 bp, Mycobacterium abscessus subsp. abscessus; identical to SEQ ID NO: 42723

SEQ ID NO: 45100 - DNA, 1461 bp, Mycobacterium abscessus subsp. abscessus; identical to SEQ ID NO: 42721

SEQ ID NO: 45101 - DNA, 750 bp, Mycobacterium abscessus subsp. abscessus; identical to SEQ ID NO: 42722

SEQ ID NO: 45102 - DNA, 3348 bp, Mycobacterium abscessus subsp. abscessus; identical to SEQ ID NO: 42723

SEQ ID NO: 45103 - DNA, 1470 bp, Xanthomonas campestris pv. arecae
atgaaacatcaggcacgtatcgcaggctaccggcaactgcgcgagcagccggtgtggaaactgcttgccgccgaccacgcacccgagttgatcggcctgctgcagacggtgctgatggatggcgaacgccgcctgccttcggccgtattgcacgcgcgtttgcagcgccagctggatgccttgcgcgccgacgagctgtcgcgcgaactgccgcgcaccgcgcaggcgtatctggcgcattggttggctcagggctggctggaacgccgcctgcccgaaggcgccaccgaagaagaatacgaactctcgcgtgccgcgacccaggccattcgcttcatcgtgggcttgcgcgaaagcagcagcagcgctaccgaaagccgcctgtcgctggtgatccagcaactggtgcagctggccggccagaccgaagccgatccggaagtgcgcctggccgccttgcgcgacgaacgtgcccgcatcgatgccgaaatcgaacgcgtggcctccggccgcgtggcggcattggatggcaagcgcgcgctggaacgtgcccgcgatctgattcgtctctccgacgagctggcccaagatttccatcgcgtgcgcgacgacttcgagcagctcaatcgccagttccgcgagcgcatcatcgacgacgaaggtgcgcgcggcgatgtgctcgaacaactgttcaacggcgtggatgtgatcgccgacagcgaggccggtcgcaccttcgaggcgttctggagcctgctcaacgacacccagcaaagcagtcaactcgatcaagccctggacgcactgctcgcacgcgggtttgcgcgcaagctcgatcgccgcgaacgcgcgtttctgcgcgggctcaccggcacgctgctggagcgcggcggcgaggtgcacatggtgatgcagcacttcgcgcgcagcctgcgcggctttgtgcagagccgtggttatctggagcagcgtcggctcaatcaattgctcaagcaggcgcagggcgaagccttgcaactgcgcgacagcctgcatgccaccaccgccaccggctacacgcaggcgctcagtggcagccgcctgcgctcgttgtcgcaatggcggttgcacgacccgcggctcacccaggtggacggacgtgtgcaggcggccgatgcggccgagatctcgctggacagcgtgggcgatctggtcgcgcaatcggagatcgacgtgcgcagcctgcgccgcgacctgcatgcgctgcttggtcaacgcccgcggttgaccatcggcgatgcgctacagcagcgcccggcgatccaggggctgggcagcgtgatcggatacctgtcgctgggcacgcgccacggcatggtgatcgaaggacagatggaaacggtgcaatgggaaggcagcgacggcgccgtgcggcgcgcgcgcattcccttggtgtggtttacccgggagaaacgcaatgaactggtctga

SEQ ID NO: 45104 - DNA, 705 bp, Xanthomonas campestris pv. arecae; identical to SEQ ID NO: 43168

SEQ ID NO: 45105 - DNA, 4017 bp, Xanthomonas campestris pv. arecae
atgacttcgcagcccaatctttcgccagtgcagccgggtacgtccttgtttgccgagacgcttgccgagcagcgtgcgcagcagttccggatgcggcgcctgcaggtgcacaactggggcaccttcaacgggctgaccgaagtgccgatcgcggagaaaggcttcctgttcgtcggccgctcgggttcgggcaaatcgaccttgctggatgcgatgtcggccttgctgacgccaccgagcatcgtcgatttcaacgccgccgcgcgcgaggccgaacgcagcgggcgcgatcgcagtctggtgtcgtatgtacgcggcgcctgggccgatcagcaggacagcacgtctggcgaaatcgccacgcaatacctgcgcaagggtgccacctggaccgcattggtgctggaatacgccaacgcgcacggcgaggcggtgagcctgatccgcttgttctggatcgccggcagcggcaacgcggcagccgatgtgcgacggcattacatggtggcgccgcgcagcttcgacgtggcgaccgagctggacggcttctatctggacctgcgcaagctcaaggcgcggctgggccaggagatcgcgcatttcgatggcttcgccggctatgccgaacgtttccggcatgcgctgggcatcggcaacgagatggcgctgcggttgctgcacaagacccagtcggccaagaatctgggcgatctcaatgcgttcctgcgcggcttcatgctggacgagccgcgcaccttcgaagcggccgatcggttggtggaggattttgccgaactcgatggcgcgcaccacgcggtggtcaccgcgcgccgccaggtagaaacgctgacgcctgcgcgcgagcaccatgcggcgttgatggcattgcgccacagcgttggcgagttgcgcgagctgcagttgggcgtggacagctatcgcgaacagcagcggcttgccttgctggaggagcggctgcaggagctggacaaccaggaccgcggccttgccggcgaagaaggccagcgccgcgaatcgctggataactacgaacaaaaactggtcggcctggagcgcgagcagcgcgccgccgggggcgagcagatcgaagagctggagcgtgagcgtgcgcgtgtggaacgcgagcgcgacgaacgcctgcgccgccgtgcgcagatcgagcaggcttgtcgtcagcttggtaccgcgttagctgccggtgccagcggctttgctgcgcagatcgcacatgcgcaaaccgtgctggataacggcaagcacgacgccagcgcactggatgacgccattgccgagcgcatgggtgcgcgccgcgatgacgaacgccgctttgccgagatccgcgccgaactggatgtgctgaaacgcgcgccgtcgagcatgccggccccgatgcaggccctgcgcgcgcggctgtgcgaagacatcggcattgccgaagccgcgctgccgttcgttggcgagttggtgcgagtgcgcgatgaccagatggcctggcgcggtgcgatcgagcgcgtactgaacggctttgcgcaatcgctgctggtggatgagcggcattacgcgcaggtcagcgaatgggtcaaccgcacccacatcggcacgcgcctggtgtacttccgtgtgcgccgtaacgacgatttgcacgcgcggcgcgtcgatcccgatgcgctgcctggcaagctccaattgcgcgagcacgcctttaccgactggttgcgcaacgaactcacccgtcgcttcgactacgcctgcgtggacaacgcaaacgcgctgcgcaacgccgaccgcgcgatcacccgcgaagggcaggtcaagcatcccggcgatcgctatgaaaaggacgaccgccacgcggtcaacgaccgcaagcgctggctgctcggtcacgacaaccgcgacaagctcaaggtgttcgagcgcgaagcgcaggcgctggcccagcaaatcgccagctgcgatgccgatgtggcagcgctgcgcaagcagcgcgagcaggaccaggaacgccaactcgctgcgcataccctggtggagcgcgactgggacgagatcgacgtcggccccaagctacagcggctgagcgatatcgatgagcagttggtgcagctgcgcgaaggcaacagcggcttgcgcgcgctcggtcaggcgatcgacaccgcacgcaccttgcgcgaccaggccaagcgcacttacgacgatgtgcggctggaacgcgcgcaactggcgcgcgagcgtgtgcggctcgaacagcagcacgcagcgtgtgctggccgcgccggtaccgccacgctcacccccacgcagttgcagggtttgcgggaacggcttgctgcattgacgccgttgtcgctggacaacctggaagcacacttccgtgtggtcgagcgtggcctggccgagcagcttgccgaaagccagggccgcgacagccggctcagcacgcagttgctggaatgcttccgccggtattgccagcagtggcctgaagacagcggtgacttcaccgtgagtctggccagcgccgacgatttcctcgcgcgcctggaccgactggaaagcgatggcctgccgcgccacgagcatcgcttcttcgacctgttgcagacccagagcaagaacaatctgctggccttgcaacgccacactgccgaggcccacaagggcatcaagcagcgcatggacgaggtcaacgccagcctggagcaggtgccgttcaatcgtgacaccgtgctgaccatcgaagtcagcgaccgccgcctggccgaggtgcaggaattccagcagcagttgcgcgcggtgctgtcgcatcaacagaccgaagaccgcgctttggccgaagcgcagttttccaccttgcgcgcgctggtggcgcgcctgggtgcacaggaaccggaggcacgccgctggcgcgaacaggtgctggatgtgcgcctgcatgtggaattcatcggtgtggaactggatgcgcaaacccgcgcgcaggtggagatctaccgcagcggcgccggcaagtccggcggtcagcggcagaagctggcaaccacctgccttgcagcggcgctgcgttatcagctcggtggtgaagacggcgaattgccgcgttactgcgcggtggtgctggacgaagccttcgacaaggccgataacgaattcaccgcgctggcgatgaatatcttcgaaaatttcggtttccagatggtggtggccacgccgttgaagtcggtgatgacgctggagcccttcatcggcggtgcgtgctttgtcgaaatcagcggtcgccacaactccggcgtgctgttgatcgaatacgacgagcaggcgcagcgcttgaagttgcccgagcgctcgcgtggcgatgaggcagcggtggccgatgccactgacgccgcgccatcgatcaaggctgcgatcgagcctgaagaagtgcagggtgctgcagccgcagatggcattgcagcggacgaccttccaatgcacgcggcatcgcctgtgccgggccacgcaacgcctgcggtagagaacaagcgcagtggcaagcgtgttcccgcagtggcgacgacgaacaagcagaacaaaaacgagcagaacaagaaggccaggaccgcatcttccacgcgcgcggtggcacagcctcgagcaacccagccgaaaaaatcgcccgtgcgcacatcggctgtgactggcaagccggcatcggacaaacgcacatcaggcgcgcagcaagcgcctgcggtgtcgtcaggagctgcgtccaaatccaacgtgggcaagaccacgcgctcttcaaaaacccaaggtaagccgatgacggcgacgcgcgcttccaacgccacatccaagaaggccgccgccaagccgcgtgcatcaaccgcgtcgacggggcagccagcacgtggcgccggcaagacaacctcggcacgcgcggcggtgaaaccgtcgccaactaaaaagcgcggtgcgaaggcaggtactgtccagccgcgcggcaagcgctga

SEQ ID NO: 45106 - DNA, 1407 bp, Desulfosporosinus sp. Tol-M
atggccgttttcgatgtgttgcccagaaactttttctcggttttggtgtcaacaaatcgagagatatatgtagaagctctgctacttttgcaccaaatgtttcaatttgaactaaacatcaaggtagatgattatatttctgctctcatctccttgcaggaagataaagattttatgcccgaagaagatgatgaaattaccgaaggaagtttgacatttagcggaaaagccagactaatacttggccgttttatcaaaacgggatgggtggaaaaagagtttttggatggctcttttattgaaatcattacaccacaaccatacgcaattccggtgatgaagcttctaggtgaattgggcaacggaggaacacaagaatataactctcttgtttttgcgacttattccgcgctaaaacaagctaaatcagatcatgtggatcagatgtacgaggctgtgctctctgcaaaaacaaataccgaacaattgcaataccaactccgtagcctttatcatggaattcgcagctacctaagggggattgaaaaccaaagtggtatcaatgatttacttcagaaccattttgaaagctacaaggaaatgtctgaccgaatttatcacccaatcaaaaccatggattctatccatcggtatatggttccgattcaaaatctcctgatggaggttctgggcaatgctgctctgatgcaaaccatatacgaccgggccatgacagtaaaaaaatatgaacatcccgaggaggcacagggggacattgttacggcaattaactatgtgctggatgcctatcagttattgggtagcattatcacagaaatcgaccgcaaacatagtaactacaccaaaagctccattgagaagattcggtacctgatgacagccgatcaaactattaagggaaagctggcgcagcttctgaaagcctatgcctcaagtgatgcaacgcagcaggaatctataggagctagattggagcggaatatcattgttaaccgtcaggagttttttgacggaaaatccctctaccataaaagtgtcagaagccgacgaatagatactacacccttggaggtggattcctcagaggagctgtttaatgatttgatgagcggcatgatagaacagattaaaaatggttatccgatttccagagtctgtgcttatgtggacaaattactagcacatggaaacagtgaaattaccagtgaaaatattacaatagatgaagattcggatttcattttactgttgttagccgtcttgcgagccaacgatccagaggtaacctattcagtcgaacttgccaacggaacaatggaaagaaacggctatcgcattccgcacatgatgatccgaaaaaaggaggagttgcaccatgtggagtga

SEQ ID NO: 45107 - DNA, 3396 bp, Desulfosporosinus sp. Tol-M
atgaaaaaactaactaggctccttctgatacattggcattactttacccatgaaacagtatcctttgagacactgaactttcttactggtaaaaatgcctccggaaagtccacaattattgatgcgatgcagcttgtgctttttggagataccagtggcagttattttaataaagctgccagcggaaaaggcaatcgttccttaatgggctatctcaaaggcgaattgggggatgatgaggacttcggctttaagtatttgcgaaatggtagatttaccagctatatcgcattggagttttacgacgaggaaaaggacaggtattttaccggtggctgctgctttgatgtgtattccgagaacgatatgcaaaagctgtttttcttgtacgatggcggatttccacaaagcgaatttgtggaaaataaaattccatgggagattcgaaagctacgagaatttctgaaagagaactgcccgagccataagactaccgatgtagggcgagaatttcggacggcattatacggtaaaatgggcggattgcgtgatcgatttggttctttactgaaaaaagcggtttcttttaatccaaatgttgatattcaggattttatatcagagtttgtgtgcgatacacagcaaacggtcgatgtcagtcaaatgcaggaaaacattagaagctataaacgtttagaagaagaagcgaatgtcttacaaataaaaattacacaattagaacaaaccatggtagagcataccgcttttttacgtgcaaagcaggatgagcagctctattcttttctgattgatcaggcacagcaggacatgaaaatatccgaactggaaagagtacagaaaaatgtggaggaactgctatctaagcttcgagatgtggaattaagcattgcaagccagagcagtcgtctctctcaaatgcaggatgagcgcaatcagctgcacgcaagactgattaacgacgaagcggcacaagcaattgagctgctggaatctgaaatagttgcaaaagaggctcaaatcaaaggcatttttgaaggttttgagaaagcaattgcccggttgtcaaaatacatttcaagttggaatagatgcgtgaacggtatgtcagagaagctaatgtctcttgaaacaggcaacttggatgcactgcttgattcacgtattcttgatatctgcgaggaaagcgctcattttttaaagcaagcggaatgcttggcaaatatggatgatcagtcgatcctttctgttggagaaaacgggctacaagaattatcatccctagtgcagatgcttagcgcccatacaattgagcttggctcgcgtatcgtagacgagcagaaacggttggccatccggcgaagcgctttgcaacaggaacaaaattctttggaaagtggaatctaccaattccctcaggatgccatagatttgaaagcagcgattgcgtctcggctgcgtactcttgcgaagcacaaggtaaaggttaccatcgttgcagaagcggccgagattgaaaatgaccgttggcgcaatgtaattgaaggctatttaaatacacagaaatactatattattgttccagacctgtatttcagggatgctttacgtgtatttgacgcaatgaaacgtgaccgaaaactgtatggtacaggtcttgttgatatcgagaaactgcgtcgtaaaaacccgtctattgacccgggtagtcttgcagaggagatacaaaccaacgattcggatgtaagaatatttttgaatttcactttgggttgggtacataaatgcgaaacggtaaatgagttgcgtcgttttagtacagcggtcaccgacgatggaatgctgtatcagaactatgttgtgagggctatgaacccagaacgctgggcaaaacccgccattggacaaagcgcaattcgtaggcgacttgaggttgtaaaacttgagcttactatgctcaccaatcaaatttctgcctgtgccacagcaaaagctggtattgatttgtgcagcaaactatctattcccggcgaaagcgatatccagcaagcagtggcatacgcaaaagagatgcaaaccacttctgttttagaacaagatgttatgagattgcgcaccagcctggcagctattgataaaagctccattgatgcgctcaaaaatcatcttgcccaattggatatcagcattaagagtcttgaggcagacttaagaacgcagaataaagagcagggtatcttggaagagcgtttacgggtatgtcaagaggaaaccattccaaaactggaatatgaaattaagacatcgctacagttcattgctcaaaagtatgattccgaatgggttgaaagtacaggcggattacgttatcaacgtgagatttcaacaagacgaagtgcggaagatatctacagagcattcccgcgtgaacttgctcgctcaacaaatgccagaaattcctcttggagcaatttggttgaattgcgtcaggattacaatcgcaaatacatcatggggtacgatacaaaggcagaggcaaatgatgcttatgatgatgcgtggttagaactctccgaaaataagctgccggagtatatagcccgcattgaggatacgcgcaaaaaagcattcgagcaatttcaagaggattttttgagccgcttggaaaacaacatcagggatgcagatacgcagatcaatggactcaacgcggcaattaagggcagcttctttggcgaggaaagcttccgtttcaaagtcattcccagaccagaatataagcgttattataatatgcttgtcgatcccatgaaaatggagggcggctacaatattttttcagagcagtttaatctaaaatataaggatgaaattgccgagctctttgcaatcatcactaatgaggatggcggaggaaaagcgcagggaaaaagcgattatgacaaacgcgttcaaatgttcactgactttagaacctatctcacctttgatttggaatctgtgaatcgggatggagaatcccagcgtctgtctaaaacaatgggcaaaaaatccggtggtgaaacacagaccccgttctatgttgcagtgctggcatccttcgctcagctataccgcacaggacgagataaaacgcaaaatacggcacgtcttatcatatttgacgaagccttttccaagatggacggagagcggattatccgcagcgtacagctgttgcgtcagttccattttcaggtcattctttctgcccctaccgaaaaagtcggtgacattggaaccttggtagacaggaatctctgtgtactaagagaaggaaaacatacctgcgtcaaggcgtttgaccccagaaaatcggagtggattgaaaatgaatga

SEQ ID NO: 45108 - DNA, 1245 bp, Desulfosporosinus sp. Tol-M
atgaatgatgagatggagcgaaaacttataacggcacttctgaacaaatatgagcgcagcagcttttttcgcgcaggtacagtaccaacaaaaaggattctgctgaagctgtatgagaacgggaaatgcgagttctcggattacaacattgaaaacagtgagcaacgaatccgcgtcaatgaatgtatacaggcattggcgcacaaaggattcgtccgttttgaatggatgaagggcgaagaaaatcatatcgtgtcaaaagtctggctgaatatggaggacttgcaaaatgtctattgctttatacataggcagccgcaaagtgatattctttctaacattgaagtcgagttagcggagtgtatggagtccattcgattgcaatggataaaagactatttgcaggatacctgcgggtatattcggcaaaagcggaaactccatgcattggttcccgagaatgcgcaggatcggaaatcactgctacaagcattgcggtacatagatgccagcaaggataaagagctactgaaacgagtgttctctgttcgctgctttggtgatagtaagcattttgaacgaattgtcgagacgcggttgctacgcattctgaagaagtatttggactgcgatgaccaaacaacagatgaacagctgttgaatcaaattggtatcgtaaaatacccagagcaatttgagttctgtgggctaatttctcttaaatttccagatgggcaatgtctggacttctcaaatctaagcggcggcagcactgtttatggacaagacatggcaacggcgcagattacactttcaaaaggagtgcgctgcattttatccattgaaaataaagcaaattattttgattacatcagtaagcatcgcaagcctgaagaactcattatctatcacggaggacaatacagtccgtctaagcaaatattccttcaagccgttgcacactcatctgaacagttaccgtggtatcattggggcgatattgattacggagggttcagcatgcttgcaagacttcgccgtgaaattaactccagcattcagccttaccgaatgaataagcaggaattaatcacatttgcggagttaacaacatccttctcgtctgagtattcgcaaaaattgcatgaattgacggcaagggctgagctaaaagactgttcggagtgccttacctatatgcaagagcgctgtatgcggttagaacaggaggctttgctggaataa

SEQ ID NO: 45109 - DNA, 1632 bp, Bifidobacterium longum subsp. longum GT15; identical to SEQ ID NO: 42961

SEQ ID NO: 45110 - DNA, 675 bp, Bifidobacterium longum subsp. longum GT15; identical to SEQ ID NO: 41629

SEQ ID NO: 45111 - DNA, 1185 bp, Bifidobacterium longum subsp. longum GT15; identical to SEQ ID NO: 42964

SEQ ID NO: 45112 - DNA, 1470 bp, Xanthomonas vasicola
atgaaacatcaggcacgtatcgcaggctaccggcaactgcgcgagcagccggtgtggaaactgcttgccgccgaccacgcacccgagttgatcggcctgctgcagacggtgctgatggatggcgaacgccgcctgccttcggccgtattgcacgcgcgtttgcagcgccagctggatgccttgcgcgccgacgagctgtcgcgcgaactgccgcgcaccgcgcaggcgtatctggcgcattggttggcacagggctggctggaacgccgcctgcccgaaggcgccaccgaagaagaatacgaactctcgcgtgccgcgacccaggccattcgcttcatcgtgggcttgcgcgaaagcagcagcagcgctaccgaaagccgcctgtcgctggtgatccagcaactggtgcagctggccggccagaccgaagccgatccggaagtgcgcctggccgccttgcgcgacgaacgtgcccgcatcgatgccgaaatcgaacgcgtggcctccggccgcgtggcggcattggatggcaagcgcgcgctggaacgtgcccgcgacctgattcatctctccgacgagctggcccaagatttccatcgcgtgcgcgacgacttcgagcagctcaatcgccagttccgcgagcgcatcatcgacgacgaaggtgcgcgcggcgatgtgctcgaacaactgttcaacggcgtggatgtgatcgccgacagcgaggccggtcgcaccttcgaggcgttctggagcctgctcaacgacacccagcaaagcagtcaactcgatcaagccctggacgcactgctcgcacgcgggtttgcgcgcaagctcgatcgccgcgaacgcgcgtttctgcgcgggctcaccggcacgctgctggagcgcggcggcgaggtgcacatggtgatgcagcacttcgcgcgcagcctgcgcggctttgtgcagagccgtggttatctggagcagcgtcggctcaatcaattgctcaagcaggcgcagggcgaagccttgcaactgcgcgacagcctgcatgccaccaccgccaccggctacacgcaggcgctcagtggcagccgcctgcgctcgttgtcgcaatggcggttgcacgacccgcggctcacccaggtggacggacgtgtgcaggcggccgatgcggccgagatctcgctggacagcgtgggcgatctggtcgcgcaatcggagatcgacgtgcgcagcctgcgccgcgacctgcatgcgctgcttggccaacgcccgcggttgagcatcggcgatgcgctacagcagcgcccggcgatccaggggctgggcagcgtgatcggatacctgtcgctgggcacgcgccacggcatggtgatcgaaggacagatggaaacggtgcaatgggaaggcagcgacggcgccgtgcggcgcgcgcgcattcccttggtgtggtttacccgggagaaacgcaatgaactggtctga

SEQ ID NO: 45113 - DNA, 705 bp, Xanthomonas vasicola
atgaactggtctgagcagctgccgtccgacaaatacgaggacgacgaggacgcagccgacagcaccccgccgctgcgcgcaagcgatgcggccggcgatctaccaggcggtgcgctgttcctgggcgacaccggcacgctgccgttcgacgcgcggcgcgcgctgtgccagttgctggcagggcccagcatcgatgcgcaacgtcacggcgcgctctggccggcgttgctccgcaacgaggtggcgatccgtcagttgttgtgcgagctgtttctggagttggtgctcgaccgcgagggcggggtggctttcacccgccaggccgacaccgccgaactggaatcgcccaccttgctgcgtagcgcgccgctgacctttatcgaatccgtgttgctgctgttcctgcgccaacaactggccgaggccgatacgcgcggtgagcgcgcagtggtggacgaagcgcagctggtggaagccttgtcggtgtacgaaaagaacgtgtccaccgatcgggcgggcttcgcgcggcgggtgatgacggcgatcggcaagatgcgcgacaaccagctgctgtcgcgcttgcgcggcagcgaagagcgctacgaagtctcgccggtgctgaagttgttgttctctgcagaggatgtgcaggcgttggtggtggcctatcgtggtttgcgggaaggggatgtggctctcgagtaa

SEQ ID NO: 45114 - DNA, 4017 bp, Xanthomonas vasicola
atgacttcgcagcccaatctttcgccagtgcagccgggtacgtccttgtttgccgagacgcttgccgagcagcgtgcgcagcagttccggatgcggcgcttgcaggtgcacaagtggggtaccttcaacgggctgaccgaagtgccgatcgcggagaaaggcttcctgttcgtcggccgctcgggttcgggcaaatcgaccttgctggatgcgatgtcggccttgctgacgccaccgagcatcgtcgatttcaacgccgccgcgcgcgaggccgaacgcagcgggcgcgatcgcagtctggtgtcgtatgtacgcggcgcctgggccgatcagcaggacagcacgtctggcgaaatcgccacgcaatacctgcgcaagggtgccacctggaccgcattggtgctggaatacgccaacgcgcacggcgaggtggtgagcctgatccgcctgttctggatcgccggcagcggcaacgcggcagccgatgtgcgacgccattacatggtggcgccgcgcagcttcgacgtggcgaccgagctggacggcttcgatctggacctgcgcaagctcaaggcgcggctgggccaggagatcgcgcatttcgatggcttcgccggctatgccgaacgcttccggcatgcgctgggcatcggcaacgagatggcgctgcggttgctgcacaagacccagtcggccaagaatctgggcgatctcaatgcgttcctgcgcggcttcatgctggacgagccgcgcaccttcgaagcggccgatcggttggtggaggattttgccgaactcaatggcgcgcaccacgcggtggtcaccgcgcgccgccaggtggaaacgctgacgcctgcgcgcgagcaccatgcggcgttgatggcattgcgccacagcgttggcgagttgcgcgagctgcagttgggcgtggacagctatcgcgaacagcagcggctggccttgctggaagagcggctgcaggagctggacaaccaggaccgcggccttgccggcgaagaaggccagcgccgcgaatcgctggataaccacgaacaaaaactggtcggcctggagcgcgagcagcgcgccgccgggggcgagcagatcgaagagctggagcgtgagcgtgcgcgtgtggaacgcgagcgcgacgaacgcctgcgccgccgtgcgcagatcgagcaggcttgccgtcaactcggtaccgcgttagctgccggtgccagcggctttgctgcgcagatcgcacatgcgcaaaccgtgctggataacggcaagcacgacgccagcgcactggatgacgccattgccgagcgcatgggtgcgcgccgcgatgacgaacgccgctttgccgagatccgcgccgaactggatgtgctgaaacgcgcgccgtcgagcatgccggccccgatgcaggccctgcgcgcgcggctgtgcgaagacatcggccttgccgaagctgcgctgccgttcgttggcgagttggtgcaagtgcgcgacgaccagatggcctggcgcggtgcgatcgagcgcgtactgaacggctttgcgcaatcgctgctggtggatgagcggcattacgcgcaggtcagcgaatgggtcaaccgcacccacatcggcacgcgcctggtgtacttccgtgtgcgccgtaacgacgatttgcacgcgcggcgcgtcgatcccgatgcgctgcctggcaagctccaattgcgcgagcacgcctttaccgactggttgcgcaacgaactcacccgtcgcttcgactacgcctgcgtggacaacgcaaacgcgctgcgcaacgccgaccgcgcgatcacccgcgaagggcaggtcaagcatcccggcgatcgctatgaaaaggacgaccgccacgcggtcaacgaccgcaagcgctggctgctcggtcacgacaaccgcgacaagctcaaggtgttcgagcgcgaagcgcaggcgctggcccagcaaatcgccagctgcgatgccgatgtggcagcgctgcgcaagcagcgcgagcaggaccaggaacgccaactcgctgcgcataccctggtggagcgcgactgggacgagatcgacgtcggccccaagctacagcggctgagcgatatcgatgagcagttggtgcagctgcgcgaagacaacagcggcttgcgcgcgctcggtcaggcgatcgacaccgcacgcaccttgcgcgaccaggccaagcgcacttacgacgatgtgcggctggaacgcgcgcaactggcgcgcgagcgtgtgcggctcgaacagcagcacgcagcgtgtgctggccgcgccggtaccgccacgctcacccccacgcagttgcagggtttgcgggaacggcttgctgcattgacgccgttgtcgctggacaacctggaagcacacttccgtgtggtcgagcgtggcctggccgagcagcttgccgaaagccagggccgcgacagccggctcagcacgcagttgctggaatgcttccgccggtattgccagcagtggcctgaagacagcggtgacttcaccgtgagtctggccagcgccgacgatttcctcgcgcgcctggaccgactggaaagcgatggcctgccgcgccacgagcatcgcttcttcgacctgttgcagacccagagcaagaacaatctgctggccttgcaacgccacactgccgaggcccacaagggcatcaagcagcgcatggacgaggtcaacgccagcctggagcaggtgccgttcaatcgtgacaccgtgctgaccatcgaagtcagcgaccgccgcctggccgaggtgcaggaattccagcagcagttgcgcgcggtgctgtcgcatcaacagaccgaagaccgcgctttggccgaagcgcagttttccaccttgcgcgcgctggtggcgcgcctgggtgcacaggaaccggaggcacgccgctggcgcgaacaggtgctggatgtgcgcctgcatgtggaattcatcggtgtggaactggatgcgcaaacccgcgcgcaggtggagatctaccgcagcggcgccggcaagtccggcggtcagcggcagaagctggcaaccacctgccttgcagcggcgctgcgttatcagctcggtggtgaagacggcgaattgccgcgttactgcgcggtggtgctggacgaagccttcgacaaggccgataacgaattcaccgcgctggcgatgaatatcttcgaaaatttcggtttccagatggtggtggccacgccgttgaagtcggtgatgacgctggagcccttcatcggcggtgcgtgctttgtcgaaatcagcggtcgccacaactccggcgtgctgttgatcgaatacgacgagcaggcgcagcgcttgaagttgcccgagcgctcgcgtggcgatgaggcagcggtggccgatgccactgacgccgcgccatcgatcaaggctgcgagcgagcctgaagaagtgcagggtgctgcagccgcagatggcattgcagcggacgaccttccaatgcacgaggcatcgcctgtgccgggccacgcaacgcctgcggtaaagaacaagcgcagtggcaagcgtgttcccgcagtggcgacgacgaacaagcagaacaaaaacgagcagaacaagaaggccaggaccgcatcttccacgcgcgcggtggcacagcctcaagcaacccagccgaaaaaatcgcccgtgcgcacatcggctgtgactggcaagccggcatcggacaaccgcacatcaggcgcgcagcaagcgccggtggtgtcgtcaggagctgcgtccaaatccaacgtgggcaagaccacgcgctcttcaaaaacccagggtaagccgatgacggcgacgcgcgcttccaacgccacatccaagaaggccgccgccaagccacgtgcatcaaccgcgtcgacggggcagccagcacgtggcgccggcaagacaacctcggcacgcgcggcggtgaaaccgtcgccggctaaaaagcgcggtgcgaaggcaggtactgtccagccgcgcggcaagcgctga

SEQ ID NO: 45115 - DNA, 1470 bp, Xanthomonas vasicola; identical to SEQ ID NO: 45112

SEQ ID NO: 45116 - DNA, 705 bp, Xanthomonas vasicola; identical to SEQ ID NO: 45113

SEQ ID NO: 45117 - DNA, 4017 bp, Xanthomonas vasicola; identical to SEQ ID NO: 45114

SEQ ID NO: 45118 - DNA, 1470 bp, Xanthomonas vasicola; identical to SEQ ID NO: 45112

SEQ ID NO: 45119 - DNA, 705 bp, Xanthomonas vasicola; identical to SEQ ID NO: 45113

SEQ ID NO: 45120 - DNA, 4017 bp, Xanthomonas vasicola
atgacttcgcagcccaatctttcgccagtgcagccgggtacgtccttgtttgccgagacgcttgccgagcagcgtgcgcagcagttccggatgcggcgcttgcaggtgcacaactggggtaccttcaacgggctgaccgaagtgccgatcgcggagaaaggcttcctgttcgtcggccgctcgggttcgggcaaatcgaccttgctggatgcgatgtcggccttgctgacgccaccgagcatcgtcgatttcaacgccgccgcgcgcgaggccgaacgcagcgggcgcgatcgcagtctggtgtcgtatgtacgcggcgcctgggccgatcagcaggacagcacgtctggcgaaatcgccacgcaatacctgcgcaagggtgccacctggaccgcattggtgctggaatacgccaacgcgcacggcgaggtggtgagcctgatccgcctgttctggatcgccggcagcggcaacgcggcagccgatgtgcgacgccattacatggtggcgccgcgcagcttcgacgtggcgaccgagctggacggcttcgatctggacctgcgcaagctcaaggcgcggctgggccaggagatcgcgcatttcgatggcttcgccggctatgccgaacgcttccggcatgcgctgggcatcggcaacgagatggcgctgcggttgctgcacaagacccagtcggccaagaatctgggcgatctcaatgcgttcctgcgcggcttcatgctggacgagccgcgcaccttcgaagcggccgatcggttggtggaggattttgccgaactcaatggcgcgcaccacgcggtggtcaccgcgcgccgccaggtggaaacgctgacgcctgcgcgcgagcaccatgcggcgttgatggcattgcgccacagcgttggcgagttgcgcgagctgcagttgggcgtggacagctatcgcgaacagcagcggctggccttgctggaagagcggctgcaggagctggacaaccaggaccgcggccttgccggcgaagaaggccagcgccgcgaatcgctggataaccacgaacaaaaactggtcggcctggagcgcgagcagcgcgccgccgggggcgagcagatcgaagagctggagcgtgagcgtgcgcgtgtggaacgcgagcgcgacgaacgcctgcgccgccgtgcgcagatcgagcaggcttgccgtcaactcggtaccgcgttagctgccggtgccagcggctttgctgcgcagatcgcacatgcgcaaaccgtgctggataacggcaagcacgacgccagcgcactggatgacgccattgccgagcgcatgggtgcgcgccgcgatgacgaacgccgctttgccgagatccgcgccgaactggatgtgctgaaacgcgcgccgtcgagcatgccggccccgatgcaggccctgcgcgcgcggctgtgcgaagacatcggccttgccgaagctgcgctgccgttcgttggcgagttggtgcaagtgcgcgacgaccagatggcctggcgcggtgcgatcgagcgcgtactgaacggctttgcgcaatcgctgctggtggatgagcggcattacgcgcaggtcagcgaatgggtcaaccgcacccacatcggcacgcgcctggtgtacttccgtgtgcgccgtaacgacgatttgcacgcgcggcgcgtcgatcccgatgcgctgcctggcaagctccaattgcgcgagcacgcctttaccgactggttgcgcaacgaactcacccgtcgcttcgactacgcctgcgtggacaacgcaaacgcgctgcgcaacgccgaccgcgcgatcacccgcgaagggcaggtcaagcatcccggcgatcgctatgaaaaggacgaccgccacgcggtcaacgaccgcaagcgctggctgctcggtcacgacaaccgcgacaagctcaaggtgttcgagcgcgaagcgcaggcgctggcccagcaaatcgccagctgcgatgccgatgtggcagcgctgcgcaagcagcgcgagcaggaccaggaacgccaactcgctgcgcataccctggtggagcgcgactgggacgagatcgacgtcggccccaagctacagcggctgagcgatatcgatgagcagttggtgcagctgcgcgaagacaacagcggcttgcgcgcgctcggtcaggcgatcgacaccgcacgcaccttgcgcgaccaggccaagcgcacttacgacgatgtgcggctggaacgcgcgcaactggcgcgcgagcgtgtgcggctcgaacagcagcacgcagcgtgtgctggccgcgccggtaccgccacgctcacccccacgcagttgcagggtttgcgggaacggcttgctgcattgacgccgttgtcgctggacaacctggaagcacacttccgtgtggtcgagcgtggcctggccgagcagcttgccgaaagccagggccgcgacagccggctcagcacgcagttgctggaatgcttccgccggtattgccagcagtggcctgaagacagcggtgacttcaccgtgagtctggccagcgccgacgatttcctcgcgcgcctggaccgactggaaagcgatggcctgccgcgccacgagcatcgcttcttcgacctgttgcagacccagagcaagaacaatctgctggccttgcaacgccacactgccgaggcccacaagggcatcaagcagcgcatggacgaggtcaacgccagcctggagcaggtgccgttcaatcgtgacaccgtgctgaccatcgaagtcagcgaccgccgcctggccgaggtgcaggaattccagcagcagttgcgcgcggtgctgtcgcatcaacagaccgaagaccgcgctttggccgaagcgcagttttccaccttgcgcgcgctggtggcgcgcctgggtgcacaggaaccggaggcacgccgctggcgcgaacaggtgctggatgtgcgcctgcatgtggaattcatcggtgtggaactggatgcgcaaacccgcgcgcaggtggagatctaccgcagcggcgccggcaagtccggcggtcagcggcagaagctggcaaccacctgccttgcagcggcgctgcgttatcagctcggtggtgaagacggcgaattgccgcgttactgcgcggtggtgctggacgaagccttcgacaaggccgataacgaattcaccgcgctggcgatgaatatcttcgaaaatttcggtttccagatggtggtggccacgccgttgaagtcggtgatgacgctggagcccttcatcggcggtgcgtgctttgtcgaaatcagcggtcgccacaactccggcgtgctgttgatcgaatacgacgagcaggcgcagcgcttgaagttgcccgagcgctcgcgtggcgatgaggcagcggtggccgatgccactgacgccgcgccatcgatcaaggctgcgagcgagcctgaagaagtgcagggtgctgcagccgcagatggcattgcagcggacgaccttccaatgcacgaggcatcgcctgtgccgggccacgcaacgcctgcggtaaagaacaagcgcagtggcaagcgtgttcccgcagtggcgacgacgaacaagcagaacaaaaacgagcagaacaagaaggccaggaccgcatcttccacgcgcgcggtggcacagcctcaagcaacccagccgaaaaaatcgcccgtgcgcacatcggctgtgactggcaagccggcatcggacaaccgcacatcaggcgcgcagcaagcgccggtggtgtcgtcaggagctgcgtccaaatccaacgtgggcaagaccacgcgctcttcaaaaacccagggtaagccgatgacggcgacgcgcgcttccaacgccacatccaagaaggccgccgccaagccacgtgcatcaaccgcgtcgacggggcagccagcacgtggcgccggcaagacaacctcggcacgcgcggcggtgaaaccgtcgccggctaaaaagcgcggtgcgaaggcaggtactgtccagccgcgcggcaagcgctga

SEQ ID NO: 45121 - DNA, 1473 bp, Xanthomonas vasicola; identical to SEQ ID NO: 43145

SEQ ID NO: 45122 - DNA, 699 bp, Xanthomonas vasicola; identical to SEQ ID NO: 43146

SEQ ID NO: 45123 - DNA, 3435 bp, Xanthomonas vasicola
atgaaatcttcttcctccagcctgtttgccgacgatctgcccgacccgcgcgtgcagcagttccgcatgcgccgcctgcaggtccacaactggggcacgttcaacggtctgaccgacgtgccgatcgccgcgaagggcttcttgttcgtcggccgctccggttcgggcaaatccacgctgctggatgccatgtctgctctgttgaccccgcccaatctggtcgacttcaatgccgccgcgcgcgaggccgagcgcagtggccgcgatcgcaacctggtgtcgtatgtgcgcggcgcctgggccgaccagcaggacagcgcctccggcgaaatcgccacgcaatatttgcgcaagggcagcacctggaccgcgctggtgctggaataccgcaacggcgagggacgggtgatcagcctgatacggctgttctggatcgccggcagcggtgcggcggcagccgatgtgcgcaagcattacatggtggccgagcgcagtttcgatatcgccagcgaactagtcggttttgatctggatctgcgcaagctgaaggcgcgcctgggcgacgacatcgcccacttcgacaatttctccggctatgccgagcgcttccgccatcagctgggcatcgccaacgagatggcgctacggctgctgcacaaaacccagtcggcgaagaatcttggcgatctcaatgtgtttctgcgcggcttcatgctcgaagcgcccaagaccttcgacgccagcgagcggctggtgggcgacttcgccgaactcgatggagcgcatcgggcggtggtcaccgcacggcggcaggtcgaaacgctgttgccggcgcgtgcgcattacgacgacttgcagtcggtgcagcgccagcgcggccgcttgcaggaactcaagctcggcctggacccctatcgcgagcaacgccggcttgcgttgctggatgcgcgactgcacgcactggacgtcaacgaccagggcctggccggcgaggagggccaacgccgcgctgcagtggataaccaccaacaacgcttgtccgatctggaggcccagcgccgcagccagggcggcgagcggatcgacgcgctggaacgcgagcagctccaggtccagggcgaacttgcacgccgcagcgacaaacgcgtcagggccgaacaggcctgccgccagctcgaccagagcctggccgacaatgcgcatggatttgccgagcagtccgcgcaggcgcgtgccgcgctcgaggacgggcagcggctggccgccgaacaggacgaggtgatcggcgagcgtatcgccggcaagcgcgaggacagccagcgctttgcgcaggtgcgcgccgagatcgaggcgctcacccgcaatccctccaacattgctgcgccgatgcaggccctgcgtgcacgcctgagcgaagaaaccggcattcccgaggccgcgctgccctttgtcggcgaactgatccaggtgcgtgagggagatgtcgcctggtgcggtgccatcgagcgcgtgctgcatggctttgcgcaatcgctgctggtggacgagcgccattacgccgagctggccgagtgggtcaaccgcacgcatctcggctcgcgcctggtctattaccgggtgcgcaacaacgaacaagcgtttgccggccgcgaacccggcagcgcctcgctgctgcacaagctgcagttgcgcgagcatccctttgctggctggctgcggcgcgaactgggcaagcgtttcgactacgactgcctggagagcgccaaggccttgcgcacggcagagcgcgcgatcacccgcgaaggccaggtcaagcatcccggcgaacgctacgaaaaagacgaccgtcatgcggtcggcgaccgtcggcgctggctgctgggcttcgacaaccgcgacaagttggcgctgtacgaacgcgaagccatcgaactggcgcaacgcatcgccgcctgcgatgccgacgtggccgcgctgcgtgcccgccgcgaacgcgatgccagccggcgcctggcccagcacaccctggccaacctgggctgggaggaaatcgacgtcgccgcgcaactgcagcgcggcgacgatatcgccagcgccttgcgccagctgcgcgaaggcgatgccaacctgcgtgcgctgggcgaggcgatcgagcgcacgcgcggcgatctggaacaggccaagcgcacgttcgacggtgtgcgcgaggaacggatcgcgctgggggtcgagcgcacgcgtctggaaaagcagcgcctgcaatgcgccgacgccgatacccgtgtggtcacgccgctgcagcgcgaggggctggaggagcgcctggccaacctgggcgcgctcagcctggacaatctcgaagcgcattttcgccagatcggcaacgccatcgccgagcagaccagcgccagcgacagcgagcacaatcggctcgaacagttgctgctcggctgcttccgccggtatagccagcagtggcccgaagacagtggcgacttcatcatcagcctggccggcgccgaggattttctcgcccgcctgcagcgtctggaacgcgatggcctgccgcagcacgaagcacgctttttcgagctgttgcaaagccagagcaagaacaatctgctcgccttgcagcgccataccgccgaagcgcgcaaatcgattgcccaacgcctggacgaggtcaacgccagcctggagcaggtgccgttcaaccatggcaccttgctgaccatcgaactcagcgatcgccgtctgccggaggtgatcgacttccatcaacgtctgcgggatgtgctcggtcaccaccagaccgaacagcgcgacgtggccgaacagcaatttgcggtgctgcgcgaactggtgcgcaagctcggctcggccgatggcgatgacaagcgctggcgtgagctggtgctggatgtgcgtctgcatgtggagttcgtcggcgtcgagctggatgcggccacccgccagcaggtggagatctaccgcagcggcgccggcaagtccggcggccagcggcagaaactggcaaccacctgcctggccgccgcgctgcggtatcaacttggcggcgaagacggcgaactgccgcgctacgcggccgtggtgctggacgaagccttcgacaaggctgacaacgaattcaccgcgttggcgatgaacatcttcgaaaatttcggcttccagatggtggtggccacgccgctcaagtcggtgatgacgctggagccgtttatcggcggcgcctgctttgtcgaaatcagcggccgtcacgactctggcgtgttgctgatcgaatacgacgaacaggcacgccggctcaagttgcccgagcgctcgcgcagcgcggcggcggccgccggtgcggcgcgcgcgaccgagccgtccgccgatgctatcggcgcagcgagcgccgatggactgcactga

SEQ ID NO: 45124 - DNA, 1182 bp, Xanthomonas vasicola
atgaccgccgccgcgcccatgctgttgcctgaggccgcgctgcgggccttgcgcgggcagtggcagcgcgcacgcgggcagtggctgatcggcgagggcgcaccgcaagcgattgggttgcgggcgccgacccaggcacaggccatcgcgcggttcgatgccttcggtgcgtggttgcagcagtggagccgcaccggcttgccggggcgggtggagtatcgcgcggtgagctggacgcaattggggccgcaacgcctgccgcaggcctggatgctggacgatgcaagtcaggccgccgccgcgcttggcgagggcgagcgctgggcgcgtgcccgccaacgcagcgctgccttgcaggcgcgctggccgcaggcggtcgcgctggcggcgcggctacgccgtcaattcgatctgctggccgactggccggaggccgacttcgcgcgcttggtggcggtggtggagtggctgcaccagcaccgcgacagtgggctgttcctgcgccagcttcccattgccggcatcgacagcaaatggatcgaaccgcatcgcggcgtcattgccgactggctcgccgccctgcgcggcatcgccgagccgcgcagctttgccagcctgtccgggctgcgcagcgcgccggatcgggtgcgtttgcgattgctcgacccggccctgcgccaccacctcggcggcctggaggacatcaatgcaccgatcacgcagatcgccgcgctgcgtctgcctgcgcgccgcgtcctgatcgtggaaaaccgcgaaaccggcctggcctgcgaatcgctgccgggtacgctggtgctgatggcgcgcgggtacgccatcgaatacgtgagcagtatcgagtggctgcgcgggttgccgctgtactattggggcgacatcgacacccacggcctagcgatcctgcaccgcctgcgcacgcacgcgccgcacaccactgcggtgttgatggatgaggccaccctgcatgccaccccgcgcgcgttgtgggggcacgaacgcaggcagcaccgcgcccaacacctggacgcgctcagcatccaggagcagcgtctctatgcagacctgcgtggcggccggttcggtccgtcgccgcgcctggagcaggagcgtatcgcctgggactatgcctggccgcgcatccaggcggcattggccgactga

SEQ ID NO: 45125 - DNA, 1473 bp, Xanthomonas vasicola; identical to SEQ ID NO: 43145

SEQ ID NO: 45126 - DNA, 699 bp, Xanthomonas vasicola; identical to SEQ ID NO: 43146

SEQ ID NO: 45127 - DNA, 3435 bp, Xanthomonas vasicola; identical to SEQ ID NO: 45123

SEQ ID NO: 45128 - DNA, 1182 bp, Xanthomonas vasicola; identical to SEQ ID NO: 45124

SEQ ID NO: 45129 - DNA, 1473 bp, Xanthomonas vasicola; identical to SEQ ID NO: 43145

SEQ ID NO: 45130 - DNA, 699 bp, Xanthomonas vasicola; identical to SEQ ID NO: 43146

SEQ ID NO: 45131 - DNA, 3435 bp, Xanthomonas vasicola; identical to SEQ ID NO: 45123

SEQ ID NO: 45132 - DNA, 1182 bp, Xanthomonas vasicola; identical to SEQ ID NO: 45124

SEQ ID NO: 45133 - DNA, 1470 bp, Xanthomonas vasicola; identical to SEQ ID NO: 45112

SEQ ID NO: 45134 - DNA, 705 bp, Xanthomonas vasicola; identical to SEQ ID NO: 45113

SEQ ID NO: 45135 - DNA, 4017 bp, Xanthomonas vasicola; identical to SEQ ID NO: 45114

SEQ ID NO: 45136 - DNA, 1008 bp, Burkholderia pseudomallei MSHR5608; identical to SEQ ID NO: 44025

SEQ ID NO: 45137 - DNA, 672 bp, Burkholderia pseudomallei MSHR5608; identical to SEQ ID NO: 42091

SEQ ID NO: 45138 - DNA, 3633 bp, Burkholderia pseudomallei MSHR5608
atgaagctcgaccgcatcgttctggtcaactgggggcagttgcggccgggcgactatgaccttggaaacatgactcttcttaccggcccgacgggcgccggtaagtccactatgctcgatggcctccagaccatcatgactgccgcgtaccagggtatcgtcgcatacaaccctggccaagaagaggtacagcaggggcaacgcagtgggaagtccaagcgcaccttggagtcatttgtcgtcggtgctgagtacagtcgtttctctcgacctcatggcgcgcacgggtatatggcggctgtgttccgccccgggcccgatgaggactcggccaagacctttacggcgctcgtcgccgcatcggcacaggtggatggcatcggggagcgcagggttccgaagctggagcgactcgaactggttatcgtagacgacgccgcgctgaccgttgacgattttctaaaggacgcggagcagagcgagtgggtggctgtcgaagaaatcgtcaagcgattgaaggctcggtattcgaaggtggtgacctatgacgggcataagcgagactacctttgcgcactctacgggcgcttccgggggcgcatctcgattacctgggatgaggcccagaacgctgcgaaggcttggtgccagtcaatagcttacaaaaaaattggctcggtccacgacctcgttcgcgatgacattctggagtatgacggcaagcagttgcaggagagcatcactcgcatcagcgacctgatgcgccaagtcacgaacctgaagcaagaagggcagcgactggaagcgactgttgggcggttgcgagggttgaagactgctatcgcgcaaacgacgtcggcgtttgaagagcaagtccagtatgacttgctgctggccaagatgctggtggcggcggacgacgaacgtatcgcccaagagcagaaacgcatcaacgatgactcggcactggtaacgcggtgcgagcaaaaggtaaaagccgaggagcgactgaaggcaggcgtggaccggagccgcatcgacattgcagcgaagctcagtggaatcgccgccaacgccgagaaagagcgcctggaccagcagctcgagctcgccaattccgcagctcggcacaaactggctgagctcaatactgggcttcaagaggccgcccaaatcgtcaatgcggctaccggtttgttgcggaagcccattccggagcagttccccaagctcaaggcgtcggttgacgcggtcggtcgagttacagcatcgactgacgttgctcgcttggacggtctgttgggcgctgtcctcgatgcctcaagtgatgcgcagcttaacgtcgagaagctgttccgattgacccctgcattcgctggtgtggaagagggactcgccgcgctgcactcatatctagtggggaccgaagatagtgtcttgatggctgttgcgtccgagacgtcggaattgacgcaacgtgtcgaagccactcgcaaggcgcgcaaggaattggctgaccgcaaggagctgttggcgagcggcgctagcgattacaaccgcgacactcgcatggcgcttccttgcatccgagagtgtctgcccgaagctggtgtccaagttctctgcgacctcgtcgaacctgtgtcggatgaatggcaggaggccatcgaagggtacttggacaatgcccgcttcaatctcattgtgaagcctgagtgggaagcacgaactatcgatttgcttcactcatggggctcgcgctgtaaggtcatccagggtaaacgatgtcttcagcgtgccgatgccggtcgtgtgccatctgactctatcatccatgagctccgcactgaccatcccattgcacgtgcgtatctcatcgagcagtatggcgccgtcgtcaaggtcagggactccgagcaactgcgcgataccgcgcgtgggttgaccaaggacggcaaaggaagcggttctcgcactatgtttgttggtgagcggcgggaccttgttcttgggcgcaaagctcgcgagcaggcgctgcgggctaccatcgagaaactcgatgcggcagaccgaggaattcgagagttcgagcaactgcaggatacgctgtcgagcgttaaacggcttcttggcaacctgcgtgaacccgtattcgatgcgatgccgcttggccaagcagcgggcgaaatcgacagcactcggcgctcgcttgcgcagctggacctcaccgaggtggaacagttgcgggcggagcgagcgaagctggaactgctcatcgcagggcacgatgcggaaattaccgcggtaaacaaagagattaccctggcgagtcagcgtatcacggacgcccaaggcgccattgagcgcatcaatggaggccgagacgcgcgatttcgggagcgtgaagaccagattcgtcggctcgggcagatgtgcgaaacaaactcagagaaaacctacacggttattgccgaggaagtagagggcttgctcaaatcccggaggtttgacgtgcactccgttcaggtgcggctcaacacgctgcgcgcgcagccggacaaattgctgggcgatgtgcgggaaatgctcgcggagtacaacgcgaacgcgcgccaagaggagcgcttccagtcagcgctgcctcatcttcacgacgccaccatgttcgacccgtactatggcccccttgttgcgctcggccgcgcggtgggtgcactccacagcgagcttgagggcattggcctctacaacaatcgggccaaggtggaagaagcggagcgctctttccatgacgtgttcaccaagcagttttgcgtcgaaatcaaaagcaaggtggatgatggcgtccgactgctacggcaacttaatatggagttggaaaggcttaagttcggcacggaccgcttcagcatcgactggtcgaagtgggagccggagttccaggagtactacagcttcttctcggccgtcaccgaccttgcggactcagtcgaaacggtcgacctcttcggagagacggagctcacgccaaagcacgtagaggtacgcgaccgcctggtgaagctcctgctcgactcagaccaagagagagcggggcgggagctattgcgcattgccgactatcgaaactacaggcgctacgaaatttggaatgattcagacagtggggggcgcatcgcgctttcgacatggggcacggggtctggtgggcagcttgagacgccggcttacatagttcgcgcggccgtggtgacgaaccggctaaagttcttcgagaagggacccagcctgaagatgctcgttagtgacgagtcgttctcgacgatggatgaacctcgcgctcgggccgtgctgcagtacctacgcgaaagcctcgatattcaggtcatcagtgcgatgccgacacgaggcgctggtggcttacggccagagttcgaccgggagtacagctatagccgggttcctgttgacgctaacggcgaactcgacttcatcctcgaatacgacgagcgcatcttcaagaaggacaagatgcgagagctctgggaaaagcagcgggcggcggcccgtgcgcaggccgagctggcgtttggcgccgccgaggccgcacagcaggcggaggcgcttaaatga

SEQ ID NO: 45139 - DNA, 1134 bp, Burkholderia pseudomallei MSHR5608; identical to SEQ ID NO: 44028

SEQ ID NO: 45140 - DNA, 1008 bp, Burkholderia pseudomallei MSHR7343; identical to SEQ ID NO: 44025

SEQ ID NO: 45141 - DNA, 672 bp, Burkholderia pseudomallei MSHR7343; identical to SEQ ID NO: 42091

SEQ ID NO: 45142 - DNA, 3633 bp, Burkholderia pseudomallei MSHR7343
atgaagctcgaccgcatcgttctggtcaactgggggcagttgcggccgggcgactatgaccttggaaacatgactcttcttaccggcccgacgggcgccggtaagtccactatgctcgatggcctccagaccatcatgactgccgcgtaccagggtatcgtcgcatacaaccctggccaagaagaggtacagcaggggcaacgtagtgggaagtccaagcgcaccttggagtcatttgtcgtcggtgctgagtacagtcgtttctctcgacctcatggcgcgcacgggtatatggcggctgtgttccgccccgggcccgatgaggactcggccaagacctttacggcgctcgtcgccgcatcggcacaggtggatggcatcggggagcgcagggttccgaagctggagcgactcgaactggttatcgtagacgacgccgcgctgaccgttgacgattttctaaaggacgcggagcagagcgagtgggtggctgtcgaagaaatcgtcaagcgattgaaggctcggtattcgaaggtggtgacctatgacgggcataagcgagactacctttgcgcactctacgggcgcttccgggggcgcatctcgattacctgggatgaggcccagaacgctgcgaaggcttggtgccagtcaatagcttacaaaaaaattggctcggtccacgacctcgttcgcgatgacattctggagtatgacggcaagcagttgcaggagagcatcactcgcatcagcgacctgatgcgccaagtcacgaacctgaagcaagaagggcagcgactggaagcgactgttgggcggttgcgagggttgaagactgctatcgcgcaaacgacgtcggcgtttgaagagcaagtccagtatgacttgctgctggccaagatgctggtggcggcggacgacgaacgtatcgcccaagagcagaaacgcatcaacgatgactcggcactggtaacgcggtgcgagcaaaaggtaaaagccgaggagcgactgaaggcaggcgtggaccggagccgcatcgacattgcagcgaagctcagtggaatcgccgccaacgccgagaaagagcgcctggaccagcagctcgagctcgccaattccgcagctcggcacaaactggctgagctcaatactgggcttcaagaggccgcccaaatcgtcaatgcggctaccggtttgttgcggaagcccattccggagcagttccccaagctcaaggcgtcggttgacgcggtcggtcgagttacagcatcgactgacgttgctcgcttggacggtctgttgggcgctgtcctcgatgcctcaagtgatgcgcagcttaacgtcgagaagctgttccgattgacccctgcattcgctggtgtggaagagggactcgccgcgctgcactcatatctagtggggaccgaagatagtgtcttgatggctgttgcgtccgagacgtcggaattgacgcaacgtgtcgaagccactcgcaaggcgcgcaaggaattggctgaccgcaaggagctgttggcgagcggcgctagcgattacaaccgcgacactcgcatggcgcttcctcgcatccgagagtgtctgcccgaagctggtgtccaagttctctgcgacctcgtcgaacctgtgtcggatgaatggcaggaggccatcgaagggtacttggacaatgcccgcttcaatctcattgtgaagcctgagtgggaagcacgaactatcgatttgcttcactcatggggctcgcgctgtaaggtcatccagggtaaacgatgtcttcagcgtgccgatgccggtcgtgtgccatctgactctatcatccatgagctccgcactgaccatcccattgcacgtgcgtatctcatcgagcagtatggcgccgtcgtcaaggtcagggactccgagcaactgcgcgataccgcgcgtgggttgaccaaggacggcaaaggaagcggttctcgcactatgtttgttggtgagcggcgggaccttgttcttgggcgcaaagctcgcgagcaggcgctgcgggctaccatcgagaaactcgatgcggcagaccgaggaattcgagagttcgagcaactgcaggatacgctgtcgagcgttaaacggcttcttggcaacctgcgtgaacccgtattcgatgcgatgccgcttggccaagcagcgggcgaaatcgacagcactcggcgctcgcttgcgcagctggacctcaccgaggtggaacagttgcgggcggagcgagcgaagctggaactgctcatcgcagggcacgatgcggaaattaccgcggtaaacaaagagattaccctggcgagtcagcgtatcacggacgcccaaggcgccattgagcgcatcaatggaggccgagacgcgcgatttcgggagcgtgaagaccagattcgtcggctcgggcagatgtgcgaaacaaactcagagaaaacctacacggttattgccgaggaagtagagggcttgctcaaatcccggaggtttgacgtgcactccgttcaggtgcggctcaacacgctgcgcgcgcagccggacaaattgctgggcgatgtgcgggaaatgctcgcggagtacaacgcgaacgcgcgccaagaggagcgcttccagtcagcgctgcctcatcttcacgacgccaccatgttcgacccgtactatggcccccttgttgcgctcggccgcgcggtgggtgcactccacagcgagcttgagggcattggcctctacaacaatcgggccaaggtggaagaagcggagcgctctttccatgacgtgttcaccaagcagttttgcgtcgaaatcaaaagcaaggtggatgatggcgtccgactgctacggcaacttaatatggagttggaaaggcttaagttcggcacggaccgcttcagcatcgactggtcgaagtgggagccggagttccaggagtactacagcttcttctcggccgtcaccgaccttgcggactcagtcgaaacggtcgacctcttcggagagacggagctcacgccaaagcacgtagaggtacgcgaccgcctggtgaagctcctgctcgactcagaccaagagagagcggggcgggagctattgcgcattgccgactatcgaaactacaggcgctacgaaatttggaatgattcagacagtggggggcgcatcgcgctttcgacatggggcacggggtctggtgggcagcttgagacgccggcttacatagttcgcgcggccgtggtgacgaaccggctaaagttcttcgagaagggacccagcctgaagatgctcgttagtgacgagtcgttctcgacgatggatgaacctcgcgctcgggccgtgctgcagtacctacgcgaaagcctcgatattcaggtcatcagtgcgatgccgacacgaggcgctggtggcttacggccagagttcgaccgggagtacagctatagccgggttcctgttgacgctaacggcgaactcgacttcatcctcgaatacgacgagcgcatcttcaagaaggacaagatgcgagagctctgggaaaagcagcgggcggcggcccgtgcgcaggccgagctggcgtttggcgccgccgaggccgcacagcaggcggaggcgcttaaatga

SEQ ID NO: 45143 - DNA, 1134 bp, Burkholderia pseudomallei MSHR7343; identical to SEQ ID NO: 44988

SEQ ID NO: 45144 - DNA, 1008 bp, Burkholderia pseudomallei MSHR5596; identical to SEQ ID NO: 44263

SEQ ID NO: 45145 - DNA, 672 bp, Burkholderia pseudomallei MSHR5596; identical to SEQ ID NO: 42091

SEQ ID NO: 45146 - DNA, 3633 bp, Burkholderia pseudomallei MSHR5596
atgaagctcgaccgcatcgttctggtcaactgggggcagttgcggccgggcgactatgaccttggaaacatgactcttcttaccggcccgacgggcgccggtaagtccactatgctcgatggcctccagaccatcatgactgccgcgtaccagggtatcgtcgcatacaaccctggccaagaagaggtacagcaggggcaacgcagtgggaagtccaagcgcaccttggagtcatttgtcgtcggtgctgagtacagtcgtttctctcgacctcatggcgcgcacgggtatatggcggctgtgttccgccccgggcccgatgaggactcggccaagacctttacggcgctcgtcgccgcatcggcacaggtggatggcatcggggagcgcagggttccgaagctggagcgactcgaactggttatcgtagacgacgccgcgctgaccgttgacgattttctaaaggacgcggagcagagcgagtgggtggctgtcgaagaaatcgtcaagcgattgaaggctcggtattcgaaggtggtgacctatgacgggcataagcgagactacctttgcgcactctacgggcgcttccgggggcgcatctcgattacctgggatgaggcccagaacgctgcgaaggcttggtgccagtcaatagcttacaaaaaaattggctcggtccacgacctcgttcgcgatgacattctggagtatgacggcaagcagttgcaggagagcatcactcgcatcagcgacctgatgcgccaagtcacgaacctgaagcaagaagggcagcgactggaagcgactgttgggcggttgcgagggttgaagactgctatcgcgcaaacgacgtcggcgtttgaagagcaagtccagtatgacttgctgctggccaagatgctggtggcggcggacgacgaacgtatcgcccaagagcagaaacgcatcaacgatgactcggcactggtaacgcggtgcgagcaaaaggtaaaagcagaggagcgactgaaggcaggcgtggaccggagccgcatcgacattgcagcgaagctcagtggaatcgccgccaacgccgagaaagagcgcctggaccagcagctcgagctcgccaattccgcagctcggcacaaactggctgagctcaatactgggcttcaagaggccgcccaaatcgtcaatgcggctaccggtttgttgcggaagcccattccggagcagttccccaagctcaaggcgtcggttgacgcggtcggtcgagttacagcatcgactgacgttgctcgcttggacggtctgttgggcgctgtcctcgatgcctcaagtgatgcgcagcttaacgtcgagaagctgttccgattgacccctgcattcgctggtgtggaagagggactcgccgcgctgcactcatatctagtggggaccgaagatagtgtcttgatggctgttgcgtccgagacgtcggaattgacgcaacgtgtcgaagccactcgcaaggcgcgcaaggaattggctgaccgcaaggagctgttggcgagcggcgctagcgattacaaccgcgacactcgcatggcgcttcctcgcatccgagagtgtctgcccgaagctggtgtccaagttctctgcgacctcgtcgaacctgtgtcggatgaatggcaggaggccatcgaagggtacttggacaatgcccgcttcaatctcattgtgaagcctgagtgggaagcacgaactatcgatttgcttcactcatggggctcgcgctgtaaggtcatccagggtaaacgatgtcttcagcgtgccgatgccggtcgtgtgccatctgactctatcatccatgagctccgcactgaccatcccattgcacgtgcgtatctcatcgagcagtatggcgccgtcgtcaaggtcagggactccgagcaactgcgcgataccgcgcgtgggttgaccaaggacggcaaaggaagcggttctcgcactatgtttgttggtgagcggcgggaccttgttcttgggcgcaaagctcgcgagcaggcgctgcgggctaccatcgagaaactcgatgcggcagaccgaggaattcgagagttcgagcaactgcaggatacgctgtcgagcgttaaacggcttcttggcaacctgcgtgaacccgtattcgatgcgatgccgcttggccaagcagcgggcgaaatcgacagcactcggcgctcgcttgcgcagctggacctcaccgaggtggaacagttgcgggcggagcgagcgaagctggaactgctcatcgcagggcacgatgcggaaattaccgcggtaaacaaagagattaccctggcgagtcagcgtatcacggacgcccaaggcgccattgagcgcatcaatggaggccgagacgcgcgatttcgggagcgtgaagaccagattcgtcggctcgggcagatgtgcgaaacaaactcagagaaaacctacacggttattgccgaggaagtagagggcttgctcaaatcccggaggtttgacgtgcactccgttcaggtgcggctcaacacgctgcgcgcgcagccggacaaattgctgggcgatgtgcgggaaatgctcgcggagtacaacgcgaacgcgcgccaagaggagcgcttccagtcagcgctgcctcatcttcacgacgccaccatgttcgacccgtactatggcccccttgttgcgctcggccgcgcggtgggtgcactccacagcgagcttgagggcattggcctctacaacaatcgggccaaggtggaagaagcggagcgctctttccatgacgtgttcaccaagcagttttgcgtcgaaatcaaaagcaaggtggatgatggcgtccgactgctacggcaacttaatatggagttggaaaggcttaagttcggcacggaccgcttcagcatcgactggtcgaagtgggagccggagttccaggagtactacagcttcttctcggccgtcaccgaccttgcggactcagtcgaaacggtcgacctcttcggagagacggagctcacgccaaagcacgtagaggtacgcgaccgcctggtgaagctcctgctcgactcagaccaagagagagcggggcgggagctattgcgcattgccgactatcgaaactacaggcgctacgaaatttggaatgattcagacagtggggggcgcatagcgctttcgacatggggcacggggtctggtgggcagcttgagacgccggcttacatagttcgcgcggccgtggtgacgaaccggctaaagttcttcgagaagggacccagcctgaagatgctcgttagtgacgagtcgttctcgacgatggatgaacctcgcgctcgggccgtgctgcagtacctacgcgaaagcctcgatattcaggtcatcagtgcgatgccgacacgaggcgctggtggcttacggccagagttcgaccgggagtacagctatagccgggttcctgttgacgctaacggcgaactcgacttcatcctcgaatacgacgagcgcatcttcaagaaggacaagatgcgagagctctgggaaaagcagcgggcggcggcccgtgcgcaggccgagctggcgtttggcgccgccgaggccgcacagcaggcggaggcgcttaaatga

SEQ ID NO: 45147 - DNA, 1134 bp, Burkholderia pseudomallei MSHR5596
atgattggcgcgtctctttggctgaagtccatgccagtgcaagaattgctcaacatgcttgttgaccgattggacgcggccgagcagagaggaagcactaaagcgaaatcagtccagctcgacgagcgcacttggccagcgctctacatgtcgccagtggagtcgcagaaggaacacctttgggagcatgtcgtcgcgatggtgcgatgcggatggctagctgtgaagccagaaaccgcgctcaaaagtcggtccggttacgcatcatcgccgcgtgtgagtgtggtcgaccagcgagaactgcgtgcggcggtcggccggcaggaaagggtgaagtcgtccgctgagcgctggcgcgacgccgtgtcgtctggcttactagcaagcgatacggtaaagcgacttgtctcagagtattgcatcgatatccccggtcgcacgatgacggaggtcgtggagcagttgaaccggcttccggcgctggccgagaaatcgatgctgctgcgcgaggtgtcatcgcagttattctgggggatgtccaaggtcctcgacaagcgccaaggattggttgcggccattctaggtatggacgattgcccattcccagagtctcccatccaattgcacgtgttcttgcctgccggcggccatcgtggagtgctcttcattgagaattcggtgagcttcgaatgcgcaatgcgcgagccccgcggagtgttcggtgagttggctttggtctacgcgtccggctttaaagggagtgcgcagcggctgcgcaccacggaggggtgctcgctgttttacgcggcaggcggcggtctcgaacgggacttgcgtgcaacgtttgaaggttggttgttcggccggcaagagataccgtcgtacttttggggcgacctcgacttcgcgggaatgcgcatactcgcggctatgcgggcgaccttttcggggctgacagcctgggtgccgggttatgcgccgatgctaaccgtgctaaagggtggcggagggcacccccctgaggccgccgacaaacaagggcagaagccaatcgcatcgacagggtgcgagtacgccgatgagcaactaatgccagccctgcagaccttccggcgtttcgtagaccaggaatag

SEQ ID NO: 45148 - DNA, 1557 bp, Bradyrhizobium japonicum
atgaggtcgggcccaggagccgcgtcattgaccttgttccgccatttgcatgacgacgcctttttagctttttcgcgcgatcacaagcacctgtacgcagcgtgtctgctggatctgcacgaacgcttcttttcaggcgcgccgtcgttcccgacgccgcagcaggtggtccacgccatctacgacgtcatgcgcgccaaccccgtcctctggaacgagggcgatgatttcggcagcctgccggaaatgatctccgcgagacgccgccggatccggaaggccgacgtcgcgctcgcttccgagaagggcgacaaggcgctcggtcttgcccgacaactatacgcccggctgctcgtctggggatggcttgaagaggaggaatacgggcttcgcgtcactgtggacatggctatgggaccgctgctcgtgctgcaacggctcgcgagcctcaacaaggatctctcgcagcgattcggcggcttgatcgtgcaaatccgcctcaacctggaggccgtcgaaaaactgaggcctgagatcaccgaccgcaagcagcgcgaagccgcgctcgccgtccgcgaggcgcgcaatcaggccgaccagttcactaagagtctgcgggccattctggccgacctgaagcgcgtccgacggaccgtcatggagtcgaaaacagtcgctacccggctcgaagcctttttcgaggagttcatcgaacagctcctgctgaaggatttcgagtccatcctcaccgtcaaccatccataccgcttccgcgacgccatcgtcgatctcgcgcgaaggatctcctacagcccggaaaccatgcaggtcctcgccgaggagtacatagcttccagcatggcagccgacatcgaggacggtcgaatggccgcggccgacgacctgctggctatcgaaagcatcttcgatcagatcggggagatgttcgacaggatcgaggccttccgcaggcagctcgaagcccgggtccgcaacaccattaagtacgccgagcggggcgggcagggactcgtcggccgggccggcgacctggtgcggcgcctggatgccttactgcgcgacggcaggcaccacaaggcgacaatcgaatggagcatcgagccgctgcggtcgccctggtcggagcaccatcaggcgccggccaggcagccgcgccgtcccgtcgaagcaagggagctcgccgagccgccgtcggatccgttgtatgaactgcgcaagaagctccgcctcgagtacatcgctcgcatcgcgccccgccccgaggatgtcagacgattcctcgagggccaggtgccgccattcgcgaccagggaagcccgcttcatggaaatcgataccgtggacgactttctcgccttcgattgcgcccgccgatatgcgctgacaggcgaggttccggcgcaggtcgcggccgggttcgaactcgaaccgtgccccgacacgcccccacacgacagcgaatggctccgttgcgccaacttcctggtcaagcgatcgggcgcactccggaaggcgagggcggctcatgctcagtga

SEQ ID NO: 45149 - DNA, 639 bp, Bradyrhizobium japonicum; identical to SEQ ID NO: 43202

SEQ ID NO: 45150 - DNA, 3435 bp, Bradyrhizobium japonicum; identical to SEQ ID NO: 43203

SEQ ID NO: 45151 - DNA, 1170 bp, Bradyrhizobium japonicum
atggctcggcgtttcacggatgcgatcggcctgctgaacgacctgctcaaccgcttcgagtccggggccgcaagcccgatcgcccacccggactaccccgctttcccatcagtagtcgcggcggacgccttcctgaaacagatcagggaagccgaaagtgccgccgcggtctccattcgctgggggcgcggcgccaaccgagaccaagtggcgcacgtgcggttagcctcggcggagatcttataccgatatctccgccgtacccccgcgtcgcgcatcgcggaggatgccgccgtgcggcttgtcgccggggcggcgatgcacgactctctgaagaacagctcttcccaagtcgccgaggtatgggggcgggggaaaacgtggcacgggttcgcttcgtccgatgtcgagacactgcgcgacgcgttcgttctcgcccaggccatcctggctaacaaacatcttggcgtcgactacaagaccttctcgagacgaacggtggggcacagcaaaacgctcgaacggatcgaaggcgcggtcgtgcggctcctgagcggcatcctggagtttccccccggcgcgcggccacgcgaggcgctccgggcaatcggccttgagcgcttcgcgccaccgctgctgatcgcgggcaagatcgacctcgatggagccgacctctccggaatctctccgctgtatctcggaatcactcccaaggaagcagatcgcgtccgcttccgggagccgccggcctacgtgctaacgatcgaaaatttcgcaagcttcaaccggcacatcgccgaggcggaccccggccgattaggaacgaccatgtatgtcggagggtacccctcgcttgccacccagcaggcgctgcggacgatcgcaggattggtatccgaacagacgccgatctttcattggtcggacatcgatccggacggcacctggatcttccacaccatcgagcgcgccgtcgaccggccgatccgtgcccacctcatgagtgtcgaagttgccgagcgtttgggacaagtgccgttcaaaaaatccgcacccgctcgatgtccaccggactccggtatcgcagctctggcagcgtacctggcgaaagatggagccaagacgctcgagcaggaagaactcgatccagtcctgccagagtttcattag

SEQ ID NO: 45152 - DNA, 1473 bp, Xanthomonas vasicola; identical to SEQ ID NO: 43145

SEQ ID NO: 45153 - DNA, 699 bp, Xanthomonas vasicola; identical to SEQ ID NO: 43146

SEQ ID NO: 45154 - DNA, 3435 bp, Xanthomonas vasicola; identical to SEQ ID NO: 45123

SEQ ID NO: 45155 - DNA, 1182 bp, Xanthomonas vasicola; identical to SEQ ID NO: 45124

SEQ ID NO: 45156 - DNA, 1470 bp, Xanthomonas fuscans subsp. fuscans; identical to SEQ ID NO: 45047

SEQ ID NO: 45157 - DNA, 702 bp, Xanthomonas fuscans subsp. fuscans; identical to SEQ ID NO: 45048

SEQ ID NO: 45158 - DNA, 4023 bp, Xanthomonas fuscans subsp. fuscans; identical to SEQ ID NO: 45049

SEQ ID NO: 45159 - DNA, 1008 bp, Burkholderia pseudomallei TSV 43
atgcgcgggtgccgcaatgcgctcgaggctgcgttgtccgaacgaggcgacgcacatgacttggtggatgcctacgaatacgccgagaaggttatcgaggacctcgcggacggcatcgattactttcaagaactggtccggcacttgatgcaagccgcgtctgctcatacgcaatggaacgaattcgttgactttctcgacagattccagcgggactactccaagcaacttacagcggataacgcgacgctgaaccgccaagccattcggcaaaagcttgagaaactccgggccgttccggaggcgaagttcaatcgaatggatgcgcagttgcgcgatatcgctcactggatggcgaaggagtacaccggaagctcgctctatgattggctgctcggtcgtattgaagacatcgtagacgcggcgtgcgagtctaagcagccgggctttctcaaggccatggagacttatctgaagcgtgtgaacggcctcgctttgcagtcgatgatgctacgctcggggcagactcggcatgcctacttagcagccgttcagaaagtggccgagtctcccaagttggaacaggaccgcttgctgaagcttgttggccagttcctcgcaccagcggaggtgcgcgtcctagacccagctagcttcaagctgaagactgcaacgcagcgccgcaaagcagtaaccgtgtctattcgaccgcgcccgacaagggaagagcggctcgctgcggcgatggcgcgagcagaggccgaagtgttctcaataccgaacgaggatgtcgcgcaggggctgcgtgcggacctgcgactcttccaacatccaatccgcgtttccgcaatgcctacggcaagtgcccgcgacgtcattcgcgcaatgcaagcggtggaagccgcgcgaagcgccatcggcggggacctcatcgtcaagaagctgccgacccgtttggagaatgagttctacggggccaacgactacgaaatcgacctgaaaaaatga

SEQ ID NO: 45160 - DNA, 672 bp, Burkholderia pseudomallei TSV 43; identical to SEQ ID NO: 44291

SEQ ID NO: 45161 - DNA, 3633 bp, Burkholderia pseudomallei TSV 43; identical to SEQ ID NO: 44971

SEQ ID NO: 45162 - DNA, 1134 bp, Burkholderia pseudomallei TSV 43; identical to SEQ ID NO: 44350

SEQ ID NO: 45163 - DNA, 1008 bp, Burkholderia pseudomallei TSV 31; identical to SEQ ID NO: 45159

SEQ ID NO: 45164 - DNA, 672 bp, Burkholderia pseudomallei TSV 31; identical to SEQ ID NO: 44291

SEQ ID NO: 45165 - DNA, 3633 bp, Burkholderia pseudomallei TSV 31; identical to SEQ ID NO: 44971

SEQ ID NO: 45166 - DNA, 1134 bp, Burkholderia pseudomallei TSV 31; identical to SEQ ID NO: 44350

SEQ ID NO: 45167 - DNA, 1008 bp, Burkholderia pseudomallei MSHR4375; identical to SEQ ID NO: 44263

SEQ ID NO: 45168 - DNA, 672 bp, Burkholderia pseudomallei MSHR4375; identical to SEQ ID NO: 44291

SEQ ID NO: 45169 - DNA, 3633 bp, Burkholderia pseudomallei MSHR4375; identical to SEQ ID NO: 44292

SEQ ID NO: 45170 - DNA, 1134 bp, Burkholderia pseudomallei MSHR4375; identical to SEQ ID NO: 44350

SEQ ID NO: 45171 - DNA, 1008 bp, Burkholderia pseudomallei MSHR4303; identical to SEQ ID NO: 44263

SEQ ID NO: 45172 - DNA, 672 bp, Burkholderia pseudomallei MSHR4303; identical to SEQ ID NO: 42091

SEQ ID NO: 45173 - DNA, 3633 bp, Burkholderia pseudomallei MSHR4303
atgaagctcgaccgcatcgttctggtcaactgggggcagttgcggccgggcgactatgaccttggaaacatgactcttcttaccggcccgacgggcgccggtaagtccactatgctcgatggcctccagaccatcatgactgccgcgtaccagggtatcgtcgcatacaaccctggccaagaagaggtacagcaggggcaacgcagtgggaagtccaagcgcaccttggagtcatttgtcgtcggtgctgagtacagtcgtttctctcgacctcatggcgcgcacgggtatatggcggctgtgttccgccccgggcccgatgaggactcggccaagacctttacggcgctcgtcgccgcatcggcacaggtggatggcatcggggagcgcagggttccgaagctggagcgactcgaactggttatcgtagacgacgccgcgctgaccgttgacgattttctaaaggacgcggagcagagcgagtgggtggctgtcgaagaaatcgtcaagcgattgaaggctcggtattcgaaggtggtgacctatgacgggcataagcgagactacctttgcgcactctacgggcgcttccgggggcgcatctcgattacctgggatgaggcccagaacgctgcgaaggcttggtgccagtcaatagcttacaaaaaaattggctcggtccacgacctcgttcgcgatgacattctggagtatgacggcaagcagttgcaggagagcatcactcgcatcagcgacctgatgcgccaagtcacgaacctgaagcaagaagggcagcgactggaagcgactgttgggcggttgcgagggttgaagactgctatcgcgcaaacgacgtcggcgtttgaagagcaagtccagtatgacttgctgctggccaagatgctggtggcggcggacgacgaacgtatcgcccaagagcagaaacgcatcaacgatgactcggcactggtaacgcggtgcgagcaaaaggtaaaagcagaggagcgactgaaggcaggcgtggaccggagccgcatcgacattgcagcgaagctcagtggaatcgccgccaacgccgagaaagagcgcctggaccagcagctcgagctcgccaattccgcagctcggcacaaactggctgagctcaatactgggcttcaagaggccgcccaaatcgtcaatgcggctaccggtttgttgcggaagcccattccggagcagttccccaagctcaaggcgtcggttgacgcggtcggtcgagttacagcatcgactgacgttgctcgcttggacggtctgttgggcgctgtcctcgatgcctcaagtgatgcgcagcttaacgtcgagaagctgttccgattgacccctgcattcgctggtgtggaagagggactcgccgcgctgcactcatatctagtggggaccgaagatagtgtcttgatggctgttgcgtccgagacgtcggaattgacgcaacgtgtcgaagccactcgcaaggcgcgcaaggaattggctgaccgcaaggagctgttggcgagcggcgctagcgattacaaccgcgacactcgcatggcgcttcctcgcatccgagagtgtctgcccgaagctggtgtccaagttctctgcgacctcgtcgaacctgtgtcggatgaatggcaggaggccatcgaagggtacttggacaatgcccgcttcaatctcattgtgaagcctgagtgggaagcacgaactatcgatttgcttcactcatggggctcgcgctgtaaggtcatccagggtaaacgatgtcttcagcgtgccgatgccggtcgtgtgccatctgactctatcatccatgagctccgcactgaccatcccattgcacgtgcgtatctcatcgagcagtatggcgccgtcgtcaaggtcagggactccgagcaactgcgcgataccgcgcgtgggttgaccaaggacggcaaaggaagcggttctcgcactatgtttgttggtgagcggcgggaccttgttcttgggcgcaaagctcgcgagcaggcgctgcgggctaccatcgagaaactcgatgcggcagaccgaggaattcgagagttcgagcaactgcaggatacgctgtcgagcgttaaacggcttcttggcaacctgcgtgaacccgtattcgatgcgatgccgcttggccaagcagcgggcgaaatcgacagcactcggcgctcgcttgcgcagctggacctcaccgaggtggaacagttgcgggcggagcgagcgaagctggaactgctcatcgcagggcacgatgcggaaattaccgcggtaaacaaagagattaccctggcgagtcagcgtatcacggacgcccaaggcgccattgagcgcatcaatggaggccgagacgcgcgatttcgggagcgtgaagaccagattcgtcggctcgggcagatgtgcgaaacaaactcagagaaaacctacacggttattgccgaggaagtagagggcttgctcaaatcccggaggtttgacgtgcactccgttcaggtgcggctcaacacgctgcgcgcgcagccggacaaattgctgggcgatgtgcgggaaatgctcgcggagtacaacgcgaacgcgcgccaagaggagcgcttccagtcagcgctgcctcatcttcacgacgccaccatgttcgacccgtactatggcccccttgttgcgctcggccgcgcggtgggtgcactccacagcgagcttgagggcattggcctctacaacaatcgggccaaggtggaagaagcggagcgctctttccatgacgtgttcaccaagcagttttgcgtcgaaatcaaaagcaaggtggatgatggcgtccgactgctacggcaacttaatatggagttggaaaggcttgagttcggcacggaccgcttcagcatcgactggtcgaagtgggagccggagttccaggagtactacagcttcttctcggccgtcaccgaccttgcggactcagtcgaaacggtcgacctcttcggagagacggagctcacgccaaagcacgtagaggtacgcgaccgcctggtgaagctcctgctcgactcagaccaagagagagcggggcgggagctattgcgcattgccgactatcgaaactacaggcgctacgaaatttggaatgattcagacagtggggggcgcatagcgctttcgacatggggcacggggtctggtgggcagcttgagacgccggcttacatagttcgcgcggccgtggtgacgaaccggctaaagttcttcgagaagggacccagcctgaagatgctcgttagtgacgagtcgttctcgacgatggatgaacctcgcgctcgggccgtgctgcagtacctacgcgaaagcctcgatattcaggtcatcagtgcgatgccgacacgaggcgctggtggcttacggccagagttcgaccgggagtacagctatagccgggttcctgttgacgctaacggcgaactcgacttcatcctcgaatacgacgagcgcatcttcaagaaggacaagatgcgagagctctgggaaaagcagcgggcggcggcccgtgcgcaggccgagctggcgtttggcgccgccgaggccgcacagcaggcggaggcgcttaaatga

SEQ ID NO: 45174 - DNA, 1134 bp, Burkholderia pseudomallei MSHR4303; identical to SEQ ID NO: 45147

SEQ ID NO: 45175 - DNA, 1008 bp, Burkholderia pseudomallei MSHR303; identical to SEQ ID NO: 44025

SEQ ID NO: 45176 - DNA, 672 bp, Burkholderia pseudomallei MSHR303; identical to SEQ ID NO: 42091

SEQ ID NO: 45177 - DNA, 3633 bp, Burkholderia pseudomallei MSHR303; identical to SEQ ID NO: 42299

SEQ ID NO: 45178 - DNA, 1134 bp, Burkholderia pseudomallei MSHR303; identical to SEQ ID NO: 44028

SEQ ID NO: 45179 - DNA, 975 bp, Burkholderia pseudomallei MSHR456; identical to SEQ ID NO: 44985

SEQ ID NO: 45180 - DNA, 672 bp, Burkholderia pseudomallei MSHR456; identical to SEQ ID NO: 42091

SEQ ID NO: 45181 - DNA, 1203 bp, Burkholderia pseudomallei MSHR456; identical to SEQ ID NO: 44979

SEQ ID NO: 45182 - DNA, 1134 bp, Burkholderia pseudomallei MSHR456; identical to SEQ ID NO: 44028

SEQ ID NO: 45183 - DNA, 975 bp, Burkholderia pseudomallei MSHR332
ttgtccgaacgaggcgacgcacatgacttggtggatgcctacgaatacgccgagaaggttatcgaggacctcgcggacggcatcgattactttcaagaactggtccggcacttgatgcaagccgcgtctgctcatacgcaatggaacgaattcgttgactttctcgacagattccagcgggactactccaagcaacttacagcggataacgcgacgctgaaccgccaagccattcggcaaaagcttgagaaactccgggccgttccggaggcgaagttcaatcgaatggatgcgcagttgcgcgatatcgcgcactggatggcgaaggagtacaccggaagctcgctctatgattggctgctcggtcgtattgaagacatcgtagacgcggcgtgcgagtctaagcagccgggctttctcaaggccatggagacttatctgaagcgtgtgaacggcctcgctttgcagtcgatgatgctacgctcggggcagactcggcatgcctacttagcagccgttcagaaagtggccgagtctcccaagttggaacaggaccgcttgctgaagcttgttggccagttcctcgcaccagcggaggtgcgcgtcctagacccagctagcttcaagctgaagactgcaacgcagcgccgcaaagcagtaaccgtgtctattcgaccgcgcccgacaagggaagagcggctcgctgcggcgatggcgcgagcagaggccgaagtgttctcaataccgaacgaggatgtcgcgcaggggctgcgtgcggacctgcgactcttccaacatccaatccgcgtttccgcaatgcttacggcaagtgcccgcgacgtcattcgcgcaatgcaagcggtggaagccgcgcgaagcgccatcggcggggacctcatcgtcaagaagctgccgacccgtttggagaatgagttctacggggccaacgactacgaaatcgacctgaaaaaatga

SEQ ID NO: 45184 - DNA, 672 bp, Burkholderia pseudomallei MSHR332; identical to SEQ ID NO: 42091

SEQ ID NO: 45185 - DNA, 3633 bp, Burkholderia pseudomallei MSHR332
atgaagctcgaccgcatcgttctggtcaactgggggcagttgcggccgggcgactatgaccttggaaacatgactcttcttaccggcccgacgggcgccggtaagtccactatgctcgatggcctccagaccatcatgactgccgcgtaccagggtatcgtcgcatacaaccctggccaagaagaggtacagcaggggcaacgcagtgggaagtccaagcgcaccttggagtcatttgtcgtcggtgctgagtacagtcgtttctctcgacctcatggcgcgcacgggtatatggcggctgtgttccgccccgggcccgatgaggactcggccaagacctttacggcgctcgtcgccgcatcggcacaggtggatggcatcggggagcgcagggttccgaagctggagcgactcgaactggttatcgtagacgacgccgcgctgaccgttgacgattttctaaaggacgcggagcagagcgagtgggtggctgtcgaagaaatcgtcaagcgattgaaggctcggtattcgaaggtggtgacctatgacgggcataagcgagactacctttgcgcactctacgggcgcttccgggggcgcatctcgattacctgggatgaggcccagaacgctgcgaaggcttggtgccagtcaatagcttacaaaaaaattggctcggtccacgacctcgttcgcgatgacattctggagtatgacggcaagcagttgcaggagagcatcactcgcatcagcgacctgatgcgccaagtcacgaacctgaagcaagaagggcagcgactggaagcgactgttgggcggttgcgagggttgaagactgctatcgcgcaaacgacgtcggcgtttgaagagcaagtccagtatgacttgctgctggccaagatgctggtggcggcggacgacgaacgtatcgcccaagagcagaaacgcatcaacgatgactcggcactggtaacgcggtgcgagcaaaaggtaaaagcagaggagcgactgaaggcaggcgtggaccggagccgcatcgacattgcagcgaagctcagtggaatcgccgccaacgccgagaaagagcgcctggaccagcagctcgagctcgccaattccgcagctcggcacaaactggctgagctcaatactgggcttcaagaggccgcccaaatcgtcaatgcggctaccggtttgttgcggaagcccattccggagcagttccccaagctcaaggcgtcggttgacgcggtcggtcgagttacagcatcgactgacgttgctcgcttggacggtctgttgggcgctgtcctcgatgcctcaagtgatgcgcagcttaacgtcgagaagctgttccgattgacccctgcattcgctggtgtggaagagggactcgccgcgctgcactcatatctagtggggaccgaagatagtgtcttgatggctgttgcgtccgagacgtcggaattgacgcaacgtgtcgaagccactcgcaaggcgcgcaaggaattggctgaccgcaaggagctgttggcgagcggcgctagcgattacaaccgcgacactcgcatggcgcttcctcgcatccgagagtgtctgcccgaagctggtgtccaagttctctgcgacctcgtcgaacctgtgtcggatgaatggcaggaggccatcgaagggtacttggacaatgcccgcttcaatctcattgtgaagcctgagtgggaagcacgaactatcgatttgcttcactcatggggctcgcgctgtaaggtcatccagggtaaacgatgtcttcagcgtgccgatgccggtcgtgtgccatctgactctatcatccatgagctccgcactgaccatcccattgcacgtgcgtatctcatcgagcagtatggcgccgtcgtcaaggtcagggactccgagcaactgcgcgataccgcgcgtgggttgaccaaggacggcaaaggaagcggttctcgcactatgtttgttggtgagcggcgggaccttgttcttgggcgcaaagctcgcgagcaggcgctgcgggctaccatcgagaaactcgatgcggcagaccgaggaattcgagagttcgagcaactgcaggatacgctgtcgagcgttaaacggcttcttggcaacctgcgtgaacccgtattcgatgcgatgccgcttggccaagcagcgggcgaaatcgacagcactcggcgctcgcttgcgcagctggacctcaccgaggtggaacagttgcgggcggagcgagcgaagctggaactgctcatcgcagggcacgatgcggaaattaccgcggtaaacaaagagattaccctggcgagtcagcgtatcacggacgcccaaggcgccattgagcgcatcaatggaggccgagacgcgcgatttcgggagcgtgaagaccagattcgtcggctcgggcagatgtgcgaaacaaactcagagaaaacctacacggttattgccgaggaagtagagggcttgctcaaatcccggaggtttgacgtgcactccgttcaggtgcggctcaacacgctgcgcgcgcagccggacaaattgctgggcgatgtgcgggaaatgctcgcggagtacaacgcgaacgcgcgccaagaggagcgcttccagtcagcgctgcctcatcttcacgacgccaccatgttcgacccgtactatggcccccttgttgcgctcggccgcgcggtgggtgcactccacagcgagcttgagggcattggcctctacaacaatcgagccaaggtggaagaagcggagcgctctttccatgacgtgttcaccaagcagttttgcgtcgaaatcaaaagcaaggtggatgatggcgtccgactgctacggcaacttaatatggagttggaaaggcttaagttcggcacggaccgcttcagcatcgactggtcgaagtgggagccggagttccaggagtactacagcttcttctcggccgtcaccgaccttgcggactcagtcgaaacggtcgacctcttcggagagacggagctcacgccaaagcacgtagaggtacgcgaccgcctggtgaagctcctgctcgactcagaccaagagagagcggggcgggagctattgcgcattgccgactatcgaaactacaggcgctacgaaatttggaatgattcagacagtggggggcgcatcgcgctttcgacatggggcacggggtctggtgggcagcttgagacgccggcttacatagttcgcgcggccgtggtgacgaaccggctaaagttcttcgagaagggacccagcctgaagatgctcgttagtgacgagtcgttctcgacgatggatgaacctcgcgctcgggccgtgctgcagtacctacgcgaaagcctcgatattcaggtcatcagtgcgatgccgacacgaggcgctggtggcttacggccagagttcgaccgggagtacagctatagccgggttcctgttgacgctaacggcgaactcgacttcatcctcgaatacgacgagcgcatcttcaagaaggacaagatgcgagagctctgggaaaagcagcgggcggcggcccgtgcgcaggccgagctggcgtttggcgccgccgaggccgcacagcaggcggaggcgcttaaatga

SEQ ID NO: 45186 - DNA, 1134 bp, Burkholderia pseudomallei MSHR332; identical to SEQ ID NO: 44028

SEQ ID NO: 45187 - DNA, 1008 bp, Burkholderia pseudomallei TSV5; identical to SEQ ID NO: 44263

SEQ ID NO: 45188 - DNA, 672 bp, Burkholderia pseudomallei TSV5; identical to SEQ ID NO: 42091

SEQ ID NO: 45189 - DNA, 1203 bp, Burkholderia pseudomallei TSV5
atgtgcgaaacaaactcagagaaaacctacacggttattgccgaggaagtagagggcttgctcaaatcccggaggtttgacgtgcactccgttcaggtgcggctcaacacgctgcgcgcgcagccggacaaattgctgggcgatgtgcgggaaatgctcgcggagtacaacgcgaacgcgcgccaagaggagcgcttccagtcagcgctgcctcatcttcacgacgccaccatgttcgacccgtactatggcccccttgttgcgctcggccgcgcggtgggtgcactccacagcgagcttgagggcattggcctctacaacaatcgggccaaggtggaagaagcggagcgctctttccatgacgtgttcaccaagcagttttgcgtcgaaatcaaaagcaaggtggatgatggcgtccgactgctacggcaacttaatatggagttggaaaggcttaagttcggcacggaccgcttcagcatcgactggtcgaagtgggagccggagttccaggagtactacagcttcttctcggccgtcaccgaccttgcggactcagtcgaaacggtcgacctcttcggagagacggagctcacgccaaagcacgtagaggtacgcgaccgcctggtgaagctcctgctcgactcagaccaagagagagcggggcgggagctattgcgcattgccgactatcgaaactacaggcgctacgaaatttggaatgattcagacagtggggggcgcatagcgctttcgacatggggcacggggtctggtgggcagcttgagacgccggcttacatagttcgcgcggccgtggtgacgaaccggctaaagttcttcgagaagggacccagcctgaagatgctcgttagtgacgagtcgttctcgacgatggatgaacctcgcgctcgggccgtgctgcagtacctacgcgaaagcctcgatattcaggtcatcagtgcgatgccgacacgaggcgctggtggcttacggccagagttcgaccgggagtacagctatagccgggttcctgttgacgctaacggcgaactcgacttcatcctcgaatacgacgagcgcatcttcaagaaggacaagatgcgagagctctgggaaaagcagcgggcggcggcccgtgcgcaggccgagctggcgtttggcgccgccgaggccgcacagcaggcggaggcgcttaaatga

SEQ ID NO: 45190 - DNA, 1134 bp, Burkholderia pseudomallei TSV5
atgattggcgcgtctctttggctgaagtccatgccagtgcaagaattgctcaacatgcttgttgaccgattggacgcggccgagcagagaggaagcactaaagcgaaatcagtccagctcgacgagcgcacttggccagcgctctacatgtcgccagtggagtcgcagaaggaacacctttgggagcatgtcgtcgcgatggtgcgatgcggatggctagctgtgaagccagaaaccgcgctcaaaagtcggtccggttacgcatcatcgccgcgtgtgagtgtggtcgaccagcgagaactgcgtgcggcggtcggccggcaggaaagggtgaagtcgtccgctgagcgctggcgcgacgccgtgtcgtctggcttactagcaagcgatacggtaaagcgacttgtctcagagtattgcatcgatatccccggtcgcacgatgacggaggtcgtggagcagttgaaccggcttccggcgctggccgagaaatcgatgctgctgcgcgaggtgtcatcgcagttattctgggggatgtccaaggtcctcgacaagcgccaaggattggttgcggccattctaggtatggacgattgcccattcccagagtctcccatccaattgcacgtgttcttgcctgccggcggccatcgtggagtgctcttcattgagaattcggtgagcttcgaatgcgcaatgcgcgagccccgcggagtgttcggtgagttggctttggtctacgcgtccggctttaaagggagtgcgcagcggttgcgcaccacggaggggtgctcgctgttttacgcggcaggcggcggtctcgaacgggacttgcgtgcaacgtttgaaggttggttgttcggccggcaagagataccgtcgtacttctggggcgacctcgacttcgcgggaatgcgcatactcgcggctatgcgggcgaccttttcggggctgacagcctgggtgccgggttatgcgccgatgctaaccgtgctaaagggtggcggagggcacccccctgaggccgccgacaaacaagggcagaagccaatcgcatcgacagggtgcgagtacgccgatgagcaactagtgccagccctgcagaccttccggcgtttcgtagaccaggaatag

SEQ ID NO: 45191 - DNA, 975 bp, Burkholderia pseudomallei TSV32; identical to SEQ ID NO: 44985

SEQ ID NO: 45192 - DNA, 672 bp, Burkholderia pseudomallei TSV32; identical to SEQ ID NO: 42091

SEQ ID NO: 45193 - DNA, 3633 bp, Burkholderia pseudomallei TSV32; identical to SEQ ID NO: 45146

SEQ ID NO: 45194 - DNA, 1134 bp, Burkholderia pseudomallei TSV32; identical to SEQ ID NO: 45190

SEQ ID NO: 45195 - DNA, 1470 bp, Xanthomonas fuscans subsp. fuscans
atgaagcaccaggcccgtatcgccggctatcggcaactgcgcgagcagccggtatggaaactgcttgccgccgaccacgcacccgaactgatcggcctgctgcagacggtgctgatggacggcgaacgccgcctgccttcggccgtgttgcacgagcttttgcagcgccagctcgacgccttgcgcgccgacgagctctcgcgcgaactgccgcgcaccgcacaggcgtatctggcgcattggttggcacagggctggctggaacgccgcctgcccgaaggcgcagccgaagaagaatacgaactctcgcgtgccgcgacccaggccatccgcttcatcgtcggcctgcgcgaaagcagcagcagcgccaccgaaagccgcctgtcgctggtgatccagcaactggtgcagttggccggacagaccgaagccgatccagagctccggctggccgcgctgcgcgacgaacgtgcgcgcatcgatgccgagatcgaacgcgtggcttccggccgcgtggcggcgctggacggcaaacgcgcgctggaacgtgcacgcgacctgatccatctctccgacgagctggccgaagatttccatcgcgtgcgcgacgatttcgagcagctcaaccgccaattccgcgagcgcatcatcgacgacgaaggcgcgcgcggcgatgtgctcgaacaactgttcgacggcgtggatgtgattgcagacagcgaagccgggcgcactttcgaggcgttctggagtctgctcaacgacacccagcaaagcagccagctcgaccaggcgctggatgcgctgcttgcccgtgggtttgcgcgcaagctcgatcgtcgcgaacgcgcctttttgcgtgggctgaccggcacgctgctggagcgcggtggcgaggtgcacacggtgatgcagcatttcgcgcgcagcctgcgcggtttcgtgcaaagccgtgggtatctggaacagcgccggctcaatcaattgctcaagcaggcgcagggcgaagccttgcaattgcgcgacagcctgcacgccaccaccgccaccggctatacgcaggcgctcagcagcagccgcctgcgctcgttgtcgcaatggcggctgcacgatccacggctcacccaggtcgatggacgcgtgcaggccgccgacgcggccgagatctcgctggacagcgtgggcgatctggtggcgcaatctgagatcgatgtgcgcagcctgcgcaacgacctgcatgagctgctcggccaacgcccgcggctgacgatcggcgacgccttgcaacaacgcccggccgtgcagggcctgggcagcgtgatcggatacctgtcgctgggcacgcgccacggcatggtgatcgaaggacagatggaaacggtgcaatgggaaggcagcgacggcgccgtgcggcgcgcgcgcattcccttggtgtggtttacccgggagaaacgcaatgaactggtctga

SEQ ID NO: 45196 - DNA, 702 bp, Xanthomonas fuscans subsp. fuscans; identical to SEQ ID NO: 45048

SEQ ID NO: 45197 - DNA, 4023 bp, Xanthomonas fuscans subsp. fuscans; identical to SEQ ID NO: 45049

SEQ ID NO: 45198 - DNA, 1470 bp, Xanthomonas fuscans subsp. fuscans; identical to SEQ ID NO: 45195

SEQ ID NO: 45199 - DNA, 702 bp, Xanthomonas fuscans subsp. fuscans; identical to SEQ ID NO: 45048

SEQ ID NO: 45200 - DNA, 4023 bp, Xanthomonas fuscans subsp. fuscans; identical to SEQ ID NO: 45049

SEQ ID NO: 45201 - DNA, 1470 bp, Xanthomonas axonopodis pv. phaseoli; identical to SEQ ID NO: 45195

SEQ ID NO: 45202 - DNA, 702 bp, Xanthomonas axonopodis pv. phaseoli; identical to SEQ ID NO: 45048

SEQ ID NO: 45203 - DNA, 4023 bp, Xanthomonas axonopodis pv. phaseoli; identical to SEQ ID NO: 45049

SEQ ID NO: 45204 - DNA, 1470 bp, Xanthomonas fuscans subsp. fuscans; identical to SEQ ID NO: 45195

SEQ ID NO: 45205 - DNA, 702 bp, Xanthomonas fuscans subsp. fuscans; identical to SEQ ID NO: 45048

SEQ ID NO: 45206 - DNA, 4023 bp, Xanthomonas fuscans subsp. fuscans; identical to SEQ ID NO: 45049

SEQ ID NO: 45207 - DNA, 1539 bp, Dermabacter hominis 1368
gtgaacgattccgacgccctccctcgccgcaacacgccaacgtttgccgatatcccgcgctttggcggcacggatgccgccgtgtcccgaaagcagacgtacgagcagctgcggcggatgtccacgtggcggctcctatccgccacgaaggcgcctgcgaccctcgcgattttgcagacggttttccccgcgggcgaccgtcggctcgaccgctccgagctcgtggcccgcgtggcgagccacctcgacctcctgcgcggcgacgaggatgttcagcgcggcgcttcggagtatgtcgactcgtgggtgcgcgaaggctatctcacgaggcgcgacgatcccacgacggtcgaaacgaccttcgaactgtcggtgtccaccgtggaggcgatcagtttcatttcgtccctcgaggagcatcgccccacgacgacggaatcccgcctcacgctcgtcatgcagcagtttgagcgacttgccgaggacaccgaaggcgatcgagatgtgcgccttcgcggcctccagcttcgccgcgcgcagatcgaaagggagatccaggcgctgagcgagggcgagctcatgctcccgccggccgagcattccgcggagcgccttcgcgatatcctccaggtcgccgacgaactgagcggtgacttccttcagtaccgcgaggaccttcgcgctgttgacctgcatcttcgtgagcagattctttcgcctgatggctcgcgcggcgaaatcctcgagcagcttctcgcgggcgatgatctcctcggtcaatctaaggtgggcaagaccttcacggcgttcttcaggatgctcaacgatcccaaacaaaacgagcgagctcaagacctcgtggatcgcctcctttcgcgcgactttacgcgcactcttacgcgccgtgaacgcgaccgcctcgcgaacgtctttagcgacctgtacgagcccgcgcaagaggtcctcgacgtcaagaccgagctctatcgttcgctcgcgcggttcgtgcgcagccaggacttccgccagcaccgcgtccttctcgatcttcttcaagaggcgcagggcatcgccctcgctcaaaaagacagcgtgagccatcgcaaggtcgaagaggtcgatctggggctttcgcgtgcgcagatgagctctgtcgctcagcaccttcttaaggacccgagcgatcccggcgtaccgccagaggccgaggtccacgacgcctcgcgtctcagcgtcgaggttctggatgagcttgttcgcacgaacgacattgacctcgtggggctcacatcgtccgtgaacgaggtcgttcacgcgaaaggtcaggcgagtatcgggcaggtcgttcgcgaacagggggcaccccaggggctcgcgagcgtcatcggcctcatgttcctcgcaacggcacacgcgaacgctcgcgagggggacacggagatcgtgcgctggcgcgaagattccctcgagacgggcgacacggattacgcggcgcgcgtgcccgcattcttcttcctcagcgaggtaccggagccatag

SEQ ID NO: 45208 - DNA, 759 bp, Dermabacter hominis 1368
gtggaaaacgagaagggtccgcgcatgcgtgaacacgaggaaaccgccaccgacggtcgcactgttccggcggcaacgccgagcactgaccgcgacgaatgggcgctcgcaagcgacgacgaagacctcacctacgccggctccacagggggagcgctcgtcgaggactcccgccgcgttctcgttgccctgcttcaagggccctacctggacggtcgacgcgacccccagcgctacggccagctccttcgagatcgcgcctacatcgagcagcgcctcgccgacatgttcctggaacttgttctcgacgatgacgcgcaggtcgcattcgtgcgccagagcgaggacgaccccgatgccccgaagcttctgcgtcgactcacgggcctcaaccgactcgacaccgtcctcctcctcgtgctgcgccagcacctccttacgcagtcctcgcgcggccagcgcgccgtcgtgagcgagacggagctcatcgccaacatcgccccgtatcggcgctcgacctcgaccgacgaagccggtttcatgaaggacatccgggcctcaatcgcaaaaattcagcgcgcgggcctcctcgaggaacagggtgactccttcgaggtttcccccgttctcaaactcatgatcaacccggatacggcgcgcaccttcatcgacctctacgagcgcgcgggtgacgacatcacgggcgccgcccacgcgctcgacaacctcggtgccacgaacgaagggcaagcaaagtga

SEQ ID NO: 45209 - DNA, 3420 bp, Dermabacter hominis 1368
gtgagcaacacgaccggcgaagtgcccctcagcgacgtgcacaacaccctcgacggcttgggcgaagcaggcgtcggaaccgcccccgaaaacccccgccgcgagccgagcgaccccgagcacccgcacccgggccaatggcgcctcaaccacgtgcagctgagcaactggggaaccttccacggcacccacgacctcgagattagttcgaagggctacttcctcacgggtggtcccggcaccggcaagtccacgttgctcgacgcgatcagcgcgctcttgaccccacctcgtgcgctccacttcaacgccgcggcctccgatgccgggccgcgcagcacgaagtaccgccgcaccgtcgcgagctacgtacgcggtgcgtgggcgatgcactacgaccccgcaaccggcgaattcagtcaggaagttctgcgggagaactcgacactcagcgtcgtgagtcttcgcttcggcaatggactaggtgaaaccctccagctcacacgcatgttcttgcttcaatccggacacagcgcggattcggacgtcaagagtctttacgtcatctcctcgaaaccctacgacgtgagcgaactgcgtccgttcgtgggcacgagcatcgaaggccgtgaactcgaaaagaccctcgagggcaccgaaaccttccgccagttccgcgagtaccgcgcgcgcttcagccaaatccttgggatccccgacgaaaaagcgctcggcttgctccataaaatccaatcggcgaaggagctcggcgacgtcaacgcgctccttcgcgactacatgctcgacgaaccccgcacgttcgacctcgccgatcaggcactcgccaatttccagaacctctccgaggtgtatgacgcgctcgtgaccgcgcgcgagcaacgcgacgtgctcacgggcctcaagaatgctgaccaggtatggcgcgaggctcgctctcgcggaagtgaactcgtcgatcgccgaaacgacattgacgtattcgccgcgagtcacttggtgcggcttctcgccgatgaaaaagaccggctggtgcgcgaccaggaccgcctccgtgcgcaccgcaaccgcctctcgcaggacatttccgacgcccgcgacgaccttgctcaactcaaagagcagcgcaagagtgccggtggcggtgagatcgatgactggaaaaagcagatcgctggcctcgaggttgagcgcgaccgccgccgcgaacgcgcgaccgaattctcgggacagctcgcgctcgcgggcctgcacactccctcgaacgaagaaaccttcacgcaaacccagcgcgaggtcgcgaagctgcgggccgcactcgaggacgacgaaaagaacgaagcgcaaacccagtgggaagcagaggccaaggtccgcgagcacgcgcacgctctcgaaacgacccgccaggaactcgcctctctcacgacgcgcgcctcgaacctccactccgatgacgtcgcgcttcgcgatctcctcgctgagcgtacgggcgtagcgccaaccgacctgccgttcgccgccgagctgctgcaagtgcgcgcgggagaggaagaatggacggccgccgccgagcaggcactgcgcggcctcgcccgctcgatcctcgtgcccgaacgggcctaccgcgctttcgcgcgcgagatcgacggtatgaaactgcggcggcgcgtgtcctataaccgcatcaacacgaacgtcaaaaccgcccccaagaaactcgatgcgcgctcgctcggggcgaagatcgagatccgcgaaggcgagttccacgagtggctctcgaatgaggttgcctcgcgtatggactacctgtgcgccgaaaacctcgaggagttcaccaagcatccacgagcggtattgcgctccggccagatcaagcactccgcgacacgccacgagaagaacgccgagcggcagatcaacgaccgctccaactgggtgctcggtttcgataatcgcgcgaagcgcgccgtgttcgaagcggagcgtacacgcgctgaacaggccctgttcgaggcgcaggcccggcgtcgcgatctcgaaaaggaagcccagacccgccgcgaaaagctcttcgcgcttcaggcaatccaggccgtgacgtgggacgacgtggatgccgcgagtgtcgctcgccgcattgccaacctcgaggacatggtgcgtgcagccgaggacggctccagtgcccttacagaaattgcgcggcagatcgatcaggtcgaaatgtcgatcagcgaaggcgatgaggagcttctcgagatcgtgggccagcttggtcgcgtcaacgagcagctcgatcagatcagcgaacgccacctccaggccgaagcccagctcgaagagcgcacgctctcaccggaaacgacggccgacctcgaggagcgcttccgcgcaatcgcacccaccctgctcatctccaacatcgaccaggtgacgcgcgatgcctccgcgacgctcgacgcggaactaatggcactcacgaagaaaaccgcgcgcgctgaagaagatatgcgcacggccatgcgcgagttcacgcggcgctggcccgcgggcggtgccgatgtcgacacctcgctcgaagccgcccccgagtacctcgcgatccttcgcggcatcgaagaggaaaagcttcccgaagtcgaggaccgcttcttcgaattcttcacctcgaacaccctcggtgacgtgcaggctctcgcaacagcgatcgcgcgcgagcccgcccaaatccgcaagcgtctcgcgaagatcaacgagctgctcgcgcaagtcgagttccacgaaggtcgctatctccagctgtcgatgcgacccgtgcacctcgctgcgctcgacgagttcaagcgcgcgctcaacgaggcaacgagctcaagcctcgaaaacgacctcacgctcgaccgagacaaagcggaagaacgcttcctcgcgctccaaaacctcatggacatcatcacgaaggcccgcacgcgcgaagacctcgcctcccgtgcgatcctcgacgtccgccgccacgtccacttccacgccgaagaggtcaacgaggccggcgaagttgtgcacgcgcacgaatcgggcggccccctctcgggtggccagaacgagcgcctgacgacgttctgcctcgctgcggctttgcgctaccagctcgccgggaccggcgtggatgtgcccaggtatgcgcccatcattatcgacgaggcgttcagcaagggtgcgggcaagttcattaccgccgcgatggaatccttccgccacttcggtttccaggtgatcctcgcgaatcccggaaagaatccgcaggcgctcgcgccgttcatcggcggcgtaggcgtcgtctcgatccgcgaggaccgctattcctccgtgagcccgatcgatttcattccggctgcgtag

SEQ ID NO: 45210 - DNA, 1539 bp, Treponema sp. OMZ 838
atgcaaagctctgacagtgcatatatagcaaccttaattgcagaagattcgggattgcggcttttacgttcaaagaatcccgcaccggttatttcgtttctttttaaaatattcagagagcggaatctgcaaaccgtcaatgccgatcggtttgaaacgctgctggcggattttttgcggtcgcaggaattttccggttttgacaatagcagtatcgacgattggtatgatggggaaacagcagaaatacaaaacagcgaagagtttagactcgcactgcaaagcatcgaggcgcgcgctcattttttagcgaataaatggtgttcggaaaaggccggctatatcaaaaaatactataatgagcggcaggatgtgattatcgaactgagcgcaggggtggaacggctgtttacctggcttgatacgatggattcaaaaatgtttatcggtaccgaatcccgctttcaagatattctgcataaactcagagagctttcggaaaacactacgcacgatcctcaaacacaaattgcagaacttgaaaaacagaaagaagcattgcagcaacgtatagatgcaattaaaacaaccggagaggcggaagtgtatacgccggtacaaatggttgaacggttacgtgaagtttcaaaagcggcacgcgaactcttatcggatttccggcaggtagaagaaaattttaaaaccattcttgctgatgtatacaaaaaacagtcggtgagcgaaacaaaaggcgcggtgcttggctacgcccttgatgccaatttggaaatgaaagaaactccgcaggggcaaaccttcgattctttttgggactttcttgcagccgatgccggtaaaaacgagatcaatcgcttaacccggacgattatcgcacaggtaaccgagcatggcattgcatgggaggattccttcctgctgcacttgaaacaatatctgcatgaagcggggcggaagattatcgacaccaaccattcgctgacgcaccggctcaaccgtgtgctgctttcgcgtgactgcggtgatcacaagcagctgaccgaacttattgcttttatcaagacgaaagcctttgaattagccgagcgtgatattgtttttccgaaagagtttggtattcaaacaaaagcggtactgtatttcccgcaggcacggacgcttatccttccgccgcttaaccaaagctttgaaccgatcgtatcattcaccgagcaagagtcggcagcgctgctgcagcgaagcggtatttttaatcaattttatattgatgaagccttgctcaaaaaacatattgaacagtatcgcagtcaatttctccatggcacccttcaattttcgctacacgatttgagcaaaaaattcccgatagaaaaaggtctttccgaagtcgccgcctattttgcccttgcgccaaaactcaaacccgccgccgttatcctcgatgatgcaaccgagcggattacatacacatacaacggcaagtccgtagcgctgacagtgcctaagattatattcgggtag

SEQ ID NO: 45211 - DNA, 585 bp, Treponema sp. OMZ 838
atgatgacggcacagtgggcggcagtctgtataaaattgttacaaggggctatttacgaaaatgaggaacctgaggcatggaagctcttgcagcaataccagcgtgaaattgccgcatattttgaccaaatcggtatcagcctctttattgaaccggccgacggctacgcatttttagagcaaaaagagagcgaagaaggggattctaaagctgtcaaacttatccggcattatccgctgtcatttgagttatcattgctgtgtgtactgttgagggaggccttggagcagttcgatgtttctcaaaacacatcttcaattttagtactgaaagcgagtgaaattcgtggaatgctttccatttattttaaagaaaaaaccgatcaaacaaaactctataaagaattaaataggtatctaaatcaagctgtcgatataggctttcttaaaaacttgagcgaaaaagacctcagcaaaacaggtgatgcagatattgaccctgcgtatgaagtccgcaggataatacgagccaaagtcagcgtcgatttcttagcggaatttaaagagcggctgcaaaagctttag

SEQ ID NO: 45212 - DNA, 1803 bp, Treponema sp. OMZ 838
atgcaatttgatttattgaaaaccgaagatattgataaaaacggactgtatcttgatttttttcaagtgtacaactggggtgtttttgattcaaaagtgtacacgatgcggtgcggaaagaaggcgacgctgttgaccggcttaaacggttccgggaagacgacgctggtggatgcttttttgtcgctgatcgtgccgccgcggcaacgcttttataaccaatccgccggagcggagagtaagcgggaacgtgatgaaatcagctatgtgctgggtacgtatggaaacaaacgcgaggaagagtttacctccggcactgcaaaaaatttacgcacaaaagaaaactgtatttctattttgctcggctgctttgtgttgggagatgatcaaaggccgataacgcttatgcaagtgcgttttttttccggcggcggagccttgcaaaaaatctattcgataacgcatacgcggctttcaattgaagagatacaaaaagcagggattgattttacaccgcagagcaattggaaaaaacgcatgaccgaagtattcggaaccaaattttacgtcgataattttaccccgtatgcagaagcattctctcagcttgcaggcttgcgttcggatcgggctctctatcttttttcccaaacggttggactgaaaggagtcggcaacttaaatgactttattagaacctatatgtttgaaggccgcgataccgaacgcgattttgatgatttggtaaagcattatgaagagctttctcagatatacaacgagatagaaaaagcacaagaacagctcagactgctgcaggaaattttagatgccggaaaaatatttgaagactgcgagcaaacgaacagaacattaaaacagttcaaaatgattttacagctgtggtatatacaaacagtcctggatacgattacaaaacgaatagttgttttgcaacaagaaaagttgctcgctgataataaaagaaatatgcttgaagctgaaataaaacagcttgatgccgatatggattcgctcaaagcagttattcaaaaaaacagtacggcaattctgatcaaagaaattgagcataagattcaattcaatgaattgcggttgcagacatgccggaataatgtgcgggattatgaacagtgcgcccgtgttttatctttggaaattccgcaaacggaaaagaaatttaaagaaaatatcaaattgctgccggaattaaaaaaacagctgagtgcggaaagagatttgctgtataaatcaagtcttgaacggaatgcgcaaaatcaggtaaataaaaaagaagaacaagcaattatcgaagaattggaatcgctgagtaaacggacaacgaatatccctgcgcataatatcgggatacgggatcaaatatgcgcacatatcggctgctcggaaaaagaactggtgtttgccggagagctattgcaggttgcaaaagacgaaagccgttgggaagctgcgatagaaaaactactgcataattttgcgttatgtttgctggtgcctcctcatctttataccaaggtgaatacgtatgctgcaacgcataatttacggggacggctcgtctatcttaaaaccgataccaaaccgcagctgaaaaaaacatacccgaaaaaaattcacttattgcgaaattggaaatacagcggaagcatgaactttccgattggcttgaatcgtatttacatgatacattcgattatatctgcacggatgatacggaagtatttagcagggcggcaaaggcgcttacctcaacaggtttaa

SEQ ID NO: 45213 - DNA, 1413 bp, Candidatus Thiomargarita nelsonii
atgttatttgaaaaactcccagaaaccatttttcagcccttatgtggtcctaatagattaatataccaaaacgtattaattgctctcggcaaaaatatcttttttgatgaagaaagtgctcccgaaaaagacaaaattcgccgtgaaattgaagaaaccttagcccgacaagacgcattaaaatggtcagaagaagaaaatgaaaaaaatgaaaatgatgatgacgatatttctgctccaacacgttcagaatatgccaatcgtatctatcatcgtcttgtccaagcaggctggttagaagaagaaacagaaggttacaacacttatctgatcatgacacagcctgtcagctacttacttcgatcattaaacaatatctgtcaacttcaaaaagaacattatggaggtacagttttaagtattctcaacaatattgaagcggctctccaaaatccagaagaacgcggtatcagtttacaagaggcttttcgtactgcaaaaagttttaataaccatataagcgatatgactcatgggctacgtgacttacaaaagcaaatagtagcgaccaaaaaaccaaaagatatcttggcacggttttttgaagaatttgtcgctcagatcctcgtggctgactataaaactttgaaaacacaaaataatccatttagatttcgtcacaaaatcttaaatattcttcaaacattaaagtttaaccctgaaaaaacaaaggcacttattttaagctatcaaaaacaactgaatattgaccaatctcaagcacaacgtattgttgatgaacatatttcatctattttcaatatttttgaatccattgatcaaaagctagaaaaaatagacgattttcgctttagattagaaaagcgcgtagcagatactgtgcgctatatggaaaaaaccagtccggggattgaaaccagaatcactaaaatactagaacagatcacaggagaattaaagactatccccgtcttgaaaaccttggcacgtccaaaaccgatttcaagcaaaagtctcaaatcgccacccaagcgtcgcaaaccaccagagcggcgaatcattcagactaaacaagttgatccggcgatattggctctccgtgaacaaattaaagagtatgaatccaaaagacggatcacgcctcaatacgttaaagattatatcgaacgtcaattgggcaaccgccatacccttcaagctcaagagttccacattgaatcggtgcaagattattttgcatttactcagataccacgtatgccatatttagggcggatgtggcaaaagcttgccagtcaatatatcattgaaatggaagaagaaaaattggaaattattaatgtacaaggaatgcttgagtgtcgtcactttacaatacaaaggaaaacctga

SEQ ID NO: 45214 - DNA, 3465 bp, Candidatus Thiomargarita nelsonii
atgaaacgactaaatagaataatactcattaactggtacctaattgaaggactagaaatccctgttaaaggcaatattgcttttgttggtcctaatggctccggaaaatcgtctattttagatgccatccagaccgttctcacgggggctaataaacggtatttatcactcaatgccggcgcaggagaacatggcacacgtaaattatgggaatattgtttaggctacatgtatgatcccaatgaggctgaaattgaaaatctccgtccgccgcgtgatgaggctcagacttacattgctttgagctttcgtgatacagaaacccatgaagaaacctgcgtcggcataggcatctccgcttatcgcagtcgagaagaagaaataatagaagggcgctttattatccccaatatgtcagtgacacgtcagacttttttagagaaaacccctgccggttttgtgcctaagccttggaaacaactcaaagaagaattaagacggaaatacaaagactttaccgacatctccaccgctgaaaggtttgtggctgaaatggtcgccaagttgagccgtgaaaccgttagccgttttgatcacaaaaaatttctcagaaattttaaaaatgccattacctttagccccattaagaatccgacggattttgtacgctggtatgtattagaacacaaacccgttaaaatggagcactttagaaaatcactcaaaaattaccagtttattcgtgaaaaaactcagcgtgtcaaaaaacgtattgacgaactagaaaaaattgacaaacaatgtaacgagatcatcaacagcgagcgcaatgctttagaatacgcttgggtggtttatagtgtccgctttgataggaaaaagcaagaaattgaaaccttgcaacaggacatagaaaaattacaacagcagattgataaagccattgaatcgtctaaacacttagaaactcaaatagagttacttaatcaagaattcattgaaaaaaaggcgcagctcgaaagttcagacgtcacaatgaaaataaaagccttgcaagcagaaatcaaaagcaagcaacagagtctccgtactgtcacagccgccataaacaaagtgacggatgtactgcgtgaagcctcctacatcttggacggtgaacagcatttacctaagaaaatagtgcctattttaaaacaggctcaagagctttctaataggcttctgcaaaatgaatcgcccgacggtatcctagtgcaggagggcggaagtcccgataccatgacagggcaaccacaagggattgcccctacaagaacaaacgatattgtaggggcaatcctttatggttgccccttatggcctcgaaatttccgccctcctgtactagaaggattaaaaaacaccgttttacctcaagccgactatttgaaaacaaaattagaatcgctggttatccaagaaaatgaacagcacaaagaggcacaaatgctgagagaaagcatctccctactggaacaaggagacgcacccctcaacgaaaacacttgggcactcataaaattacttaaagcacacaacattcaatccacgccgctttgtgacatgatagatgtgcctgaacaacacgagcgatggcgtgttgcgattgaaagttatctcggtggcttgcgtgaagctttattggtagattctgagcgactcgaagaagccgttaaaatttatcggcgtcactaccttaattttaaaggttgccatattatcaacacaaagcaaacggctaagtggattgaacgctatgactcattagcaaaacggattgaaactgaaaatgcggatgctaaagcctatattaatcggataatgggtgaactgacttgcgttgaatcagaggcagaactcttaaaatatgaccaagctatcaccgctgactgtctcttacataaaagcggcaccataaccgcaatgtatgagcgagatgccatgattggtcggacacagcgtcaaaaacaactagaacagaaaagaaaacgattgggtggggttttcggatcacttgaagaaacaaaaaaagtcaaacaagaagtgacagagcttgttcgactttttacaagactacaatatgggctcagtgatatgactcaaaaacccagtaccttgctacaaacgcaacaaaacacgcgccaagaaatccaaaatcaccaaaatgaaattaaagcattggcgcaacaacaagacgaaagcggcattaaatcgcgtattgctgccattgaaaaagccctacgtgttgccaaaaacgagcgggctaaatgtcaagaacaggacagaaaggctacaagggaaaaagctgccaaagatgaaaaactatcgacactgaaaactgagcaagctaagacacaaagctatcgtgaccaatatgccagcaaagaaggctttgacttggaaagagcaaccaaaaaacgagataaactaaaaggctcgactgaatctgcggagaaactaagaaaaaagaacaccacacgcgccgaaaatctgaaaaactcagtccgtgacagtattaacgaacatcaaattcgttaccatgatgaacgtcttgaaggcgaacaatcgcacgaacaattagaacaatacatcaaaaacaccttaaaagaactgaaagactcagaactggctcactacgaaaaagatgctgaaaaggcattgcgagaagccagcatctcttttcgagctgaatttgtgggtcaactcaaagcgggttttgatgaaattgaaaggcatctcaatgaactaaatcatcacctcaaaacgcgctcttttaatcaagaatactactcctttgtcaaaaagccgaacccagaatttgccgacatattagaactggttaaatcatattcaagagaagatcaggcgaatgtgggcggactatttgatccagaacagtctcctaacacacaacataacaatgctatcgaaaaaatacgccaagcccttgaagaggaaacaacccattcttttgaagactatcgccactactataactttgaagtgaaaatgaaagatgaagagggacgaatattaggctcactgtctcatcgtctaaaaaaaggctcaggcggagaaaatcaagcccctttttacgttgctattggtgccgctttagcagccacatatttaattcgcaaaaaccccgatggaaaattgacaggcggcatgtcattagcggtatttgatgaagccttcagcaaacttgacgtgggaaacaccatcagttgcttgggttttatgaaagatttaggcttacaaatactattggcagcacctgatgaaaaacatggattactatcagaaatgatagataccattatcaatgtcactcgtgacggtgatgccctccacattagccctgaatttccgaccgaaaaggggcaagcgtttttgagtgctgataatccctatgaatccatatag

SEQ ID NO: 45215 - DNA, 1200 bp, Candidatus Thiomargarita nelsonii
atgaatccatatagtcgtatcctacttaagaaattatttgacaaagcgaaacagaatagccaacgcaccatttcgctaccgataaccaaacaacgtgcgccactttattttgagatcagtgacgtcgatgaacaggaaagcttgcatgaagccttgcgtgatgcagaacgcgaaggctgtattagcctcaaatggggaaaatatgcagaaagtcacctactcaaaagcatcatacttaaagatcccacccaattaggcaactatttgggagaaatcccagccaccgaaaaagccgcattgcttgaatccagcttaaaatctgtcatatcgggcaaacacatctggatatcggcacttattgaaaaatcaatggaaaaatggtctcgtggaaaaaaagctcatgggctttctgttgaacagatcgaagaaattaaattgctctttatagcacttgaagcggttgccgatcaaaaacataaagatatggacttacgcaccttcagtgccaaagtgcttagagattctaaagcgatggaacggatgcaaggacgttttgcggctatttggcgaaaacaatttggacttgacaacttagagacaaaagaattgtttgaaaccatcggcttatctaaatttccttggccaatttttctcaagggcgccattaaaattatctcacctaaaacgaccattgactgtagcaacctttttccctatatcggactaccaccagacgccattttaaacctaaaaattgaacgacaacctgactacgttctaacgattgaaaatttagcttcatttaatcgttatgttcatgagattagagataatagccttgtgatttatacacatggatttccaacccctagcttgaaggaatttctggcacaaatcgacaaaaaggtatcaaaaacgatacatttttaccactggggcgatatagatgttggcggcttaaaaatatttgtttatatagaacaaatacttaatagacatcaattgaagcctcacttgatgaatagtgtctatttaaaaaaaaggggtgaagaagtcaattcagttgatcgaaaaacattaaagcgtctagctcattcgcagagtcagatttcagaattagctaaaacgctactttctcttgaaaaaccgctgagattagagcaagaaaatgttgatcctgaagtacctaagaggttttaa

SEQ ID NO: 45216 - DNA, 1443 bp, Arthrobacter sp. PAMC 25486
gtggactacttttcgatcaattccctgcgtgagaaccacgcaggctggtcgctgcttcgcgcccaaaacgctccgctggccctgacgtttttcatgacggcgttcacagacgtgaaccagcggaacctgggccgccaggacctcatcgatgtccttgatgacgtgttgttcagtctgcgggattccttgggcgaggaaaggttcccaagatcggccggagagtatctggacgactgggccgagccggacaaagcctggctgcgaaagttctatgccgacaaccgggacgaacccgtctacgacctcaccgcgtcaaccgaggacgtcatccgctgggtcgaatccctgcgcgggcgcgactttgtgcccacgcaatcgcgcctctccagcattttcaacctgctcaagaccctcgtccacggttcggaaacggaccccgaggccaggcttgcggaactgcaacgccagcgggacgacatcgacacgcaaatggagcagatccgttcaggcaccatccccgtcatgaccgctccggaagccgtggaccacttccatcagctgaccacccaggccaaggacctgctctccgacttccgcgaggtggaggcaaacttccgcaagcttgaccgcaacctgcgcgagcagatctccatgtgggagggcggccagggcgatctcctggaatccatcttctcctcccagcaagacatcagcggctctctgcagggacgcaccttccaaggcttctgggattacctcatgtccccgcaactgcgctcggaattgcacgagctgctggaacgcgccacccaaatcgaggccctcgccacgcaggacggcctggcgcagatcacctccatgcaaaaagactggctgcccgcggtggagcagacacaatccacggtgcgccagctgtcggcccagatccggcgcctgctcgatgacaaggtgttcctggaaaacaagcgcatcatggcgttgatccgcaacattgaatccggcgccgtcgcggtccgtgccaccccgcccgccggcatatttgccgatctttccggacacgacgtacccgttgcgctcccctttgaacgcccgctgtacgagcccagccagcaggttgccatcgacgacgccgtccaagtcgccgatgatctcgacgtggatgcccaggcactctttgaccagttcttcgtggacacccagcgcctggagtccaacattgacgccgtcctgaccgacgccgaacaagccaccctcgcggacgtcaccgatgccttccccctcagccagggcctggcagaaattgtcagctatttccagctcgccaccgagtccccgtcggcaaccattgactcggacgcggcccaaaccctctcctggacgcttcccgacggcagcctccgcgaagccaccgttgaaaaaatcatctttgtgaggccctcatga

SEQ ID NO: 45217 - DNA, 687 bp, Arthrobacter sp. PAMC 25486
atgagcaccaccccggattaccttcaggaaaccctagaaaccccggaatcaacggtgcgcacccccgacgggctgccccttgttgtcaccaaactgttcaagggcgtcgtttatcgcgacgccgacgaaaaactgtggcaacggctcatggaactctccgcccatacccgcgaccatgtggcggtactcggcctggagctggtcctcgacgacgccgaaggctacgcattcctgcgctcgcgccccgacgccgacccggagctgccccgcctcatcccccgacgccagctcaccttccacgtcagcctcctactggccctgctgcgggcccggctggccgagtttgatcagcaaaacagcgaaacgcgcctcatcatgaccgccagccaaattggcgacatggtctccgtgttcctgcccgaatccagcaacgaagcccgcatcctggaccagttggccaccaacatcaagaaggtcacggagctcggtttcctgcgcaagctccgcggccaagacggcagctatgaggtggcccgcattctcaaggcctacgtcgacgcacaatggctcgaggaattcgatgcccgcctcgccgactaccgggccgagctggaaggcgacaaatccgccgtcggccgttcaccaaccaaaaccgcaccctccccagcaaaggcggccacagcatga

SEQ ID NO: 45218 - DNA, 3381 bp, Arthrobacter sp. PAMC 25486
atgagcacccaggcacaggcgggcctgttcagcctcgatgacctgaccattgacgacgcgggaacccgcccaggctttcggctgcagcgtttggagctcctgaactggggcacgttcaacaagaatgtgcgcacgttccggctcgacggcgagaacagcctgctcaccggcgacatcggttccggcaagtcgaccgtggtggacgccatcaccacgctgctcctgccggccaaccggattgaatacaacaaggctgcgggtgcgcaaaagaaggaacgcagcctgatgtcatacgttcgcggcttccacaaaagcgcccgcagcggcattggcgacgcctcccgccccgtggcgctgcgcggccccggcaccttcaccgtggtgctgggcgtcttccacaacgccaccctggacaagaccgtcaccctcgcgatcacgctgtgggccacccaagaagccggccagcccacccgtttctattcgatcgcggagggcgatcagtccatcaagggtgacttctccgattttggggcggacattgcgaagctgaagcgtcgcctgcgcaatgacggtgtggccatttttgacgtgtttgaaaagtacggtgccgcgttcaagcgccacttcggcatcggctccgcccaggcgatggacctgttccaccgcaccgtgtccatgaagcaggtggaaaacatcacccactttgtgcgcaccaacatgctggaggaagacgatgttgaaacccgcatcaagaacctgctccaccactttgacgacctaaaaaaggcccacaacgccgtgttgcgggccaaggaccagatccgcatgctggagccggtgcgggacaacgccgcccgccacgccgcattgaccgtcgactacaacagttcccaccagcagcgtgagcagctctcaccgtggttcaccacccggaagttggagctcagcgaagcccacctgctggaactggagcgggcaggcgccaaggtccaggcgcaacaaacctcgctgaccgccgagctcggcaccttcagccgggagctggctgacctgcgcgacgacatccgcagcagcggagggggccggatcgccgccatcgaggcggagctggcccgcatgtccatcgaatccggcgcccagcgcgaacggtacacaacatattccgaggccgccaccgtgctggggctgtttgagcccgaagaccaggtggtctttgacgccaacgccgccgccctccccggggtcgagaagcatctggtcgaggccaacgccgaactgcaggaccagcgcacagcattggaccgccaacgttccgaggctgctgagcaggcgggcgagttgcaggaagagctcaagagcctgctgagccggcaaaacctgctgcccagctggctgatcgcactgcgccaaaggctgtgtacgggaacgggcatcgccgaatcggagctgcccttcgccggggaactcctgaaggtccgcgactccgaggcgccctgggaaggcgccgccgagcgaaccctgcacggctttgccctgtcactattggtcaccggcgcacactatggggctgtcagcgactgggttgactccaacaacctgcgcgcccggctcgtctacctgaaggtttccgacaaccctgccccgcgcaccgcagcaccgggcacgcttgccagtaaaatcggtatcaagcccggcacacccatgcgagagttcctgttggaagaactgggccgccgttttgaccaccaatgctgcgaaaccatggaagagttccgccgctatcccaaggcgctgaccgtcaacggccagctcaagagcggtggcgggcgccacgaaaaggatgaccgcaaggcgctgaccgaccgttccacctacgtgctcggctgggacaaccacgacaagatcgcccgcctgcgcaccgccctggatcacgccgagggccaggcccgcacggcacttgacggcctggcacgcatcgacacgcagctgggcaatctaggccgccagcagcggctcatcggcacggtcaccgccgtcgcaagtttcgcggacctgaactggcagtccaccgcacgcgccatggaaggcttgaaggaggagaagtccgcgctggaatcctccagtgacatcctgcgtgaactcacccgccgcgaggcggaaacggcggagcgggtggaggcggccaacgaccgcctgcggaccctcatggagcggatcggcgccaacaagaaggccatccaggacatcaccgagcagattgtggactgccgcgaatccctcgccgagacgccaatgacggacgacgccgggctcctggctcagctgggcaaactcaccgaggcggcacttgagtcagcgtctttgacgtacaagaccaccgcgaagatggagagcaaggttcgcgaccggctcaccgccgccatcgacgcgctcaacaggcaggtgattcgcgcgtcggaggccaccatcaagttcatggctgacttccggaacaagtatcctgctgagaccaccgaccttgacgcgtcccttgaagctgccgacgaattcaccaagatcctgacacagctggtggagaacgatcttccccgctttgccgagcggttcaaggaatccctgacccaaaacaccattcatgagatcgtggccttcaacgcgttcctggacgcccgcaagcaggacattgtctcccgcatcggtgaaatcaacgagtccctggcccggattgaatacaacaccggccggcacatccagttggaaccacaagcaacctcggacccagaggtgcgcgagttcggcaccgacctgcgggcctgctccgaaggcagcattggtgcgcaggaacagtattcggaacagaagttcctgcaggtggaggccttggtggaacgtttccggggacgggaggggcgcaccagtctggacgagcgttggacggcgaaggtcaccgacgtgcgcaactggttcacgttctcggcctccgaaaaatggacggagaccggtgaggagcatgagcatttcaccgattccggcggaaagtccggcggtcaaaaggaaaagctggcgtacaccatccttgccgcggcgctggcgttccagttcgggatcgcggcgggccccggcaaccagcgttccttccgcttcgtggtcattgatgaggcgttcgggcgcggctctgacgagtccgccaagtacggtctggaactgttcaagcgcctgaaacttcagctgctgatcgtcacaccgctgcaaaaaatccatgtcatcgagcccttcgtagccaacgtcgggtttgtggccaatgaaaccggcgcagactcccaactgcgcaacatgtccatccaggaataccgggccgaacgggacaagcgtggccgctaa

SEQ ID NO: 45219 - DNA, 1086 bp, Arthrobacter sp. PAMC 25486
ttgctgcgcgaggcggccctgcccacgggtctgcatcctcgccgtcgtgcgttgaaacacccgagtgccacgcaactgcgcaccgattacgccttggccgcggcatgggctgcctcgtgggtcccggcgccgcaaggctgttccttggaccatgtctccgtgggggccagcaccatcggcgcaaacaccctgcccgccgcggcagtttttgcctcggccagtgatgagatcttgtttctgggcctgggtcgcgagtccgcgaagttcaccgaactctcgcgccgggtgacagagctcgacgccggattgacggcgtgggcgatgctgcgcccgctcgagctgctcaagtacggcgaagatgccctgactgctgcccgggtggcactctggttcgccgccaacccggcgccggggatttacctgcgccagttgtccctgcccggcgtccacacaaagttcgtggaaaaccatcgcaggctcatcgacgggatactggcagtgttggcccccgagcggccccttgtgggcaagaactacgcgcgcaggcacggcttccacgccgcaccggacagggtccgggtgcgatatttggattccgcccaggctccggttccggggatggacgacgtcgagatgaccgccgctgccttcgccgcccaccccctggatgttgaccggatcatcaccacggaaaacctgatcaatttcctggcactgccgccggcgccgcggacactggccgtttttggtggcggctacggtttcgaaggcatccgggatgcggcctggctgaaggacgtcgaggtgctgtattggggtgacatcgacacccacggcttccacatcctggaccagctgcgctcccaccacccgcatgtccacagcatcctgatggatgaggaaacgctgctggcgcaccgcgacttctggggccgcgaagccttacccagccatgcagtcctgacacacctggacgcctccgaaaacacgctgtacgaagcactcaaggccagcacccaccagccgcagctgcgcctggaacaggaactgctgcggtgggattgggtgctggcccgcctgccttag

SEQ ID NO: 45220 - DNA, 1458 bp, Arthrobacter sp. PAMC 25486
atgcgctccactgacaacgccgttgcgcagtggcacgcgcagaaacagctccggctcagtccggcctggaaacttttgcagggcgccccatggacgctcgccttcctgcgggcagaattcactgccaccaagcagcgtgtggggctcgaggagttccacgccgacctggcggacttcatgaaggaactgcgcggggaaaacctcagcctgaacgaggcctggcaggcgtcccactacgcggactcgtgggtgcgcagccagttcctgtcccggcccatggtggacgggaaattccagtacgagccaaccgccgcaacggcccgggtgttggcgttcatggacacgctgaccggcagccgcaccaacctgaacagttcgcgcctgagcacgctgttgaacagtatcgagacgctgtcgctgcaaagtgatcccaatccggaatcacgcatcgccgcattggaggcggaggttgccgagcgtgaaaatgaaattgcggccctgaaaaatggtgccaacccggccattctgtcggacgattccgccgtcgctgccacccgcagcgtgcttgacctggccgccagcctgcccgcggatttcaagcggatgcgcgacggcgttgaggtcatgttgcactcgattcgcacagagatcatggattcctccgtgacgaagggcgttgctgtgggccaggtgcttgccggcgacaaggctctgcgcggcacggccgagggcgagacgttccagggcttcaccgagttcctcaacgaccccgtccagcaggcccggttcaggcagtcggtcaacgaggtgctggaacgcgacttcagcgaccagctcagttccgaggaacgggccaaccttgcctccctgctgcgggagatgcgccgtcaggccgccgatgtgcacaccatctacggccgcctgtccgagagcctgcacgcctacgtccagtccgccgaattcaaggaatcggtgctgctgcgcaaggccatccatgccgccgaacaagccgttgccacggcccggctgggatcccgcaccggtgtggttgagccgctgctatatgcccccaactttgagacactggccgggctgggcatcttcaacccggaagaccacgtgcctccgcccaggctggccgctcccccggccctcagcgatgcggacatccaccgcaccccagcgacaccggcgcccgacatgccagccctgcatgccgccgtcgaccgcgtgcgggaaacccgcaatggcacggccacactcgcggacgtctacacgtccctgcccagcgaactgcagcacatcaacaccattcgcgggttgattcttgccgcgcgcggctccggcgagcgcatcgatcccgaacgcagcgaaacactgacattcacgcaaattgacggcacctcgcgcaccgccaccgtccccttgttcaccttcacgaaggactccacagcatga

SEQ ID NO: 45221 - DNA, 690 bp, Arthrobacter sp. PAMC 25486
atgagcaccgagcgcacactcttccccggcgacaccggatcgttcccgctggacatgcgccaagccctggttaggctgctgcgcgggccctacatcgacggcacggcggagccagccctgtggaccacggtcctgacacacactgtgtccctgcagcagtacctgagcgaaattttcctgctgctgagcatcgacgccgaacgcaagatcgccctgctcactcctgctgagattgacgccgtgcacacgcagcccgtcgtggccaggaagccgctgcgccgtgaggagaccctgttggcgctgcgcctgcgcgtgctcctggaccggcatgccggctcggggactgacgtgagcatgtcccgggccggcgcacgcgagatcctggccgagcaccgccaccccggcatggtcgacgacaagcgccttgacgaggcgaccgatgccgcactggcccggctgctgaacctgaaactgattctgcccaccgagctggaccatgagtaccgggtcagcaatgcacttgccctggcgctccctttcgactcgattgaccaaattccggcctaccttgccgccttggacaaggccgccggtaccgaagctcttgaccttgatgccagccatctggacgaagcggataaccaggacgaaccggaccaccaagaccaaaccgtgcaggagatcttctaa

SEQ ID NO: 45222 - DNA, 3294 bp, Arthrobacter sp. PAMC 25486
gtgagcattgcaaccacactgcccatcggcgaagagctcaaccccggccagttcaggctgagccagatccagatcatcaactggggcaccttccacggccgtcacagcatgtacgttgaccgggctggcaccctgttgacgggccatccaggcgtgggcaagtcgaccctttttgacggcattcaacacatcttttacgccgcgccgcgcttgaacgagtcagcccacgaggcctccaaccgcaaggaccggcgcaccacattcagctacatgcgcggtcgcaagatcaaaacggctgacggcgtggtgtaccaacgtcccagcgccacctggtcggccaccgccctggtctttgaagacggcctgggccggcacgtcaccatcgccgccctctttgacctgcccgccaacggccttgaggggcaggtcggcaaacattacctcatacatgatcgggcgctcgacaccgaggcgctggaaaaccacggcagccgccgcttctcgccgtcgtccctgcatgccgcactccccggcgccgaggcattcgacgtgcacaagacgtttgccgagcggttcaggcgcaaactcggcatccacaacgacaaggcattcagtctcttgcgcaccctgcagaacggcaagggtctggacaagggcgtcaaccgcttcttccgctacgaggtgctggacaagccagcaacgctcgcggccgctgctgccgccgtggaagacttcagccacctcagcggcatctatcgccagctcgaggatgcccgcggccagcgcgatgcgctggcacccgtgccggagctgcacgaaaaactgcaacaactggcagaaaaacaatcccgcacagttgagctaaaaaacattcagctgcccctcctccgccagcaattccaaggtgagctgctggccgccagggccgtcgccctgacggagtcgcaggcgctcaaacacgcggagattgctgccgcaacacaggcgaaggatgccctgggcgagtccgttgccgcactgtcccagcagcacgccaaccatggcggccaggccatcgaaagcctggaaaaggacatccgcgccggaaagcgtgagctggctgaacggcagcggctcgagaccgcggcaagggacgatctcgacagcgccgggctcgtgtatgactggagcgcgcaggggctggccgacgcccgcgcggcggccgcatccggcgtcgaacatcaacaggaagagaccgagactgcccgcacccgcgagtaccaggcggtagcggccagtgtgaacgtcaaggcccaggaaaaggcgctgcgggccgagattgccgcgtacgaacgccgcggctccaacatcgactcccggagtgccggagctcgccgcgccatttgtgccgccaccggactgaacgctgcggacatgcccttcgccggggagttggtggatattggcagcgggcatggtgcgtggcggccggcagcggagaaggtgctgcgctccctggccaccaccttgctgatccgcggctcggacattgccgcagtgacctccgcaatcaacaccctcgacgggcacggcaagctgcgctggagtaacctcggcgttcccgccaagcctgccaaagagggccgcaaccacctggtgacgaaacttgatttccacgagtccgacgccggatcctggcttcggggaaaaatcgcctgcgactttgcattcacctgtgtggacgacgatgtggccctgcacgagcacgtaaaggcggtttcccaggcgggaacggtgaagctcagctcagcactgtttgagcgggacacccgcaccatcaacccggccgactacctgctggggttcaacaacgtcgccaagattgcccagctcgaggagcaggcgcagctgctcgccgacgagcaggccgccgcggaagcatcggctgcgcaaagcagtttggccaaggaacagtcggcacgcagactggcggccctgaaacggatcgccgccgacgggcgcagctttgaacaactcgatgccacggctccggccgcagcacttgaattattgcaggccacgctggagcagaccattgccggcagcaccaccctggcccagctgcgggaatccctcgcggctgcccaggcagaccttgaggctgctgtgggccgcgtggccgtgctgcaccatgacctggccgggattgagaaggacctggccgccgtgcaggatgttttggccggcggcggccccggcaagctggctgacgagtgggcgcaggaggcctttgagccatacctgcgcgacggtgaacctgccacactcgacgagcttgaagtgttattgagccatgtcgccgtcgacctgggcgagcgcctggccaccatcaaggaacgccaattccgcacggaaggctccctgagcgagatcttcaaggcctttgcccggcaatttgggccctccatgagcgcaagccacggcacgggcgccgaagctgccacccactatgcagagctgtacggcaggatcatttccgatggactgccccaacgtcaggaggagttcaaggagtacttcaacaaccgctcctatgaacgcttctccgacctgctgcagctgctggaggaggagcgccgctccattgaggaacgcatcctgccgctgaaccagatcctggccgacgtgccttttgaaaagggcagccggctgcgcctggaagttaaaacaagcgttccggacgaggcccgggcattccgcaaggaactcaaggaggcgctgggcaatgcgtacaccaaggccaccgaggaaaagatggcatccagctaccagcagctggaacgactggtcaacgccctgtcggatcctgccctggcacattgggcggacaccgtcctggacgtgcgccagcatgtgaccatcagctgcaacgaacaccgccccaacggcgaaatcgagatcgggttggagcccgggacactgtcaggtggcgagggtcagcggtttacctccttcatcatgggagcggcactggcctaccagctcgggatcgatgttcaggggtacagcacctacgggacagtcatgatcgacgaggccttcatccaggcaaactccgaatacgccggagccggcatcaacgcgctgcaggaattcggtttccaactgctgctcgccgcccctgaggacaaggtggacctgtcccggcacctcggctctgtcacagatatcatcaaacacccgcaggccaacgtttcaggcttcgtctcaacaggccagtccccggcgaccgccacggacattctcctgcggtag

SEQ ID NO: 45223 - DNA, 1350 bp, Methylomonas denitrificans
atggatgacgccttacaggcgctctctgaaatgcttgcatcttatgcgagccaagagatttatgagattgaaccagaaaacatacatttgcaggctgggcgcgagcttcgagcttggattaagcacttgatcgtggagagggaaggcaggctatatgcgacggatgccctggaaacggcgatacattttgtcgagtcattggacaatcgcattatgacctctacggcatctcgattatccgttgtacagcgcgagatcgaaagtctggaaatggggcttaatcccaatgcggccagtcgcatttccagtttgcgacgcaaaattaaagatttggaaactgagttggcggaagcggaggccgggaaattcacggtactgaacgaggctcaagcggttgaaggtattagagaagtatttagcctgtctaccagtcttcgtgcagattttcgccgagtggaagattcatggcgcgaagcggatcgggagctcaggcaatcgatcatcagtgaacaatataaccggggagagattgtcgatcggctgctggaaggtcacgaaacgctgttaggtacaccggaggggcgtgtttttgaaagctttcaggagcagcttcgtcaatcagttgaattggaccaaatgaaggaacgcctgaaaacaattttaagtcatccgactgtacccaaagcattgtcaagaattcaacagcgcgaattgcgttggttggtaatgaggctggttaaggaatcggaggcggtatttcaagcacgggcacgtagcgaaagggacgttaaaggttttttgaaaaacggcttggcggcggagcatcatcgggttggaaatctgctttccgaaattatgaatgttgcattgaatttggattggcaccgacaggctgtacggcgtaaaccaactcctctgccacccgtgggtttgcctgtttctggtctgcctctggttgagcgtttgcgttttaaatccctggatgatgatgtaagtgtggacctcaacttaaccacagactcagcggatttaggccagattgatgatgatttctgggcggccctagatggtctggatcgggaagccctgattaaggacactctggcgattctagctgcggaagatagaccgctgagtatcgcggagctgacacgttttttaccaccgattcatgatttagaaacgtttgcactgtggttgggtatggcacgcgaggctggtattccggtggtacaagataaacccgaagagatcgagttgattgatgacgagcagcgccgctggctgtttcgattgccatacgccagtctcgatagcaaggcactggatagcattgattgggagttgtga

SEQ ID NO: 45224 - DNA, 645 bp, Methylomonas denitrificans
ttgggaaattcgactgttgactcgaatgatgagcaacgcaccaaccgccgactgcgtgaagccgtacaggaactgctcaaatacggtttactggaggagattcacaaacctaatctttaccgaatcgcgataagtcatgttcaagaactctcggatattcttgaacccttagatctggctatgggtgtagacgaggtgcgggggttggtctttgtgattgtgcggcagagagaagtgacggagcaggatgattgggcacatcctttggtgcgaaggcagcgatttaacttggaacagtcgttgttggtcgccatactgagacaacagtttattgtctatgagcaagagtccggaacgggtgctagtgatgctgtcgttgctatagacgaactgataccccagttgcagatttatcttggagatctcggcagcgatgccaaagagcgtactcgagtcattaacttgctggatcagcttaaagggcatggcctagtatccaccatcgactctcatgaccgtgtgacgatccggccaattattgcccatttagcgaatcctgagaatctacaatcactattgaattggcttcgtgaacaaacttctgtcgcaggggaagcaaatgatgacaaggatgagttggaatga

SEQ ID NO: 45225 - DNA, 2940 bp, Methylomonas denitrificans
ttgggagctatgttatggttcgaagacactagttcgacggcttcagatttgaagaagctatggttgtttactgagtcacctgaacatactttggaatattggttaactattcaccatgaaggtggtatgcgcgcgttgcgccaaatggaaaaagacagcacagctatatggacatactcaagtaaaaaagcttttctggcgaggctgagagattattttgatgtcggtgaaaacgcgttcaccttactcaatcgtgcggcaggtctaaagcagctgaatagtatcgatgaaatttttcgggagttggttttagatgatcattcggccttcgaccgagcggccgaggttgccaatagctttgatgatcttaccgaaattcacacggaattggagatcgctcgtaggcaacagcgttctttactgccgattgccgatggctgggaaaaacaccagctgctcgaaaaggaattgctcgaaaaggaaaccctcaaacaaattttgcccgtttggtttgccgagcaagctcatcggttatggaaattggaggccgaacggctggaaaccgcctggcaactggcggaagacgtaaagtcaaatctgacgacgcaggtagaagtccaaaagaaggcagtcgacacgcgaaggcaagcatatttaagcgcgggtggttccagcattgaggatctggaggaattgatcggagaatggcgaaaaacacgggagaaacgtgctgcccatgcgcggcaatatcaacaattggtacagaatctgggtttaccgcatcaaatcaatgccgaaatacttgcagctaaccagcaggaaactcagttgcgtttatcgcagttagaagtagaaataaaatcagcgcaggatgaagcatttaatcgcggtgtggagacgcgtaatgctagcgaccagctggaaaaattggagaaagaatattgtgaggtgttgaatcgcccagattccaacctgccatctctttaccatgagttccgaaaagcactggcccagttcctcggattgtcggatgattcgttgccatttgtggcggagatggttcaggtcaaggaagatgagcaaatttggcgtggtgcgattgaaagggcaataggcagccatcggttgcgggttctggtgccgccggaagtagcggaatcggctttgagctgggtgaatcaacgacataatcgtttgcatgtccgcttgttagaagtgaagcagccagaatcccaggcgaatttctacgatgatggtttcacacgaaaactcagctataagccgcatctctatcgtgaagtcgtaaaggatttgttggccggtattgatcggcactgtgtcgatagttctgaacggttacgtcacaccccccacgcgatgacagttcaagggttaatgtcgggacaatcccgtttcttcgacaaacaagatcaaaaacgtctcgatgaagattggttaaccggcttcgacaatcgggatcgtattgcatacttgcagcaggaaatcgctaatgccaaacgactagtgaaagagacgaaggcgcagcttgaggctgccagagcgatagtaggccgcttatcagcgcagtcgttaatcttggagcaagtgcaaagcttagaatttgaacaaatcgatcttccgggggctgaacaaaagcttaccgagctaaataataggcttgaagcattaaccagtcctgattccgatgctgctgctgcaaaggcggcgatgttggatgctgagaaccagttgaaagcaattgagaagaaacacgagaaggcagtaggagactgtgctcggttgcaaggtgattttgaccgagccattgaacaaaaacgcaaagcgtttcggcgcgctgaggccggactgacggatacccaacgggaactcggaacaaaaaatttttctgagatttctggcgaacaattagatgatattcaggacctcgagcgtaacgaagatgtcgcattacaacagcagataaatgatttacacgaaaaactaagcaagctggctcaggaccttgcgagacgaatgtccgatgcccaaaaagaagacaggggggcattatccgaagtgggtagagaaattgaggacattcccaaatatctggaacgtttgcaggtattgaccgaagaggcgttaccggaaaaactcaatcgctttctctcgtatttgaaccgctcttccgacgaaggggttactcaactactcagtcatatcgacaacgaagtgtcgatgattgaggaacgcattcaagaccttaataataccatgcgcagggtggattttcaggcggggcgttacttgcgcttggtgtccaataaagtagttcacgaaagcttgcgtacattgcaacgagcgcaacggcagcttaattcggctcgttttagcgatgatgccggcgaaagccagtataaagcattacaaactttggtggccctgttaagagatgcctgtgaacgtaaccgcacacaaggtgcaagggctttgctcgatccccggttccggttggagtttaaggtttcggtgatcgaccgggagaccggaaatatcatcgagaccaggaccggctcgcaaggcggcagtggcggagaaaaggaaattatcgcatcatacgtgctcaccgcttcgctgagttacgcgctttgtccggacggtagcaatcgacctttgtttggcaccattatcctagatgaagcgttttcacgcagctctcatgctgttgctggacgtattattgccgctctgcgggaatttggacttcacgcggtatttatcacgcccaacaaggaaatgcgcttgttgcgtaaccacacccgttcggcgattgtcgtgcaccggcgggggctggaatccacgcttacatcattaagttgggaagccttggacgaatttcaccaacaacgcatcaaagttcagcatgaagtcgtcggctga

SEQ ID NO: 45226 - DNA, 1179 bp, Methylomonas denitrificans
atgaagtcgtcggctgaaatcagtgagcgtttagctaggcaatggcatcaagctcaaatgcgcgcggagcgtttgctatcttccgaggcctggcctctggtcatacctataggcaaaccttcggctcgtgaattttcggaaaatatacgagccgttcagtaccatgtgcaatcttggcagggtgttgtcgttggcaaagtggaatgggagcctgtcaattatcgagcagggaccgaacctgttctcataccggtgcgttggaacttgcgaaatccgtcggaatgggtgaccgctacggccgatgtcacagtcgccgatgaatatgcgcagctcgagggattggtggcaagcgttgaagagatctttcgtccgattttggttcgtcagcgcgcactttggcttaaaaaagaccctaacgagatcatcgctaccgcccgccttgcggcaactctttcccctggaagcgctcgtgggagaccgctacgtttgctcgcggagcatggggttgatactaagttttttgaacggaacggtacattattaactaggctgcttgatgagcgttttgacggggcagtcactgagcaaggtctggttaatttccttgacgcgcttgaagagaataatcattgggtgatgttagccccgctggaaaaaggattactgccatttaagcgtttaagaattactacgtcggaactaacagaaactgcgctgccatgctcgcgtattctcgttgttgaaaacgagcagtgcattcatctcttgccggaattacccaataccgtagccatcttgggcgcagggatggatttgcaatggttgcaatccggtcagttagacaacaaatcaattgcttattggggcgatatggatagttggggtttgcttatgctttctagggccagacggtacagaccaaccattagccctttattgatgacccaggcgttatttgatacatacgcgtccgatagcgctgtacatgaaccagtggtagcgcaatcagcttccccagaggggttgacagactgcgaagcgtatttttatcaatacctcttaaatcaagaacgagggcgtttagagcaagagtatctgccagagcatgaagtcgaaaacgctcttagtgcgtgggccacgcaaagtgtgaaggttttaaaaagaaacaataacggataa

SEQ ID NO: 45227 - DNA, 1632 bp, Bifidobacterium longum subsp. longum
gtggccgatgtgatgcgggagctggaacggctgcgaccggtgtatgagacgggcgtcctgcggttgctgttgcgccagaacgcgatgctgtacgtgtcgctgctgcgttccacgttcgacccgctcaccggcgagctgccgcgcgagaccgtggaggagcggttcgcgcaaagtctgaacgctctggccgacgccggcgaatatgcgccgcgcgaggaccagaccttcgccgaggccgctcatcagatcctcgccgacctgacccgtgaaggcgaaggcgactacgcctggctcgccaactcgcatgatgcggcctcacaccgattcctctaccgtttgacggcccgcgcccaccgcgccatcgaggcgctgagcaggctcgaagacgaatcacgcgccctgtccggcgcgcaggccaacagcatcatcatggaaatcgagcacgcgcgcatgcagctgaccgccgaccccggcgagcgcatcaaactcctcaaccgtgaaatcaaggaacgcaagcacgagatcaaacgcatccaacagggcaagcagcatgccacgctgagcgaagcccaggtggaggacgtgatcgccgtgatccacaacacgctgcgcggcgtgcccatcgacctgcgcgaactcgtgctcgacgagcgggacaacggcgacgccttgcgccggcgcatgcaggccggcgacatcagcgtggacgagaacctgacccgctaccacgatgaataccgccgctcgttcagcgaatcagacagcggccgccgcttcgaggacgccttccaggtgatcatcaccgacgagggccgccagcaaatcgacgaagccctgcgcgccatcgccaaaaccccgtatctggccggcgaatccggcgtgctgctcggccagatccgcgacgaactggcccgcatctacgacggcatcgaagccgtgcgccgccagatgcgcgtctccgacgaggcgatcagccggctcgtgcgccagcaaaccgacactcgctaccgcacgatgctcacccgcttgaaccgactgtacgcgcgcctcaacgcggatgcgaaaacccatatgggagacgcctcgcgcccgtacgacacggccacctcggacgcgctgttcgcgccattgccgatgcgcccggccaaatccatgacccgcgccaccgcacccggcctgagcgacctcgccgccgaagccccgcagtcgactccggtggccgatctgcgggacatggtcaacagcggcggcccccgactcctgcgcatggtcagcctcatccggcgcaacccggtgaccgttgacaggtccgatgacaggcccggcgcaaccctcgtggacatcgccgccagcttcaaccggctgcccgaaagcgaacgccgcgaaagcgagatcgtcggcttcctgggcgggctgggagccgtaagcggcaacgccatcgccgacgagccgtccactgacggcgtcggcgtcggggtcgacagcgacatcgccaccgagccggccccggcgcagcgcggcgatactgcgatctggcattgcatatcgattgacggcgagccccggaactggatcactagaccggtgctggccgacatggacgagctgagcatcattgtggaggaaggatga

SEQ ID NO: 45228 - DNA, 675 bp, Bifidobacterium longum subsp. longum
atgaccgtggccgaggaacacgaggaacacgaggagcatatggacaacgccaacccgtacgccctgttcgaaggcgacaccggcgacatgccggccgaggcacgcatggccgccatcgccctcaaacgtgaccgctatatcagcgggcccacctacgacaccgtgctcgacaaccgcgacgccgtcgtacgctccctgaacaacgacctgctcgacttggtgatcaacgaacgctaccgcatcatgtacgccacgcccgtggccggcgacgacgtgaccctgcgctcgctcaaaacccgtgtcagcctcaaacgcgaggaggccgcgctgctcgccttcctgcgcatccgcgtcctcgaatacgagaacgtgcacgccgaccccgccgactggctcgtcagctttgaggagatccgcgccgcgctcgccaccggcgccggctatctggccgcccgcaacgacgaggaaggcgtggcaaagcagatcggcgccatcgtctccgcgatgatcacctacgggtatttggtgcgcctggacgacgaagccatgtaccagatcacgccgctcgtgcccgtggtgctcgaccgcaaactggccgacacctggctcgacgtcgcggaacacggcgacggcgacacggaagatgacgatgacgacgagaagggagccgaatga

SEQ ID NO: 45229 - DNA, 3549 bp, Bifidobacterium longum subsp. longum
atgatgcaggcgacagacgtgcagatgatcgcggaccggtggatgctggaatcccgccgactcatcaactggggctcctatgagggctaccacgaattccgcccctccacggaccacaagctgccggtgaccctgctcgccggcgccagcgaatccggcaaatccacgctggtcgacgcgcagatctccctgctgtacccaaccggtacgccgttcaacaaggcctcgaactccggccgctccgaacgcagcgactacacctacctgcgcggcatggtcggcgtgggcagcaccgaaaccggcgacgagccgctctacctgcgcggccgcgacgagaacggcgcaccgcaacccgtgtggggcgccatcgtggacacctatcgcaaccagaccaccggccaggtgctctcctgcgccaaattcctctacctgatgcccggcgacggccgcggcgacgtgcgccgacagtacgtggtctggggcaagcccgtggaccccaggcgcatggaccaataccgtgacgccccgttcacgccggcccagctcaaagccacctaccccgactgcctcacattccccagcgccgaagcgttccacacacacatctggagcgcaatgggcctgagcgaggccgcctgtcgactgctgcacaagatccagtccgccgacgcgccctcccggctcgacgacatcttcaaacaaggcgtgctcggcgtgcccgaagccctggacctggcccgcaccacggtcgaggactacgaacgttacgacgagaacttccacgccatggacgagaagacccgccgcatggacacgctgcgcggcatccaacaggcctacggcgaatacgccgccgcacgcggcaaggcccgcgccttcgaaccggtcaagccggccgtcgacggcacggtaccggccgtgctgcgcgactgggcattggcccgcatgcgcggcgaagtcgccgtccaactgcccgccgaccgcgccgaacaacagaacagcgaggcggaagccaagctgctgcgccgccgaaccgaagacctgcgcacccgtctcgacatgatccgcggccagatgcagggtctggacggcggcaacctgacccgactcgaactcgaactcgaccaggcccgccgcaccctcgaagacgtgcaagccaaccgaacacgaatcgaacaaacgttcgcatccatcggcgagacgctgcccggcgacgaacaggcctggaacgaacgccgcatcaacgccgtgaacttcaaacgcgaatacaacaaacgagacggcgaatgcgaggaagccctcaccgccgccatcaacgcgcgggccggcgcacgcggcgacctcgaacgactgcaacgcgacttcgaccggcaacgctcccagcgcacccgcatctcccagcagatggacgaaacccgcgccatgctctgtcgcgctaccggactcacccccgccgaactgccgtacgtggccgaactcatggacgtgaacgaacacgaggaagactggcgtctcgccatgaacgtcgcctacgcgcccatcgcccagaccatcctcgtcgacaagcgccacgaacagggcttcgccgccaaagtcagcaccatcgacccgcgcaccatgccccgacgcacctggcagttcgtggacaccgcacgccactacgacgacaccggcgcgcacgcgaacatactcaccggagaacaggacggcgactggctgtccggcaaactgcgctaccgcgacgactcgcccttcgccgactggctgcgctcgcagacccaggacgaacgattcgacgccctatgcgtcaccgccatcgacgacaccgaccgcaccaaccgtcaggtgcaggccgacggtcagatcaaatccggcgcacgcggccagcacggcaccaaagaccgcgcccaggtcatcggattcgtcaacgaaacctacctcaacgcgctcgcagcgcaggtcgacgccgcccgcaacgcgctcagccaagccgacaccgactacacggccgccaaaacacagtccgataacctccaccgcgaactcgaactggccaaccagctcgcctacacgtcctgggagcgcatcgacatcgccggcgcgcaacggaccatcacggacacgcaggacgccatcgcatccatcaaaaacgatcccaagctcgccgaactcgccaaacagcgcgacgaactgaacgccgaactcgaccgtgtggaacgccagcgcatcgaatccgaccaggccgcggcccgcgccggcagcgccgtcgaagcggcgctcatctggctgcgcgaccatgccgacaccggcacgacggacgccgccggtgccaccgccgacaatgacgatgacgccgcgtccggcccgctgccggacgaagtcacggcggcgctcgccgaatcctacgacaaccgattcgccggactggcggacgccgccatgcgcgcgcacatgatcatcggcgcgggcgcggcaggaacgcaggcaccgggggagagcttccccgaacgcaccatcgccggcatcggcaaggacatggcctcccgcatcaacctgctgaacggccaggccgatgccgcacgcaccggcgtcgaatcgaagatgagcacctacatcgcgctctacgcggccgacgatgattcgctgaccgccagcgtggaggactaccggtactatctcgacgaactcgccagcctcacccagctggccgcggttgccgccaccgacgccgaataccggcgctgcctcgaacagctgctcaggagcttcctgaccatcaaacgcgccatcgacacggatgccagcgacatccacgaccagcttgaccgcatcaacgccatgctcaaaggccagcagttcggtcccaagcacggcagcctgtccctgcacgcggacgtgcgccgtcccgagcgcaccttctgggcgcagctcatccgcgtcatcggcaccctgaacgattggaaatccgccgacgtcaacgattccgacgcctcgcgcaaggctttcgcggcctgcgcgccgatggtcgggctgctgcgcgccgaactcgcgcaggtcaaggacgcgaacggcgtgaaaagctacggcgcccgcaacctcgacccgcgctgccgctcgtccttctacgccatcgtgcatcatgccgacggcccggatgaacgcatcacctccaccggcggccgttcgggcggcgccttgcaggagctcacctcattcgtatacggcgcggcgctcatctacctgctcggcggcggcctgaccagcgagccctcgtacaccacgctgttcctcgacgaggcgctcatcaaggccgacggccgttacacgcagcgcgccctcacggtgctgccgcgcctcggattccaggtcatcgtctccgctccggaaagcaagaccggcgaaatcctcgaggtctccaccaaggcctacgtgacctacaaggaccccgacaccggcctcacctccctgcgcgaggccgtgctgcatcagaatgacatggacgatgaatcatcgtcggatatattgaaggatgacggggttgccgaatga

SEQ ID NO: 45230 - DNA, 1185 bp, Bifidobacterium longum subsp. longum; identical to SEQ ID NO: 42401

SEQ ID NO: 45231 - DNA, 1353 bp, Pseudomonas aeruginosa WS394; identical to SEQ ID NO: 42083

SEQ ID NO: 45232 - DNA, 750 bp, Pseudomonas aeruginosa WS394; identical to SEQ ID NO: 43206

SEQ ID NO: 45233 - DNA, 3306 bp, Pseudomonas aeruginosa WS394; identical to SEQ ID NO: 44209

SEQ ID NO: 45234 - DNA, 1158 bp, Pseudomonas aeruginosa WS394; identical to SEQ ID NO: 44210

SEQ ID NO: 45235 - DNA, 1386 bp, Collimonas arenae
gtggtggtggcttgcgtgcgtgccttgtacgagcgcctacatggccccagtgctgactacggccagaacctgacgcgcgacggcttgcgcgacctgctgttgccggtggtgcaggaatcgcgccagaacatgctgcagcaagaagaagcggcggccgaactggccttggccgatgacgatttcatcccccccggcgccgacgaccagcagagcagcagcgcgctgctgcgcaccttgctgcgcgacggctggctggaaaccttcggcgaccgcgccggcctggtgaccgcttaccgcttcacccgtgccggcaaattgtttgcagaagcgttctgggcaatcgaccggcgcagcgcccgtactcgccagcgcaatgtgcgcagctgccgcaatgcgctcaatgcagccttgcgcaatgtcgatgcctacgacctgatcgacgcctacgactatgccgagaaagtcatcagcgatttgtcggaaggggtcgactatttccaggagctggtgcggcgcctgatgctggaagcgtcgcaaacgccatgggacggtttcatggagtttctcgaccgcttcgaaaaggaattcaagaaacaacttaccgccgacagcatcgaacggcatcgccaggcgatccgcgatgtaatcgcccgcctgcacagcctggaagaagacaaggcgcgggcgctggaagatcagctgaacgatatcgcgcgctgggccagccaggaacggcaagggccgtcgaccctggactggatgctggaccgcatcgaagagatggttgaagctgcctgcaccaccaagcatccggaattgatcaaggccatgagcgtctacatgcagcgcgctgccagcattgtgcagcaggcgttgatgctgcgcggcggccagacccgccaggcctacagcgtggccatcagcaagaccgccaaactaagcggggcggcgcaggatgccttgctggagcggataggcgcggcgattgccccggctgaaatccgtttgctggatcctgccagcttcaaattgcgcagcgcctcgcaacggcgcaaggcgctgactgtcaccgcgcaaccgaaggtgacgcgcgactcccgcttggcagccgccatgtatcgcgctgaggccgatgcctttgcgctgtccaacgatgacatcgtgcaccgtatccgcgctgaattgcgcctgcgcgaccggccgatccgtctgtcgaccctgccggtggcgactaccaccgacgtgctcaacaacatgcagatcgtcgaagcggtgcgcggtgcgcgcgacgaacggctgaccgtgcagaaactgccgagcaagctctggaacgagttctatgccggcgatgactatcagatcgagatgaaaaatgacaccgagtag

SEQ ID NO: 45236 - DNA, 723 bp, Collimonas arenae
ttgaacgagcaactggcgttgcatgccttgccgctggaacgctttcgcgagattgccaatcgcttgttcgccgccggtatcgtgattcgtgaagaagacggcgtcgagcagcgcttgtatgacgatgcacggcgtatcgaagccaccttgcaggattatttccagctcgccggtttccgtcttgaacacaatctgaaaggcgaatttttccgcctgtatgcgccgggcgccgaagtgcccggcatgccggaagacggcctggatccggtgccgggtttgcgcgcgcggctgtcgccggattttgtcgctgcggcgttggcgttgcgcttccagtatcagcaaggcttgtcggaaggcggcaatcggctcaccgactcgggtgaagtgctgacccgttttgaagaattgtctgccacgttgcagacgcagttgaaacgtgcgctgccgccgaccagcgttgaacgccagcgtttgctgaacgatctcaagcggcatcgcctgatcaggctggcggccaatttctcgatggacgacgaagacgccttgctggcgatccggccgaccatcctcggcatcatcagcgacgacatgctggaagctgcgctggaatccgaaccgctatcggtcgctgagcgggtcgagggtgagcaagccggcttgcaagtgatgttggatgcggcggatgcggcggaagacgaaagcattgaaggaaacctcgaatga

SEQ ID NO: 45237 - DNA, 3627 bp, Collimonas arenae
atgaagctggacaaactgatcctggtgaactggggcgcgctgcgctcgcaggaatacccgatgggcaatatgactttgctgaccggtcccaccggttccggcaaatcgaccatgctggatgccttgcaaaccgtgatgacggcggtctaccagaatattttcagctacaaccccggacaggatgaaactacccagggcgcgcgcaacggcaagaccaaacgcaccttgtggtcctacgtggttggcgccgaagataatttgttcgcccgcccgaacggcgcgcatggctatatcgccgcggtattcaaaccgagcgagggtgaagaagggcgcgagttcaccgcgctggtcgccgcctcggcccgcgtcgacggcgccggcgaacggcgtcaggcggtatcggaaaaactggcgttgctgatcatcgatggcgtcgcattacaattgggcgatctgacctcgatcgagatcgacggtggcatggcggtggtggcggtggaaaagatcgagcatcatttatctggaaaataccgcggcgtcaccaatttccgcgacagcaagcgcgaatacctgtgccagttatacggccgcttccgtggccagaaaaccgtgtccttcgccgaagcggaaagcgccgcccgcgcctggagccagtcgatcgcgcacaagcccatcggcagcgttgatgatctggtcaagcaccagatcctggaactcgacaccacgcaactatcgcaacgcatcggccagatcagcaagctgatgcgccaggtgaacgagttgcgcaaggagggcgagcgcctgagcgataacgtcaagcgcctggataagctcggcaaggctgtcggtgacaccgcccgcgcgcatcaatcggctagccagtcacagctgctggtatcgtcgttagccctgcgcgaagaccagcgccagctggaagcggcaacgtcggcgatcgagggtttgcaagcgctgattgacgaagaaaccgacagcgccgacaaactggagcaggatcgcaacgccaagaaccgcagcctgacgcagatccacgcgcaaatgatgggaattccggccgccgaacaaaagacccgcattcaacaccagatcgaacaatgcgacggcaagatcaaagcggtgttcaacgccttgcaacataacgcatcaaccgcccagcaactggatacggcggcgcgcagcgtagcgggcatgcagattccgccggagcaaaaggaaattgccgatgccgcgcgccaggtagtgctggcgctggccgccgccggtacgctggatatcgccacgcatctgcgcagcatcaatgaattggccagggccgaagaggttgacgtcttgaaatcgctgatgctggtcaacgactttgaaggtgtcgatgcggccttggtgaaattgcatggtgcgctggctggcactgaaaagagtttcgtgtcggccttgcacacccagatcgcgcaattgcgcgccggcgagcatgaagccttgcggcgcgagaaagacaccgcttcacgcaaggccaatctggccgaaggcggcgctgattatccgccgcatatccgtcatgcgttgaaagaattccgttccgagctcggcgcggcgcgggcgcaggtgctgtgcgacctggtggagccggtatcagccgattggcaggcagcgatcgaaggctacctcggcggcgcgcgtttcaacctggtggtggatcaggcatgggaaggaaaagcaatcgatttcgtccgccagaaaagattgcgtgccaatgtgatccagggcagcttctgcctgaaaaacctgaaagtcgaaagaaccgccagcgactcgattattcacgaactcagcaccgagcatccgatcgcccatgcctatctgcacgaccagttcggccaggtagtcaaggttgccgataccgaagcgctgcgccatacatcgcgcggtttgaccaaggacggcaaaggcagcggatcgcgcaccatgttcaccgccgataccgatatgctggtattcggccaggaagccaagcgcctcgccaagcagcgcgccgaacaagaacatgcgcaagccgagcaggaactgacgcagatacgcgtgcaattgcgcgagttgcaaggcgcgctggcgctgatgggacagctgcaatgtccgtcgtttgccgctatcgccgatctggaaagcctggcgcggcagctcgacgcggcgcgccaggatctgagccggctcgacctgacacaggtcagcaagctggaagacgaagcgcaggcgctgagcatagaaatcacggcgctggaagcgcgcaagaccgcttgcagcaagaatatcggcggccatgaaaaagcgatccaaggtcatcaggcggcaatcactcgcctgcatttcggcatgggcggcaagcaaagccgcgtcgacgccgataccgagcgcctgcgtgacctgtgcatcgtcaacggcagtttgtctttcactgccgtcaccgacgaagtggcggcttgggtcaacgacagtacgtattcgcaatcgcaagcgtcgaacaatgtcggtaagcagactgctctcagctggcagttgtacggcgacgcacgcaacgcgctgggcgaatatcacgcccatgcccggatcgacgagcgctttgaaacagcgcaaggcgatgatctgcgcgatggcgacttcacaccgctgtacgcgatgatggtgacgctgcaagaacgcacccgcgcgcaattgacgcggcagaaagacatcggcctgatcaagaacctggaacagttgcgcaccgccgaatcatcgttcaacgatgtcttcaccaagcagttctgctacgaaatccgcaatgccgtcgataccggtgtgcgcaccttgaagacgctcaatactgagctcgataaactcaaattcggcaccgacaaattccgcatcgactggtcggagtggataccggagttcaaagcctattacgacttcttctgcgccacctcggaaatggcggatacccaggaagccagcagcagcttgtttgccgatcccgttctcagcgccgacaattgcgtggtgcgtgaccggctggtgcaattgctgttgtcggacgatgaagacaaggcggtcaaggaattgcagcgtgtggccgactaccgcaattaccgccgctacgaaatctacaaggaatccgataccggttcgcacgtgcgtctgtccgagtggggcaccggttccggcggccagctggaaacgcctgcctacatcatccatgccgcggtggtgaccaaccgcctcaaacgctttgagaaaggaaacagcctgcatctgctggtcaacgacgaatcgttcgccaagatggatgaagggcgcgcacgcgatgtcttgaaattcttgcgcgacaatctcggcatgcaactgatctgcgccatgccgaccaaacacgccggtgcgatcaaaccggagttctcgcgcgaatggagtttcagccgaaccgtcgccgatggcaatggcgaagtcggttttgtttcagagtcggatgaacgcgaactgcgttcggacaaattgcgtgagttgtgggaattgcggcgcgcgcaggtgcgtgaacaggctcagattaattttgaggcggcggaacaggccgtggcatga

SEQ ID NO: 45238 - DNA, 1470 bp, Xanthomonas axonopodis pv. phaseoli; identical to SEQ ID NO: 45047

SEQ ID NO: 45239 - DNA, 702 bp, Xanthomonas axonopodis pv. phaseoli; identical to SEQ ID NO: 45048

SEQ ID NO: 45240 - DNA, 4023 bp, Xanthomonas axonopodis pv. phaseoli; identical to SEQ ID NO: 45049

SEQ ID NO: 45241 - DNA, 1470 bp, Xanthomonas fuscans subsp. fuscans; identical to SEQ ID NO: 45047

SEQ ID NO: 45242 - DNA, 702 bp, Xanthomonas fuscans subsp. fuscans; identical to SEQ ID NO: 45048

SEQ ID NO: 45243 - DNA, 4023 bp, Xanthomonas fuscans subsp. fuscans; identical to SEQ ID NO: 45049

SEQ ID NO: 45244 - DNA, 1470 bp, Xanthomonas fuscans subsp. fuscans; identical to SEQ ID NO: 45047

SEQ ID NO: 45245 - DNA, 702 bp, Xanthomonas fuscans subsp. fuscans; identical to SEQ ID NO: 45048

SEQ ID NO: 45246 - DNA, 4023 bp, Xanthomonas fuscans subsp. fuscans; identical to SEQ ID NO: 45049

SEQ ID NO: 45247 - DNA, 1470 bp, Xanthomonas axonopodis pv. phaseoli
atgaagcaccaggcccgtatcgccggctatcggcaactgcgcgagcagccggtatggaaactgcttgccgccgaccacgcacccgaactgatcggcctgctgcagacggtgctgatggatggcgaacgccgcctgccttcggcggtgttgcacgagcgtttgcagcgccagctcgacgccttgcgcgctgacgagctctcgcgtgaactgccgcgcaccgcacaggcgtatcttgcgcattggttggcacagggctggttggaacgccgcctgccggaaggcgcagccgaagaagaatacgaactctcgcgtgccgcgacccaggccatccgcttcatcgtcggcctgcgcgaaagcagcagcagcgccaccgaaagccgcctgtcgctggtgatccagcaactggtgcagttggccggacagaccgaagccgatccagagctccggctggccgcactgcgcgacgaacgtgcgcgcatcgatgccgagatcgaacgcgtggcgtccggccgcgtggcggcgctggatggcaagcgcgcgctggaacgcgcgcgcgacctgatccatctctccgacgagctggccgaagatttccatcgcgtgcgcgacgacttcgagcagctcaaccgccaattccgcgagcgcatcatcgacgacgaaggcgcgcgcggcgacgtgctcgaacaactgttcgacggcgtggacgtgattgcagacagcgaagccgggcgcaccttcgaggcgttctggagcctgctcaacgacacccagcaaagcagccagctcgaccaggcgctggatgcgctgcttgcccgtgggtttgcccgcaagctcgatcgccgcgaacgcgccttcttgcgcgggctcaccggcacgctgctggagcgcggtggcgaggtgcacacggtgatgcagcatttcgcgcgcagcctgcgcggtttcgtgcaaagccgtgggtatctggaacagcgccggctcaatcaattgctcaagcaggcgcagggcgaagccttgcaattgcgcgacagcctgcacgccaccaccgccaccggctatacgcagccgctcagcagcagccgcctgcgctcgttgtcgcaatggcggctgcacgatccacggctcacccaggtcgatggacgcgtgcaggccgccgacgcggccgagatctcgctggacagcgtgggcgatctggtcgcgcaatcggagatcgatgtgcgcagcctgcgcaacgacctgcatgagctgctcggccaacgcccgcggctgacgatcggcgacgccttgcaacaacgcccggccgtgcagggcctgggcagcgtgatcggatacctgtcgctgggcacgcgccacggcatggtgatcgaaggacagatggaaacggtgcaatgggaaggcagcgacggcgccgtgcggcgcgcacgcattcccttggtgtggtttacccgggagaaacgcaatgaactggtctga

SEQ ID NO: 45248 - DNA, 702 bp, Xanthomonas axonopodis pv. phaseoli
atgaactggtctgaggacactggcctatacaccgacgaggacaccggggcgccggccatcgacgaccgcatgccgatggcgcaaacatccggtgccgagccgcgcggcgagctgtttttgggcgacaccggcacgctgtcgttcgatgcgcggcgtgcgctgtgccagttgctggcagggcccagcatcgatgcgcaacgtcacggcgcgctgtggccggcgttgttgcgcaacgaggtggcgatccgccaggtgctgtgcgagctgtttctggagttggtgctcgaccgcgagggcggggtggcctttacccgtcaggccgacaccgcagagctggaatcgcccacgctgctgcgcagtgcgccgctgacgtttatcgagtcggtgttgctgctgttcctgcgccagcaactggccgaggccgacacgcgcggcgagcgtgcagtggtggacgaggcgcagttggtggaagccttgtcggtgtacgaaaagaacgtgtccaccgatcgggcgggcttcgcgcggcgggtgatgacggcgatcggcaagatgcgcgacaaccagttgctgtcgcgcttgcgcggcagcgaggagcgctatgaagtgtcgccggtgttgaagctgttgttttcggcagaagatgtgcaggccttggtggtggcgtatcgggagctccgtgagggcgaggttgcgctggattga

SEQ ID NO: 45249 - DNA, 4023 bp, Xanthomonas axonopodis pv. phaseoli
atgaattcccagtccaatctgtcgccggcgcagccgggtgcctccttgtttgccgagacgctcgccgagcaacgtgcgcagcagttccgcatgcggcgcttgcaggtgcacaactggggcaccttcaatgggctgaccgaagtgccaatcgcgcagaagggcttcctgttcgttgggcgttcgggctcgggcaagtccaccttgctggatgcgatgtcggcattgttgacgccgccgagcatcgtcgacttcaacgctgccgcgcgcgaagccgaacgcagtgggcgcgatcggagtctggtgtcgtatgtacgcggtgcgtgggccgatcagcaggacagcgcgtccggcgaaatcgccacgcaatacctgcgcaagggcgccacctggaccgcattggtgttggagtacgcgaacgcgcatggccagacggtgagcctgatccggttgttctggatcgccggcagcggtaacgcggcggccgatgtgcggcgtcactacatggtcgcgccacgccgtttcgacgtggcgaccgagctggatggcttcgatctcgacctgcgcaagctcaaggcgcgattgggcgatgaagttgcgcatttcgacggcttcgctggctatgccgaacgcttccggcatgcgctgggcatcggcaacgagatggcgctgcggctgttgcacaagacccagtcggccaagaacctgggcgatctcaatgcattcctgcgcggtttcatgctggacgagccgcggaccttcgaagcggccgaccggctggtggaagattttgccgagctcgatggcgcgcaccatgcggtggtcaccgcccggcgccaggtggaaaccctgacccctgcgcgcgagcaccacgcggcgctgatggcgctgcgccacagcgtcggcgagttgcgcgagttgcagctgggcgtggacagctaccgcgagcagcagcggctggccttgctggaggagcggctgcaggagctggacaaccaggaccgtggactggccggcgaagaaggccagcgccgcgaatcgctggataaccacgaacaaaaactggtcggcctggagcgcgagcagcgcgccgccggtggcgagcaggtcgaagaactggaacgcgaacgcgcacgcgtcgagcgcgagcgcgacgaacgcctgcgccgccgtgcacagatcgaacaggcctgccgccagctcggtaccgccctggcggccggcgccagcggctttgccgcgcagattgcgcatgcgcagaccgtgctggataacggcaagcacgacgccagcgcgctggacgaggccatcgccgaacgcatgggcgcgcggcgcgacgacgagcgccgctttgccgaaatccgcgccgaactggaggccctgaaacgcgcgccatcgagcatgccggcaccgatgcaggccctgcgcgcgcggctgtgcgaagacaccggcattgccgaggccgcactgccgttcgttggcgagctggtgcaggtacgcgaggaccagacggcctggcgcggcgcgatcgagcgtgtgttgcacggctttgcgcaatcgctgctggtggacgagcggcattacgcgcaggtcagcgaatgggtcaaccgcacccatatcggtacgcgcctggtgtacttccgtgtgcgccgcaacgacgagctgcattcgcggcgggtcgatcccggcgccctgcccggcaagctgcaattgcgcgagcacgcctttaccgaatggctgcgcaacgagctgacccgccgtttcgactacgcctgcgtggacaacgccgcagcgctgcgcaacgccgaccgcgcaatcacccgcgagggccaggtcaagcatcctggcgatcgctatgagaaggacgaccgccacgcggtcaacgaccgcaagcgttggctgctcggtcacgacaaccgcgacaagctcaaggtgttcgaacgcgaagcgcagacgctggctcagcgcatcgccagttgcgatgccgatgtggcagcgctgcgcaagcagcgtgagcaggatcaggaacgccaactggccgcgcacaccctggtggagcgcgactgggacgagatcgacgtcggccccaagctgcagcgcctgagcgatatcgacgaacagttggtgcagctgcgcgaaggcaacagcggcctgcgtgcgctcggccaggccatcgacaccgcacgcaccctgcgcgaccaggccaagcgcacctacgaagatgtgcggctggagcgcgcgcaactggcgcgcgagcgcgtgcggctcgaacagcagcaggcggcctgcgcgggccgcgccggttccgccacgctcacgcccacccagttgcagggcttgcgggaacgacttgccgcattgacgccgctgtcgctggacaatctggaagcgcatttccgcgtggtcgaacgtggcctggccgagcagctgaccgacagccagggccgcgacagccggctcagcgcgcagttgctggagtgcttccgcaagtattgccagcaatggcccgaagacagcggcgatttcaccgtgagccttgccagcgccgacgatttcctcgcgcgtctggaccggctggaaagcgatggcctgccgcgtcacgagcatcgtttcttcgacctgttgcagacccagagcaagaacaacctgctggccttgcagcgccacaccgccgaagcccacaagggcatcaagcagcgcatggacgaggtcaacgccagtctggagcaggtgccgttcaatcgcgacaccgtgctgaccatcgaggtcggcgaccgccgcctggccgaggtgcaggaattccagcagcagttgcgcgcggtgctgtcgcatcaacagaccgaagaccgtgccctggccgaagcgcagttttccaccttgcgtgcgctggtggcacgcctgggcgcgcaggaaccggaggcacgccgctggcgcgaacaggtgctggatgtgcgcctgcatgtggagttcatcggtgtggaactggacgcacagacgcgcgcgcaggtggagatctaccgcagcggcgccggcaagtccggcggtcagcgccagaaactggcaaccacgtgcctggcggccgcgctgcgttaccagctcggcggcgaagacggcgaactgccgcgctactgcgcggtagtgctggacgaagccttcgacaaggccgacaacgaattcaccgcactggcgatgaatatcttcgagaacttcggcttccagatggtggtggccacgccgttgaagtcggtgatgaccttggagcccttcatcggtggtgcgtgctttgtcgaaatcagcggccgtcataactccggcgtgttgctgatcgaatacgacgagcaggcacagcgattgaagctgccggagcgctcgcgtggcgatgagccggcagttgccgatgccactgacgctgcgccgtcgatcgaggctgcggccgagtcagcacgagtgcagggcgctgcaagcgcagatggcatggcaaccaacggcgtcccaatgcacacggcatcgcctgcgacggaggagaccccgcccgcagcgcaggaaacgcagactggtcagcgcaagccggcagtcgcgacgacgagcaagcagaacaagaccgccaagaccgcatcttccacgcgtgctgcggcacagcctcaagcaaaacgcccgaagaaatcgccttcgcgcactcctgttctggccggcaagccggcatccaacaaacgcccagcgggcgtgccggcggtgtcgtcaggagtcgcatccaggtccaacgtgggcaagaccactcggtcttcaaaaacgccgggcaagccgattgcggccacaagcgcatccaacgccacatccaggaaggtcgccgccgcatctgcggcattgaaaactgccgcagccaagccacgtgcaacagccacatcgactggtcagccagcgcgcggcgccggcaagacaacctcgacgcgcgcggtggctaaaccgtcaccggccacaacgcgcggcgccaaggcaggcgccccgcggtcgcgcggcaagcgctga

SEQ ID NO: 45250 - DNA, 1434 bp, Saccharomonospora viridis
atgctcgccctcctccatcaaacacacgcgccgttcgtggtgacggcgctggcgatggtcttcaccgcggagcggccgagcgtggcggtggccgacgcgcacgcggagatcgacgacgcgctgcagcagttgcgggccgcgggttacggcgaggacgacaaccagccgctgcccgccgggaacgcgcgggacctgtgccggcagtgggtgcaggccgggtggctggtgcggcacgtctccgacggcgacgtcgagatgtaccggctgtcggcgcacggcgtgggtgcgctcgaggtcgccggccgggtcggcggggtgcgcaccagggtgtcggaatcacgggtcaggacgctgctgcaggcgatcgagcggctcgcgcaggacgccgatcccgacgtcatgtccaggatttcgcgcctgcacgaggagatcctgcagcggcagcgggaactcgcccgactggaacgcggcggtgaggtcgagacggtccccgacgagcagttgctcgaagccgccgagaacgtgctgcacctggcgcgggaactgcccgcggacttcgcccgtgtagccgagtcgatcaaggccgtgcagcgggacgtcgtcgccgagttacggcacgacgtgcgcccgaccggcgaggtcctccgggagtacctggaacgcggcaaacagattttggacgcgacaccggagggccgggcgttcgcgggagcgttgcggctcatcggtgatccggcgcagatccacaacctgtggagccaactgcgaacggtgcttcggcacaagttcaccgagctgctgtcggaccagcagcggcgggagctcgccgacatctcgcgccgggtcgaacagggcgtcaaggaggtgctggccgcgcagcggcaggcgtcccacgtcatcaccacccaggtgcgcaaccacgacccgctgcgcgaccgccaggtcgacgagttgctgcgaaacgtgatgtccgaactgcacgagtgggtccccgcctcccgccggggcgagcccgtcgagccgctgcgccgtctcccggtggccgacatcgggcacctgcgccagcggacgagcgagttgcgaccgcctcaaccgcccgcgccgttgcgggaatgggaggagaccgaggacgtgaccaccgccgacaccagggcctggggcggcccccgatacgccgagctggaggagcacctggtgacgttcgcgggcggggaggggagcgtggacgtcgtggcggcgtttcgcgcggcggacgaggacctccggcggccggtcgatctgctcggcctgctggagatcgcccacgacgccgggatgaccgagacggacgaggtcaccacggtcgacacggtccggcccgacgggacccggcgacggttcgccctcggcggtgtggtcgcggcgaacccggctgacaggaacggtgagcgatga

SEQ ID NO: 45251 - DNA, 666 bp, Saccharomonospora viridis
atgagcgaactcgagcacgacgactggtcgaccggtgctgccgccgggttcatcgacccggtcccgatggaggacgatccgactgagctgttcccgggggacacgggcacgctggaggcggacgtgcggcgggtgttggtccaactgctgcgccgcaagttcctgttggccgagaagaacccggcgcagtggcggacgttgctggagaaccagcagatcatcgagtcgcgcatgcacgatttgttcatccggctcgtggtcgaccacgagcggggcgtcgcctacaaacagcaggtgcggtcgagcgagctggacgtgccgatcctgctgcgggacgagtcctacaaccgggccgagacgttggtgctcgtgcacctgcgcaccgtgttccagcgggagcgcggctcgggggagacgtccgcgcgcgtggacatcgaggaactggaacagaccgtgctgacctacttcgatcccgaggaccacaacctggcccgcacgcaacaggaagtccgtggtgcggtgcagcggttggccaccgaggggctactcgtcgaggagtcggcgggccggtatcggatcacaccgctggtggaggtcgtgctgagcacggagaagctcgccgaactgcagcagtggttgcgcgaacggaacgaggccacggcgtga

SEQ ID NO: 45252 - DNA, 3345 bp, Saccharomonospora viridis
gtgagcatgatcgacacgctgttcgggttgatcccggcggcatcacggggccagcagtgggtggcccgcgacctgcaactggtgaactggggcggctacgacggctaccaccgggtgcggttcgcgcccggagcgaccctgctcagcggtggttccgggtcgggcaagtcgacgctgatggactcctacatcgcgttgctcatgccgcacacgacgccgttcaacggggcgtccaacggcggtgtggtcggcaggccgcgcggcaaggaccagcgcaacatcctgtcgtatgcgcgcggcaagctcgacgagtccagggccgacggtgagacgaaggtgcgggtgctgcgcggcgacggctgcgacacctggtcggccatcgcgatgacctgggtcgatcacaccggcgcggagttcaccgcgctccgcgcctggtacgtgccggcggcggcccgcaccctcgaggacgtcgtggcggtgcgcgccacctgcgaccggcactactgtctgcgggacctggagggcccggcgggcaagcggttcgcccgcgccgaggtcgaggccaccggcgtgacctgcttcgacaccgaccgggacttcaccgcccgcctgcactccacgctcggcatcggcgccgcgggcgatggacacaaggcggtcgccctgctcggtcgcatccaggccggccagcagatcaccaccgtcgacgccctgtacaagacgatggtgctggaggaaccctccactgtggccacggcggacgcggtggtgcaacagttcgacgagttgtccggcaccagacagcggatgatcgtcgcgcggcagcaggtgaaggcgttgacgccgatccgcgaacatcgacgcgccatcgacgacgcggtggagcgactgcggctgatcgacgcggtcggctcgttcaccgaggagtcgtcgcccgcggcgttgtggtgtcacgaacgtcgactcgacctcctgcgcgccgccgaacaggacctcgcccagcgacaccgtcgggcgaaggccgaactggcggagaccgaggctctggtcaaagccaccgaagcacagtacgagggggcggccgaggcgcttcgctcctccgggggtgaccgcctggagaccgcgcttcgggagttgcgcaacgtcgaccagcggctggtcgacgtcgaacgagcacggaaccggttggaccgggccctcgaggacatcggcgccacggtgtcgaccgccgacgatttcgccgccctggtggagacggcgcaccgcaccctggccgacgcggaggcccggcgcaccgctcagaaccacttcgccgaggccatggcggagaagaaacaggccgagaccgagttggccgagttgcgcgccgaacacaaggcggtcaagtcacgcaggggcaacatccccaccgagttgcacgcggcgcgcgccgccttggccgaggccgccgggctcacgcccgacgagctgccgttcgtcggtgaactgatcgaggtgagcaccgagttcgagccgtggcgggaggcgttcaacctggcgctcggcgggttcgccacgttgatgctcatcgacgtcggacgtctgaacgcgttccgggaggccgtcaacaaggtcaagacgactcgacgcgtgcacttccagggtgtgcgcacgggggtgcgcgacgaggtcacgctcaacccgaagacgctccccggcagactggactatcggccgtcgccgttcaccgcgtggctcaaaagcgaactcgcccgccggttcgactacgtctgtgtcgacacgtcccgccagctttcgcagtacaccaaggcgctgacgatctccgggcagacgtcggagcgcggcggccggggcgcgcacggcggccacggccgcgccaacgtgctcggcttcaccaacgacaggctgctcgccgacctcgaccaccggatcgacctggcgcgccgacgcctggaggaggccgccgcgtgggtgtcgcgggcggaggaggagctcaactcgttcgaggcccgacgggcggcctaccggaccgtgacggagttgtcgtgggaccaggtggacgtcgcctcgctccaggcggaacgagagcattggaacctcctcgtcgaggaggtccgcgcgggcaacccgaagatcgaccagttgcaggaacaggtcgaggagctgaggcggcgggccaaggaactcaccgagcgggtcggtgagcagaagaagaccgagaaggaactcgccgaggcgtgggcgtcgatcgtcgacgaggtcgaccgcgcccaaaccgcgctcgatgtggccgtgcggacgggcacggtcgtgcttccggaacaccgggagtatctggaggagctgttctcgggtgcctcggacgacggcccgatgacggagctggcggagttcgacgcggcggtgaaacgcgccaccgaccgactcgtcaccgaccgacgcgcggcgaccgagacgatcgctcggtcgaggaaggcgttggaggacacgttctcgacgttcctcgaacgctggccgaacccgaacctcggcaccgatccggacgcctcgtatcgcgacttcgaccgcattctcaccgacctggagaccagcggcctgcacgagttggaggccgaatggcgcgacagcctgctgaagttgtccggcaacgacctcaccgccttggacagtgagctggccgccgcggtccgcgagatccgcgaccgcatcgacccggtcaaccgcatcctcgccgagctgccgttcgccgatgacaaccaccggttgcgcatcgatccgcaggagagccactccgcggtccgcgcccggttccgcaaggagttgcgtgacgtccgcgccctcatcgacagcgcgaccacggacgccgagcgggaacgcgcgtatcaccgcatggccaaggtgatcgaccggatccgccgcacggcccccgatttcgccgacctgatcgacgtccgcaaccatgtgcggatcagcgccgagaagtgcgacctcgacggcaaccacgtggccgtgtacgaccacatcggggagaagtccggcggcgagtcgcaggaactgatcgcgttcatcgtcggcgccgcgttgcgctaccagctgggtgatgcgggcgccacccgcccccgctacgccccggtcttcctcgacgaggcgctgatcaaggccgacgcgcgcttcaccggccgcgccatcggcgcgtggcgcgggctcggcttccagctgatcatcagtgccccgaacgacaaacacagcgcgatcgagccccacgtggacgcggagtacctgatcctcaaaaactccgagggccggtcgtgggcgaagcccttggtgggggctccggacgcatga

SEQ ID NO: 45253 - DNA, 1260 bp, Saccharomonospora viridis
gtgggcgaagcccttggtgggggctccggacgcatgaacacgctcgtcaccccggaggatgcgtgcgcggagctccgccgcagaatcgatcggaagtgggcggaagccgtgtgcacgggcgtgaatggcggcgagacagtcatcttctccgtgccgctacgtcccggcgtgacaacgggaaaagccgtggagaggctgggatacggcgtctggcacgagtggcgcatgcgctggcgtgacgtcgccgaccgactcccccacggcgtgtgcctggttcatcgcacgctcagcattcgaggagtcgccggtgacttccccgccaggctcgtcgcggatctcgacggcggcgtcgcgttcctcgccgagttcggtgccgaaccgcccactgtggatgtcgaacgggctcgccagctcgcctcggcgctgcggtccgtcgatgcggtgctcaccccggccacgctccgcgcggtccaccggcttcaggcgcacgacgtgggagtgctgcttcgcgcggtggactggctgcgtcagcaccctgacctcagcgcgtggaccctgcggcagctcccgatccggggaatgcacaccaagtggctcgactcccacggcgcgctgttacgcgaggtctccggaagagacgtccgcgcggaggtacggcctcgaccggcggtcgtgcacctgacctacgtcgatcccggttacttggcgtccggccgtcgcagacacgacgcctggaccaccggagacgtgcacgagatcgcctatcgaccccgtgtcgtgctcgtcgtggagaaccgcgactgccgcctccggttcccgcaggtacgcgacacgatcgtggtcgagggtggtggcaaggccgcggccgccctcctcgcggaggtgccctggctccgggccgccgaacacgtcgtctactggggcgacatcgacacggacgggtacgcgatcctcgaccgattccgtgccgcgctggccgagcccacaccggacggggctcctccgaaatcggtcagttcgatcctcatggacgacaccgaccttcaccgctatgccgagcacggcgtcaaccacgacaaacacggtcgtcccctgacatcgtcggcggaggtcccgccgcacctgaccgaggccgaacgcctcgcctacgacaccatcgcgaccgcgggtcccaccccgttccggcgaatcgagcaggaagtcattcccttcgagcacgccgtggcccgtctgctgcacgtcacgaacagccgggactga

SEQ ID NO: 45254 - DNA, 1470 bp, Xanthomonas fuscans subsp. fuscans; identical to SEQ ID NO: 45047

SEQ ID NO: 45255 - DNA, 702 bp, Xanthomonas fuscans subsp. fuscans; identical to SEQ ID NO: 45048

SEQ ID NO: 45256 - DNA, 4023 bp, Xanthomonas fuscans subsp. fuscans
atgaattcccagtccaatctgtcgccggcgcagccgggtgcctccttgtttgccgagacgctcgccgagcaacgtgcgcagcagttccgcatgcggcgcttgcaggtgcacaactggggcaccttcaacgggctgaccgaagtgccgatcgcggagaagggcttcctgttcgtggggcgttcggggtcgggcaagtccaccttgctggatgcgatgtcggcactgctgacgccgccgagcatcgtcgacttcaacgctgccgcgcgcgaagccgaacgcagtgggcgcgatcggagtctggtgtcgtatgtacgcggtgcgtgggccgatcagcaggacagcgcgtccggcgaaatcgccacgcaatacctgcgcaagggcgccacctggaccgcattggtgttggagtacgcaaacgcgcattgccagacggtgagcctgatccggttgttctggatcgccggcagcggtaacgcggcggccgatgtgcggcgccactacatggtcgcgccacgccgtttggacgtggcgaccgagctggatggcttcgatctcgacctgcgcaggctcaaggcgcggttgggcgatgacgttgcgcatttcgacggcttcgccggctacgccgaacgtttccggcatgcgctgggcatcggcaacgaaatggcgttgcggctgttgcacaagacccagtcggccaagaacctgggcgatctcaatgcattcctgcgcggtttcatgctggacgagccgcggaccttcgaagcggccgaccggctggtggaagattttgccgaactcgatggcgcgcaccatgcagtggtcaccgcacggcgccaggtagaaaccctgagccctgcgcgcgagcaccacgcggcgctgatggcgctgcgccacagcgtcggcgagttgcgcgagctgcagctgggtgtggacagctaccgcgagcagcagcggttggccttgctggatgaacggctgcaggagctggacaaccaggaccgtggactggccggcgaagaaggccagcggcgcgaatcgctggataaccacgagcagaagctgctcggcttggagcgcgagcagcgcgccgccggcggcgagcagatcgaagaactggaacgcgaacgcgcacgcgtcgagcgcgagcgcgacgaacgcctgcgccgccgtgcgcagatcgaacaggcctgccgtcagctcggtaccgcgttggcggccggtgccagcggctttgccgcgcagattgcgcatgcgcagaccgtgctggataacggcaagcacgacgccagcgcgctggacgaggccatcgccgagcgcatgggcgcgcggcgtgacgacgagcgccgctttgccgagatccgcgccgaactggaggcactgaaaaaagcgccgtcgagcatgccggcaccgatgcaggccctgcgcgcgcggctgtgcgaagacaccggcattgccgaggccgcgctgccgttcgttggcgagctggtgcaggtacgcgaggaccagatcgcctggcgcggcgcgatcgagcgtgtgctgcacggctttgcgcaatcgctgctggtggacgagcggcattacgcgcaggtcagcgaatgggtcaaccgcacccatatcggtacgcgtctggtgtacttccgtgtgcgccgtaacgacgagctgcattcgcggcgggtcgaccccggcgcgctgcccggcaagctgcaattgcgcgagcacgcctttaccgaatggctgcgcaacgagctgacccgccgtttcgactacgcctgcgtggacaacgccgcagcactgcgcaacgccgaccgcgcgatcacccgcgagggccaggtcaagcatcctggcgatcgctatgagaaggacgaccgccacgcggtcaacgaccgcaagcgctggctgctcggtcacgacaaccgcgacaagctcaaggtgttcgaacgcgaagcgcagacgctggcgcagcgcatcgccagctgcgatgccgatgtggcagcgctgcgcaagcagcgtgagcaggaccaggaacgccaactggccgcgcacaccctggtggagcgcgactgggacgagatcgacgtcggccccaagctgcagcgcctgagcgatatcgacgaacagttggtgcagctgcgcgaaggcaacagcggcttgcgcgcgctcggccaggccatcgacaccgcacgtaccctgcgcgaccaggccaagcgcacctacgaggatgtgcggctggagcgcgcgcaactggcgcgcgagcgcgtgcggctcgaacagcagcaggcggcatgcgcgggccgcgccggtaccgccacgctcacgcccacccagttgcagggcttgcgggaacggcttgccgcattgacgccgctgtcgctggacaatctggaagcgcatttccgcgtggtcgagcgtggcctggccgagcagctggccgacagccagggccgcgacagccggctcagcgcgcaattgctggaatgcttccgcaagtattgccagcagtggcccgaagacagcggcgatttcaccgtgagccttgccagcgccgacgatttcctcgcgcgcctggaccggctggaaagcgatggcctgccgcgtcacgagcatcgtttcttcgacctgttgcagacccagagcaagaacaacctgctggccttgcagcgccacaccgccgaggcccacaagggcatcaagcagcgcatggacgaggtcaacgccagcctggagcaggtgccgttcaaccgcgacaccatcctgaccatcgaggtcggcgaccgccgcctggccgaggtgcaggaattccagcagcagttgcgcgcggtgctgtcgcatcaacagaccgaagaccgtgccctggccgaagcgcagttttccaccttgcgtgcgctggtagcgcgcctgggcgcgcaggaaccggaggcacgccgctggcgcgaacaggtgctggatgtgcgcctgcatgtggagttcatcggtgtggaactggacgcgcagacgcgcgcgcaggtggagatctaccgcagcggcgccggcaaatccggcggtcagcgccagaaacttgcaaccacgtgcctggcggccgcgctgcgttaccagctcggcggcgaagacggcgaactgccgcgctactgcgcggtggtgctggacgaagccttcgacaaggccgacaacgaattcaccgcgctggcgatgaatatcttcgagaacttcggcttccagatggtggtcgccacgccgctgaagtcggtgatgaccttggagcccttcatcggtggtgcgtgctttgtcgaaatcagcggccgccacaactccggcgtgttgctgatcgaatacgacgagcaggcacagcgattgaagctgccggagcgctcgcgtggcgatgagccggcagttgccgatgccactgacgctgcgccgtcgatcgaggctgcgggcgagcctgcaggagtgcagggcgctgccagcgcagatggcacggcaaccgacggcgtcccactgcacacggcatcgcctgcgacggaggagaccccgcccgcagcgcaggaaacgcagactggtcagcgcaagccggcagtcgcgacgacgaacaagcagaacaagaccgccaagaccgcatcttccacgcgcgctgcggcacagcctcaagcaaaacgcccgaagaaatcgccttcgcgcattccggctctggctggcaagccggcatcggacaaacgcacagccggcgtgccggcggtgtcgtcaaaagccgcatccaggtccaacgtgggcaagaccacgcggtcttcaaaaacgccgggcaagccgattgcggccacaagcgcatccaacgccacgtccaggaaggtcgccgccgcatctgcggcattgaaaactgccgcagccaagccacgtgcaacagccgcctcggtcgggcgaccagcgcgtggcgccggcaagacaaccgctacgcgcgcggcgacgaaaccgtcaccggccgcaacgcgcggcgccaaggcaggcactgcgcaggcgcgcggcaagcgctga

SEQ ID NO: 45257 - DNA, 1356 bp, Escherichia coli
attccccttgaggaagctattcagtctctttccagtattctcattgagcatgtgagtcaggaacagtatgacattaatcaggacaatccatttcttcaggccagtcgtgaactgcgggagtggattaaacgccgtttaattgtcgaacgggatggccgtatttttgctaccgatgcgcttgaggtcgcgattacgtttgtagagtctctggataatcgttttatgacctctacggcttcccgtttgtccaccgttcagcgagaaattgaaaacctggaaacacggcttaatcctaacccggcaaaccgggttgcaaccttacgtcgtcgtatttctgaactggaacgcgaactacaggaggcagaagccgggcatattgaggtgctggaaacgcaccaggcggttgagcatattcgtgaggtctacaatttagcttccagcctgcgggctgactttcgtcgtgttgaagactcctggcgtgaggctgaccgcgctcttcgccaatccattattggtgagcaatatcatcgcggcgatatagtagaacgcctgctcaacgatcaggacgcgctgcttaatacgccggaaggaagagttttcgacagctttcagcaacagctccgtcaatcttctgaacttaaagcgatgagtgaacgattacgtgtgatccttagccatccttctgcttctgatgcgcttaaccgtctacagcgtcacgatctgcgctggctggttaaacgtctggtcgatgaatcgcaaactgtcctccaggctcgcgcccgtagcgagcgtgatgtccgtggtttcatgaaaaccggtcttgctgctgaacatcatcgtgttggtcatttgcttaatgagtttctgaatctggcgttaaaactcgactggcagcgccagatgattcgtaaacaagaggtgccgctacctgccgttggtgtggcggtaacaggcatccccgctattgaacgtttacgttttaaagaggtggatgatgaagcagagcagacgttggatctcagtaatcatgcggcggatttaacgcagattggcgatgatttctgggatgccttcaatggcctcgatcgtgaggtgttgattcagcagacgttgcagcttcttgcaaaagaaaatcgccccgttggcctggctgaactggcggcgctgttacccccggctcacgatctcgaaacattcgccgtctggattggtatggcaagagaagcgggtattgaggttattgattcacagcgtgaatttgcagagcttagtgatggggaaggtcgccgctggcgatttaatctgcccaccaccggtctggaaagtcaggcattaatggatatcgattgggagtaa

SEQ ID NO: 45258 - DNA, 750 bp, Escherichia coli; identical to SEQ ID NO: 42571

SEQ ID NO: 45259 - DNA, 2922 bp, Escherichia coli
ctgggggcgttattgtggtttgattccaccagttccagcgtgacggatatgaaaaggctctggctgttcagcgataatcccgggcagacgctggagcattggctaaacgtttaccatgagggaggtacacgtttgctccgacagatggaaaaagaagccatcgggctctggacatacccgaataaaaagcagtatctggcgcgcctgcgggatttcttcgaggtgggggaaaacgcgtttacgttgttaaaccgggcggcagggttaaaacaactcaacagtattgatgagatttttcgcgagctggtgttagacgatcactccgcctttgatcgcgcggctgaagtggccaatagttttgatggtctgactgagattcatcaggaactggaaaccgctcgcaaacaacagcagtctttacaacctgtcgccctgagctgggagaagtaccaaaagcaagagcgtcaactggctgactggcagacgctggaatcgctgttacccctctggtttgcacaacaggcaaaccacctctggcgggaaaagattaaccttcttaacgcaaggctcgctgaggcacaaaccagcgaagaacagctccagtcacagcttgatttgcaaaaaaaggtggttagcgactgtatgcagcgttatctccaggtcggcggtgccaatattgatgaactgaacgagcgtatcaaggactggcaaaaaacgctcggcagtcgagaggcattggcgcgtcaatatcaacagctgacccgtaaccttggattgccgtctgatctgatccaaccacagctggaggcgaatcagcatgaagccgcggccctatgtgagcagatcgccgttgatataaagttgaaacaggaagaagcgtatcaaaaaggtgcgcttagccatcacattaccgaagagcttcgggaacgggaaaatgaacgcgccgagatcgcgcgtcgtccggattctaaccttcccgcacattatcaggcgtttcgtagcgagctggcaaaagcgttgaacgtggatgagtctgaactgcctttcgtcgctgaactgatacaggttaaaccggaagaggcgcaatggcgcggtgcgattgagcgtgctgtcgggagtaacaggctgcgtattctggttgcgcctgaatcggcacaggaagcgctgcgctgggtaaatcagcgcaacaaccgtctgcatgtgcggctactggaggtcaaattaccgcactctcccgcccggttcttcgacgatggctttacccgcaagctgttgtggaaagatcatccgtggcgagaggccgtcaaagcattactggccgaaagcgacaggcattgtgttgacagccctgaacaactgcgtgacacgcctcatgctatgacggtgcagggattaatgtctggtaaacagcgtttttatgacaagcatgatcagaaacgccttgatgaagactggctgacgggattcgataaccgcgatcgcctgaacttccttgctaaagaaattaccacgcttcaggagcaggttaaaaccgcaaacgcggcatttgagtttgcgaaaggcgaggtggggattttgcaaaatcaggctgcttccttccagaaaatagaacaaattgatttcgatagcatcgatgttcccggcgcgaagagccaactggacgcgctcagggagcggctggaaaatctgacccgcccggattctgacgccattgtagcgaaagcaaaacttgatgaggctcaaacggttgaatctgaactcgataagcagctcagagctgccaataaagtcactaacgtgctggatacagaactcacatcagcccgtgccgcggaacgtaaggcccagcaaactgcacaacaaggtatgaaggaagaagagcgagagttgtgcgcgtcacattttccagtggtgactttggagcaattgcctgacattcgcgatttagaacgtcaacatgagcggggaattcagcatgaaattgaaagagttaaagctgaactacatcgactgaacattgagttgaccaaacgtatgtctgaagccaaacgtgtggataccggggcgctcgttgaggcagggactgatttggacgatattactgtttatttacagcgtttgcaggaactgaccgaagaagccctgccggaaaagctcaatcgcttccttgattatcttaaccgttcatccgatgacggcgtaacacaactgcttagccatattgagcatgaggtgctggtgattgaggagcgcctcaatgaactcaatgaaactatgttcagggttgattttcagccgtatcgctacctgcgtctggataccaaaaaagttgtccatgaaagcctgcgcacgcttgaaaaagcacagcgtcagctaaatgccgcccgatttgttgatgataatggcgagagccattataaggctttgcagatactggtggcgcaattgcgggatgcttgtgaacgaaaccgtaccctgggagcaaaagcgctactggatccccgttttcgactggagttcgccgtatcggtgatggatcgtcagagcggaaatgtgattgagtctcgtaccggctcacagggtggtagcggtggagaaaaagagattatcgcttcttacgtgttaacagcttcacttagctacgcactttgtcctgcggggagccgttatccgcttttcggtaccattatccttgatgaagccttctcccgcagttctcatgcggtggcgggtaggatcattgccgcgcttagagaatttggcttacatgcagtatttatcacccccaataaggaaatgcgcctgctgcgtgaccatactcgttcggcgattgttgtccaccggcgcggtcagaattccaatatggcttctctgagctgggaagagcttgaacgacactaccagcgacgggggaacgcgtag

SEQ ID NO: 45260 - DNA, 1149 bp, Escherichia coli; identical to SEQ ID NO: 44680

SEQ ID NO: 45261 - DNA, 1563 bp, Bifidobacterium pseudolongum PV8-2
atggcagatgtgcgcacggagctcgccgagctgcagcctgtctacgagaccggcgtgttgcgcatgctgctgcacaaatactccgacatctacatcgccatcctgcgcgcgtgcttcgacccgctgaccgcggaagttccgcaggagcgcctgcttgccgcgatgacccgctgtgtgggcgaactcgtggctgacggatcctaccgcatgcgcgatggtgagaccgacctcgaggccgcgcggcggatcctcaaagagctcaaagcggaaaacgaaggcgactatgcgtggatcgccgattcactcgaccgtcgccaacaccgctggatgtgccgcctgacgcagcgcgcgcaccgtgcgatcgaggcgctcgccgcgctgcagcagcgcacggtgtcgctgtccggcgcacaggtcaactcgatcatcatggagattgagaacgcgcgcaaggagctcaccgtcaatgtgcacgagcgcatcgaactgcttgagcaggagatcgcggagcgccgcgcgcagatcgctcaactggagcgcgacggtgtgcaggaacgcccgacccccgaacaggtctccgacatcatcaatgtcgtctacaacaccttgcgcggtgtgccggtggatttgcgcgaactcgtgatcgccgaacgcgacagcggcgacgcgctgcgtcggcagatggacaacgggtcgatgagcagcgacgacatgctcgcctactaccacgaggaatacgagcgcacctaccaccagagcgacgaagggcggcggttcaatgacgcgttccaggtcatgttcgccaccgacaggcgcgcgcagctcgacggggcgctcgccgacatcgccggcagtgcatggctgcatgactcggcggacgacctcatggccgtggtgggccgcgagctcgacgacatctacagtggcatcgacgcggtgcgcgaccaaatccgcctgaccgacgaaagcgtcaaactgctcgtgcgccagcacactgacatgcagttccgcaccatgtcacgccagctcgccgcgctgttcaccacgctgtccgggcgtgccgcagccaaggaccatgcgaagtatggcatcgggctgtccaccgccacgatgccgacgctcgccacacgcgcccgtgaaacacccgtgaaaaccacagctcccgcgttgcagacacacacggacgccgatgcatccgcactcgacctgcatggcatcgtcgccacgggcggaccccgcatcgcccacatggtcgccctcatcgccgagcatccggtcatgcgcgaaggcgcggtcgacatggcggccagtttcaaccgattgcctagggctgagcgccgtgagagcgagatcgtgggctttttgagctatctcggcggcggtggatccggcgaaagcatctggcattgcgcggcgcccgatggcgccgatcgcgcatgggtcacgcgtagcgtgctggtgagcccaggggagctcaacgagttcctgcaggagtcgacgcacactgggcaaggtggagcaccacatcgggaaaggacacggcatgacgcagacgacgaatga

SEQ ID NO: 45262 - DNA, 708 bp, Bifidobacterium pseudolongum PV8-2
gtggccgaacagactgtcgacgagatgggcgtggcggacgtctcgaacccgttcgcgctgttcgacggcgacgacggcgacatgcccgagcctgcacgcgaggcggccatcgcgctcaaacgcaaccgtgcaatcaccggcgagatgttccggcaggcgatggactacttcggccatgtgaagcgttcgctcaacaacgacatgctcgtgccggtcgtcgacacgttctacaaggtgatgtacgccgaacccgccgcacccagccaagtgcgcatccgttcgttgaagaaccgcgcgtcgctgagcgcgcgtgaggcggtgctgctcaccgcattgcgccgcaaggtgctcgaatacgagaacgtgggtttggaggcgagccagtgggtgatctcgaaagaggagatcgtgcagctcatgtcgaccggcgccgggccgctcgcaggccgcaacagcgaggagtcggtgaaccggcaggtggagccgctcatcaacgcgatgcgcacgaaccagttccttgaagaagtggaagacgaggagggcatctaccgcatcaccactctggtgccggtcgtgctcagcacacagcgcatcggcgactggatggccgcggctgacgaacccggatccacgccaacggaccagaacgaacccgccaccacccccgacgacgatgcgcaagacgtgaagcaggaggagctatggtga

SEQ ID NO: 45263 - DNA, 3447 bp, Bifidobacterium pseudolongum PV8-2
atgacggaaggcctctacgggcagatcgaactcaacccgccgcactgggtgctgcaggaacgtcagcttgtcaactgggggtcgtacggcggctaccacaccttcgatccctccacgatgtttgacggcaccgtcaccctgctcaccgggcagagcgaatcgggcaaatccacgctcgtcgacgcgcaggtctcgctgctgtaccccacgggcgccgcattcaacaaggcctcgaacgccggccgttccgaccgcagcgattactcgtatctgcgcggccagcgcggcatccgcaacgacaacggccatgacgagccggtgttcctgcgcggcatgaccgacgacggcgagccctatgcggtgtggggcgccatcgtggaccggtatgaggacacgaccggcggcggcacgctgtcgatcgcgaagttcatgacgctgcccgccggcggcaggagcgaggacgtcgacaagttcttccttgtgagccgcgacccgatcgacccgcgcctcatggacgactaccgcgacgacgtgttctcggtgccgctgttcaaacgcgtctaccgcaccgccaccgtctaccggcaggcgaacctgttccacgaagacgtgtggagccggttcggactgaccgaatccgcatgccgcctgctgcaccgcatgcaggcgtccgacgcgccaagccagctcgacgacatcttccgcaaaggcgtgctcgacgagccgtccgcgctcaaccgcggccgcgcactcatcggcgactacacgcagttcagcgagaacttcaccgcgatcgagcgcaacctgcaccgagtggacctgctcgaacgcatggcggacaagcacatccgctacatcgatgaacgcaagcgcatggagaccttgcgcgccgtggaccccgggcgcgagggcggtgccgagacgcgtgacgcgtggctcggcgcgcgcgtgcacgaatgcatcgcgcgcgtcgcacccacgtatgagcgtgggatcgccgaaaaccagaccaaggtcgcatccgcgcagcgcgatgcggacaggctcgacgccgaactcgagacgatccgcgaacagaagaacggccacggcggcgaccgcctgcagcggttgcaggaacagctgcgcgacgccgagcgcgagcgcgagcgcatggctgcgcgcatcgaacgcctcgtgccgcagttcaccaaggccggacgcacggtgccggggacggcgagcgcatggcaggcgctcgccgaggaggccgtggaggtcagggacgcatacgatgagcggcgcaaggagatcgacgcgctggcgtacccgctgcaggagcggtgcagtgcgatgcgccgcgaggtgaaagacctgcaggcggacatcgagcgcaaacgccggtcgcgcacacgcatcaccaaggagatggcggacgcgcgcgcgatgatggcgcaggcggccgggctcgaaccggaacaactgccgtttgtggccgaactcatggatgtgcagggcggcgaggagcggtggcgcacggcgatgaacgtcgtctacgcgtcgctcgcacccgtcatccttgtggacaagcggtatgaacacggattcgcgcgcgcgatcagccagattccgcatgcgtcgatggcacgccgcaactggcagttcgtggatgtgcagcaggactaccacggcgagccacgcgaaggctggatgtccggcaagctcacgttcaatgaggaatcgccgttcgctgactgggtgagggcgcgcgtggcggatgcgcggtcggacgcacggtgcgtggcgcacatcgacgacagcgacgtgcgcacgcgccaggtgcaggaggacggccagatcaaggacggcgcgcacggcagccacggcaccaagaacatcaaccaggtcatcggttttgtgacggaaggctacctgcacgaactcgccgacgagcttgaacatcttgagcaggagatggaccgcacgaaccaagagatcgagcgcatcggtgcacgcaaagccgagctcgaggcgcagcgtgaccttgcgcaggcggtgttgggcgtggattggaccgacatcgacgtgcagtcggcggacgctggcatcgcgatgctgcatgacgaaatcgaacgcatcctcgccgacccggccctcgccgaactcgaggcgcgcgagcgggagtgcaaggtcaggctcgccgacgcgcgcaaacgcctcgcgcgcgccgaggacgagcttgcggagacgaagcgcgcgagcagggccgcgcgcgcatggctcgacgcgcacggcgacgaacagccgccggcactgaacaaggcatgcgtggagctgctcgagcagacgttcgacgggtatttcggggcggggaccagcgacgaggagcgcgccgctcgtatgctcgggctcgattctggcgcacgtgtccccgggcatggcgcaccggccggcacaggggtgaacgcgacgctgcgcgcgctcggcaaacacgccgagaaagcggtgcacgcgcggctcgaggaattgcgcggtatgtgcgaggcacgcaaaagcgagtgcgagacggccatggcctcgtacatcgaacagttcatgcccaacgacgaccgtgtgagcgcggatgtggagaatttccaggtgttcgagcatgatctgcgcgaactcaacgcgagcacgatccgcgcatccgcggacgaggaatacttccacagcctcgagaagatccatcaggacctcatgcagctcaacacggcgttggacgccgaccggtcgaagatcatcgaacagatcggcaagatcaaccgcctgctcgaacgctatccgttcggcgcgcggcgcggccggctctcgatcgtgccgcaggtgagcaagtcagacccgcagttcctcgccgcgttgcgcgcgcggctcgcggacctcaacgcctaccagcagcagggacgcaaagacatcgaacggtgcaagcagctgttcgcggcatgtgcgcccttcgtggagctcgtcaaggagggcttcgacgagtttgcggccaacaagcggggcaacgcgaacctcgatccgcgccgccgctcgcggttcttcggcgaggtcaccgaccccgacggcaccgtggagcgcatcaattcgaccggcggcggctcgggcggctacctgcaggaactcacgtcgttcgcctacggcgctgcattgatgtatctgctggcgaacgacaacgccaccgagccctcgtacgccaccgtgttcctggacgaagcgctcatcaaggccgacggccagtacacgcgtcgcgcgttgagcgtgctgcccggtcttgggttccaggtgatcgtctcggcgccggaggcgaagaccggcgagatcatggcctcggcgtccaaggtcgtggtggcgcgcaaagaccccgaaaacgggctgaccgaattgcgcgaagcggtgcttgggaccggcgatgaccacgccagctga

SEQ ID NO: 45264 - DNA, 1356 bp, Escherichia coli; identical to SEQ ID NO: 45257

SEQ ID NO: 45265 - DNA, 750 bp, Escherichia coli; identical to SEQ ID NO: 42571

SEQ ID NO: 45266 - DNA, 2922 bp, Escherichia coli; identical to SEQ ID NO: 45259

SEQ ID NO: 45267 - DNA, 1149 bp, Escherichia coli; identical to SEQ ID NO: 44680

SEQ ID NO: 45268 - DNA, 1938 bp, Mumia flava
atgcgaagtccgatgtgccgacggcacgcttggatggccaaggagaataccgcaggagatataggggcgaggtcgagtcgcaagtcctcgacctccgcgctaacgcctggagaaccggctttctggatgagttggagatattcgtccggcgcgcgtccagccaatctaggcttgaacgcgtcagtaccggtgattggtgcgtgcggtgacgcccgcgtgacggtatcgccgaactcactcacaaatgcagacagcagccgactggcttggacggcttggatgccgaagacttctcgtactcgcgcattatcgagctcgccttcccaacgcaacaagatttccatctctccaaggcgttgttcggcgggtgttagcggtgtccgcatgaatgttatcttgcatgataatttatcttgcaagataataccgcaaaactgcacagaagccctatccgagggaacaacgttgaacccatcaagtctttctccggcaccggggggcggtgcggccaacccgccagcattcttcgacgccgagcggcagaggttttttcgtccactcaacagctccaggcgtgaattagtagcggcatgcttgcgtgctctttatgaccgcctccacgggcccgcagccgactatgcgcaccacctgactcgagatgtccttcgcgaactcctgctgccggttgtccggcaataccagactacgttggcggatgacggctccgatgacgaattcactgccgccgatgcgagcgaccctcaagtgctggtcgccatggtcattcgggcgctcgtcgcagacggttggctagagcagttcgctgaccggactggcttggttgcagcttttcgtttttcccgtccgggcaagcttttttcggaggcgctttgggcattggaccgcccaagccgaagccggcagcgcaacatgcgcggctgccgcaatgccctggaggctgcattgtccgaacgaggcgacgcgcatgacttggtggatgcctacgaatatgccgagaaggttatcgaggacctcgcggacggcatcgactacttccaagaactggtccggcacttgatgcaagccgcgtctgctcatacgcagtggaacgaattcgtcgactttctcgacagatttcagcgagactactccaagcaacttacagcggataacgcgacgctgaaccgccaagctattcggcaaaagcttgagaaactccgggccgttccagagacgaagttcaatcgaatggatgctcagttgcgcgatatcgcgcactggatggcgaaggagcacacgggaagctcgctctatgattggctgctcggccgtatcgaagacattgtagacgcggcgtgtgagtctaagcagccgggctttctcaaggccatggagacttatctgaagcgtgtgaacggccttgctttgcagtcgatgatgctgcgctcggggcagacgcggcatgcctatttagcagccgttcagaaagtggccgagtctcccaagtgggaacaggaccgcttgctaaagctcgtcggccagttcctcgcaccagcggaggtgcgcgtcctagacccggctagctttaagctgaagactgcaacgcagcgccgcaaagcagtaaccgtgtccattcgaccgcgcccgacaagagaagagcggcttgctgcggcgatggcgcgagcagaggccgaagtgttctcaataccgaacgaagatgtagcgcaggggctgcgtgcggacctgcgcctcttccaacatccaatccgcgtttctgcaatgcctacggcaagtgcccgcgacgtcattcgtgcaatgcaggcggtggaagccgcgcgaagcgccgtcggcggggacttcatcgtcaagaagctgccgacccgtttggagaatgagttttacggggccaacgactacgaaatcgacttaaaaaaatga

SEQ ID NO: 45269 - DNA, 675 bp, Mumia flava
atgagcctatccaatctaattgacgaacagctcgccatcgcgaatgtgaagcgcgagcggttccgggaaatcttggttcgcctgatggcctacggggtcatcgtgcgcgacgaagacaaaaccgaacaacttttatatgacgatgctcggcgcgttgagagtttgttggatgagtacctcgatttcgccggtttccgcctatatcacgaccgcgataaccagttctacagactgtacgccgccggcgcggtcgtagacggcttgccgacggacgtttacgaaccgactccatctttacgcgcgcgcgtgtccccggacttcgtcgcgctggcgcttaccttgcgattcctctatcagaacaagctgaatacgggtgacatccagcctcaggggggcgaggcgcttgttagcttcgaggaaatcgccgcgacgatgcaaacgcagttgaagcgagcgcttccgtcgagcatgggcgacaagatggctctcctggccgaccttaggcgtcataggctgctccggtatgcaccagaattttctatcttggatgaggacgcgcttcttgcgattcgcccgaccatcctgggtgttgtgtcaaacgaggcactgaccgctgcactcgatgcagacggcgtctttgaacaacagaccaccgttgaggagaaggacgcgtga

SEQ ID NO: 45270 - DNA, 3633 bp, Mumia flava
gtgaagctcgaccgcatcgttctggtcaactgggggcagttgcggccgggtgactatgaccttggaaacatgactctccttaccggcccgacgggcgcgggtaagtccactatgctcgatggcctccagaccatcatgaccgccgcgtaccagggtatcgtcgcatacaaccctggccaagaagaggtacagcaggggcaacgtagcgggaagtccaagcgtaccttggagtcatttgtcgtcggtgctgagtacagtcgtttctctcgaccccatggcgcgcaaggatatatggcggccgtgttccgccccgggcccgatgaggattcggccaagccttttacggcgctcgtcgccgcgtcggcacaggtggacggcgtcggggagcgcagggtgccgaagctggagcgactcgaactggttatcgtagacgacgctgcgctcaccgttgacgattttctaaaggacgcggagcaaagcgagtgggtggccgtcgaagaaatcgtaaagcggttgaaggctcggtattcgaaggtggtgacctatgacgggcataagcgagactatctttgcgcactctacgggcgcttccgggggcgcatctcgattacctgggatgaggcccagaacgctgcgaaggcttggtgccagtcaattgcttacaaaaaaattggctcggtccacgacctcgttcgcgatgacattctggagtatgacggcaagcagttgcatgagagcatcactcgcatcagcgacctgatgcgccaagtcacgaacctgaagcaagaagggcagcgactggaggcgactgttgggcgcttgcgagggttgaaggctgccattgcgcaaacggcgtcggcctttgaagagcaagtgcagtatgacttgctgctggccaagatgctggtggcggcagacgatgaacgtatcgcccaagagcagaagcgcatcaacgatgactcagcactagtagggcggtgcgagcaaaaggtgaagacggaggagcgactaaaagcaggcgtggaccggagccgcatcgacattgcagcgaagctcagtggcattgccgccaacgccgaaaaagagcgcctcgaccagcagctcgagctcgccaattccgcagctcggcgcaagctggctgagctcaataccgggcttcaagccgccgcccaaatcgtcaatgcggctacgggtttgttgcggaagcccattccggagcagtttcccaagctcaaagcgtcggttgatgcggtcggtcgagttacagcatcgactgacgttgctcgcttggacggtctcttgggcgctgtcctggatgcctcgagtgatacgcagcttaacgtcgagaagttgttccgattgacccctgcattcgacggtgtggaagagggactcggcgcgctgcactcatatctcgtggggaccgaagatagtgtcttgatggctgtcgcttccgagacgtcggaattgacgcaacgtgtcgaagccactcgtaaggcgcgcaaggaattggctgaccgcaaggagctgttggcgagcggcgccagcgactacaatcgcgacactcgcatggcgcttcctcgcattcgagagtgtttgcccgaagctggcgtccaagttctctgcgacctcgtcgaacccgtgtcggacgaatggcaggaggccatcgaagggtacttggacaatgcccgcttcaatctcattgtgaagccagagtgggaagcacgaactatcgatttgcttcactcatggggctcgcgctgtaaggtcatccagggtaaaaggtgtcttcagcgtgccgatgccggtcgtgtgccatctgactctatcatccacgagctccgcactgaccatcccattgcacgcgcgtatctcatcgagcagtatggcgccgtcgtcaaggtcagggactccgagcaactgcgcgataccgcgcgtgggttgaccaaggaaggcaaaggaagtggttctcgcactatgttcgttggtgagcggcgggaccttgttcttggacgcaaagctcgcgagcaggcgctgagggctaccatcgagcaactcgatgaagcagaccgagaaattcgagagttcgagcaactgcaagatacgctgtcgaacgttaaacggcttcttggcaacctgcgtgaacctgttttcgatgcggtgccgcttggccaagcagcgggagaaatcgacagcactcggcgcacccttgcgcagttggacctcaccgaggtggaacagttgcgagcagagcgagagaagctggaactgctcatcgctgggcacgatgccgaaatcaccgcggcaaatagagagattaccctggcgcgtcagcgtatcacggactcccaaggcgccattgagcgcatcaatggaggccgagacgcgcgatttcgggagcgtgaagaccagattcgtcggctcgggcagatgtgcgaaacaaacccagagaaaacctatacggttattgccgaggaagtagaagggctgctcaaatcccggaggtttgacgtgcattccgttcaggtgcggctcaacacgctgcgcacccagccggacaaattgctgggtgatgtgcgggaaatgcttgcggagtacaacgcgaacgcgcgccaagaggagcgcttccagtcagcgctgcctcatcttcacgacaccaccaccttcgacccgtactatggcccccttgttgcgctcggccgcgcggtgggagcgctccgcagcgagcttgagggcatcggcctctacaacaatagggccaaggtggaagaggcggagcggtctttccatgacgtgttcaccaagcagttttgcgtcgaaatcaaaagtaaggtggatgatggcgtccgactgctacggcaacttaatatggagttggaacggcttaaattcggcacggaccgcttcagcatcgactggtcgaagtgggagccggagttccaggagtactacagctttttctcagccgtcaccgaacttgcggactcagttgaaacggtcgacctgttcggagagacggagctaacgccaaagcacgtagaggtacgcgaccgcctggtgaagctcctgctcgactcagaccaagagagagcggggcgggagctcttgcgcattgccgactatcgaaactacaggcgctacgaaatttggaatgattcagacagtgggggacgcattgcgctttcaacatggggtacggggtctggtggacagcttgagacgccggcttacattgttcgcgcggccgtggtgacgaaccggctaaagttgttcgacaagggacccagcctgaagatgctcgttagtgacgagtcgttctcgacgatggatgaacctcgcgctcgcgctgtgctgcagtacctacgcgatagcctcgatattcaggttgtcagtgcgatgccgacacgaggcgctggcggcttacggcccgagttcgaccgggagtacagctatagccgcgttcctgttgatgctaacggcgaactcgacttcatcctcgagtacgacgagcgcatcttcaagaaggacaagatgcgagagctctgggaaaagcagcgggcggcggcccgtgctcaggccgagctggcgtttggcgccgccgaggccgcacagcaggcggaggcgcttaaatga

SEQ ID NO: 45271 - DNA, 693 bp, Mumia flava
atggcggaggtcgtggagcagttgaaccggcttccggggttggcggagaaatcgatgctgctgcgtgaggtgtcgtcgcagttgttctgggggatgtccaaggtcctcgacaagcgtcaaggattggttgcggccattctcggtatggacgattgcccattcccagagtctcccatccaattgcacgtgttcttgcctgcctgcggtcaccgtggagtcctcttcattgagaattcggtgagcttcgaacgcgcaatgcgcgcgcccggtggagttttcgatgagttggctttggtctatgcgtccggcttcaaagggagcgcacagcggctgcgcaccatggaggggtgctcgctgttttacgccgcgggcggcggtctcgaacgggacttacgtgcaaagtttgaaggttggttgtttggccggcgagagatgccgtcgtacttctggggagacctcgacttcgcaggaatgcgcatactcgctgccatgcggacgacctttacggggctgacggcctgggtgccgggctatgagccgatgcttgcggtgctgaaggccggcggaggtcacccccccgaggccgcggacaaacaaggccagaagccaatcgcatcgactgggtgcgggtacgcggatgagcaactattgcccgccctgcagacctacgggcgtttcgtagaccaagagtag

SEQ ID NO: 45272 - DNA, 1470 bp, Xanthomonas euvesicatoria; identical to SEQ ID NO: 41660

SEQ ID NO: 45273 - DNA, 702 bp, Xanthomonas euvesicatoria; identical to SEQ ID NO: 41661

SEQ ID NO: 45274 - DNA, 4056 bp, Xanthomonas euvesicatoria; identical to SEQ ID NO: 41662

SEQ ID NO: 45275 - DNA, 1470 bp, Xanthomonas euvesicatoria; identical to SEQ ID NO: 41660

SEQ ID NO: 45276 - DNA, 702 bp, Xanthomonas euvesicatoria; identical to SEQ ID NO: 41661

SEQ ID NO: 45277 - DNA, 4056 bp, Xanthomonas euvesicatoria; identical to SEQ ID NO: 41662

SEQ ID NO: 45278 - DNA, 1470 bp, Xanthomonas campestris pv. cannabis
atgaagcaccaggcacgtatcgccggctatcggcaactgcgcgagcagccggtgtggaaactgctcgccgccgaccacgcccccgaactgatcggcctgctgcagaccgtgctgatggacggcgaacggcgcctgccctcggccgtgctgcacgagcggttgcagcgccagctcgatgccttgcgcgccgacgagctgtcgcgcgaattgccgcgtaccgcgcaggcctatctggcgcattggttggcacagggctggctggagcgccgcctgcccgaaggtgcagccgaagaagaatacgaattgtcgcgcgccgccacccaggccatccgcttcatcgtcggcctgcgcgaaagcagcagcagcgccaccgaaagccgcctgtcgctggtgatccagcaactggtgcagctggccggccagaccgaggccgatccggagctgcgcctggctgccttgcgcgacgaacgtgcgcgcatcgatgccgagatcgaacgcgtggcgtcgggccgcgtggcggcactggatggcaagcgcgcgctggagcgcgcccgcgacctgatccatctctccgacgagctggccgaagatttccatcgcgtgcgcgatgatttcgagcagctcaaccgccagttccgcgagcgcatcatcgacgacgaaggcgcgcgcggcgatgtgctcgaacaactgttcaacggcgtggatgtgatcgccgacagcgaggccgggcgcaccttcgaggcgttctggagcctgctcaacgacacccagcagagcagccagctcgatcaggcgctggatgcgctgctcgcacgcggcttcgcgcgcaagctcgaccgccgcgaacgcgccttcctgcgcgggctcaccggcacgctgctggagcgcggcggcgaggtgcatacggtgatgcagcacttcgcgcgcagcctgcgcggtttcgtgcagagccgcggctatctggaacagcgccggctcaatcaattgctcaagcaggcgcagggcgaagccctgcaattgcgcgacagcctgcatgccaccaccgccaccgggtatacgcaggcgctcagcagcagccgcctgcgttcgttgtcgcaatggcggctgcacgacccgcggcttacccaggtggatgggcgtgtgcaagccgccgatgccgccgagatctcgctggacagcgtgggcgacctggtcgcgcaatcggagatcgatgtgcgcagcctgcgcaacgacctgcacgaactgctcggccagcgcccgcggctgaccatcggcgatgccctgcaacagcgcccggccgtgcaagggctgggcagcgtcatcggttacctgtcgctgggcacgcgccacggcctggtgatcgaggggcaaatggaaacggtgcaatgggaaggcagcgacggcgccacgcgccgcgcgcgcattcccttggtgtggttcacccgggagaaacgcaatgaactggtctga

SEQ ID NO: 45279 - DNA, 702 bp, Xanthomonas campestris pv. cannabis
atgaactggtctgaggacacgcgcctggacgccgacgaaaacaccggtgccccggccaatgacggccgcccgctgatgacggatgcctcgagcgcgcaaccgcgcggcgagctgtttctgggcgacaccggcacgttgccgttcgacgcgcgccgcgcgctgtgccaattgctcgcagggcccagcatcgatgcgcaacgccacggcgcgttgtggccggcgctgttgcgcaacgaggcggcgatccgtcagctgttgtgcgagctgtttctggagctggtgctcgaccgcgagggcggggtggccttcacccgtcaggccgacaccgccgagctggaatcgcccaccttgctgcgcagcgcgccgctgacctttatcgaatcggtgttgctgctgttcctgcgccagcaactggccgaagccgatacccgcggcgcgcgtgcggtggtggacgaggcgcagctggtggaggcgttgtcggtgtacgagaagaacgtgtccaccgaccgcgcagggtttgcgcgacgggtgatgacggcgatcggcaagatgcgcgacaaccagttgctgtcgcgcctgcgcggcagcgaggagcgttacgaagtctcgcccgtcttgaagctgttgttctcggcagaggatgtgcaggccctggtggtggcgtatcgggagttgcgagagggggaggttgcgttggagtga

SEQ ID NO: 45280 - DNA, 4023 bp, Xanthomonas campestris pv. cannabis
atgaattcccagtccaacctgtcaccggcgcagccgggcgcctccttgttcgccgattcgcttgccgaacagcgggcgcagcagttccgcatgcggcgcttgcaggtgcacaactggggcacattcaacggcttgaccgaagtgccgatcgcggaaaagggctttctgttcgtcggccgttccggctccggcaaatcgaccctgctggatgcgatgtcggccctgttgacgccgccgagcatcgtcgacttcaacgccgccgcgcgcgaggccgaacgcagcgggcgcgatcgcagcctggtgtcgtatgtacgcggcgcctgggccgatcagcaggacagcgcgtcgggcgaaatcgccacgcaatacctgcgcaagggcgccacctggaccgcgctggtgctggagtactgcaatgcgcatggcgaggcggtgagcctgatccgcttgttctggatcgccggcagcggcaatgcggctgccgacgtccgccgccactacatggtggcgccgcgcagcttcgatgtggccaccgagctggatggcttcgatctggacctgcgcaggctcaaggcgcggctgggtgaggaggttgcccacttcgatggattcgccggctatgccgaacgtttccggcatgcgctgggcatcaacaacgagatggccttgcggctgttgcacaagacccagtcggccaagaatctgggtgatctcaatgtcttcctgcgcggtttcatgctggacgagccgcgtaccttcgaagctgccgatcggttggtggaggattttgccgaactcgacggcgcgcaccatgcggtggtcaccgcacgccgccaggtggaaacgctgacccctgcgcgcgagcaccatgcggcgttgatggcattgcgccacagcgtgggcgagttgcgcgagctgcagttgggcgtggacagctaccgcgagcagcagcggctggccttgctggatgagcggctgcaggagctggacaaccaggaccgcggactggccggcgaagagggccagcgccgcgagtcgctggataaccacgagcagaaactggccgggctggagcgcgagcagcgcgccgccggcggtgagcagatcgaagaactggaacgcgagcgtgcgcgcgtggagcgcgagcgcgacgaacgcctgcgccgccgtgcgcagatcgagcaggcctgccgccagcttggcaccgccctggcggcaggtgccagcggctttgccgcgcaggtcgcgcatgcgcagaccgtgctggataacggcaagcacgacgccagcgcgctggatgacgccattgccgagcgcatgggcgcacgccgcgacgatgagcgccgctttgccgagatccgcgccgagctggatgcactgaagcgcgcgccgtcgagcatgcctgcaccgatgcaggccctgcgcgcgcggctatgcgaagacaccggcattgccgaggccgcgctgccgttcgttggcgagctggtgcaagtgcgcgacgaccagatggcgtggcgcggcgcgatcgagcgcgtgctgcacggctttgcgcaatcgctgctggtggacgagcggcattacgcgcaggtcagcgaatgggtcaaccgcacccatatcggcacgcgcctggtctacttccgtgtgcgtcgtaacgacgagttgcactcgcggcgggtcgatcccgatgcgttgcccggcaagctgcaattgcgcgagcacgccttcaccgagtggctgcgcaacgagctgacccgtcgcttcgactatgcctgcgtggacaacgcaaccgcgctgcgcaacgccgaccgcgcgatcacccgcgagggccaggtcaagcatcccggcgatcgctacgaaaaggacgaccgccacgcggtcaacgaccgcaaacggtggctgctcggtcacgacaaccgcgacaagctcaaggtgttcgagcgcgaagcgcaggcgctggcccagcgcatcgccagctgcgatgccgatgtcgcagcgctgcgcaagcaacgcgagcaggatcaggaacgacagctggccgcgcataccctggtggagcgcgactgggacgagatcgacgtcggtcccaaactgcaacgcctgagcgatatcgacgagcagttggtgcagctgcgcgaaggcaacagcggcttgcgcgcgctcggccaggccatcgacaccgcacgcaccttgcgcgaccaggccaagcgcacgtacgacgatgtgcggctggaacgtgcgcaactggcgcgcgagcgcatgcggctcgaacagcagcacgccgcgtgtgcgggccgcgccggcaccgccacgctcacaccgacgcagttgcagggcctgcgggaacggcttgccgccttgacgccgctgtcgctggacaacctggaagcgcatttccgcgtggtcgagcgtggcctggccgagcagctggccgacagccagggccgcgacagccggctcagtgcccaattgctggaatgcttccgcaagtattgccagcagtggcccgaagacagcggcgacttcaccgtgagtcttgccagcgccgacgattttcttgcgcgcctggaccggctggaaagcgatggcctgccgcggcacgagcatcgtttcttcgacctgctgcagacccagagcaagaacaacctgctggccttgcagcgccacacggccgaagcgcacaagggcatcaagcagcgtatggacgaggtcaatgccagcctggagcaggtgccgttcaatcgcgacaccatcctgaccatcgaagtcggcgaccgccgtctggccgaggtgcaggaattccagcagcagttgcgtgcggtgctgtcgcatcaacagaccgaagaccgcgcgctggctgaggcgcagttttccaccttgcgcgcactggtcgcccgcctgggcgcgcaggaaccggaggcacgccgctggcgcgaacaggtgctggatgtgcgcctgcatgtggaattcatcggtgtggaactggatgcgcaaacccgcgcgcaggtggagatctaccgcagcggcgccggcaaatccggtggccagcgccagaagctcgccaccacctgccttgcagcggcgctgcgttaccagcttggcggcgaagacggcgaactgccgcgctattgcgcggtggtgctggacgaagccttcgacaaggccgacaacgagttcaccgcgctggcaatgaacatcttcgaaaacttcggcttccagatggtggtggccacgccgttgaagtcggtgatgaccttggagcccttcatcggtggcgcctgctttgtggaaatcagcggccgccacaactcgggcgtgttgttgatcgaatacgacgagcaggcgcagcgcttgaagttgccggagcgctcgcgtggcgatgagccggcggttgccggcaccactgatgctgcgccttcgatcgaggctgtaggcgagtctgcaggagtgcagggccctgcacgcgcagatggcatggcaattgacggcgccccaatgcacacggcatcgcctgcggcggcggggaccccgcccgcagcgcagaaaacgcagacgggtcagcgcaagccggcagtcgcgacgacgaacacgcagagcaagaacgccaggactgcctcttccacgcgcgctgcggcgcagcctcaagcaaagcagacgaagaaatcgcctccgcgcatttcggctgatgccggcaagccggtatcagctaaacgcacagcgcgcgcgccggcggtgtcgtcaggagctgcagccacgtccactgtgggcaagaccgctcggtcttcaaaaacgccggccaaggcgacggtggccacaagcgcatccaacgccacacccaggaaggttgccgccgcatctgcggcagtgaaaaccgccaccgccaagccacgtgcaacagccgcttcgactgggcagccagcgcgtggcaccggcaagacgacctcgacgcgcgcggtggctaaaccgtcaccggccaaaacgcgcggcgccaaggcaggcacggcgcaggcgcgcagcaagcgctga

SEQ ID NO: 45281 - DNA, 1470 bp, Xanthomonas campestris pv. cannabis; identical to SEQ ID NO: 45278

SEQ ID NO: 45282 - DNA, 702 bp, Xanthomonas campestris pv. cannabis; identical to SEQ ID NO: 45279

SEQ ID NO: 45283 - DNA, 3344 bp, Xanthomonas campestris pv. cannabis
atgaattcccagtccaacctgtcaccggcgcagccgggcgcctccttgttcgccgattcgcttgccgaacagcgggcgcagcagttccgcatgcggcgcttgcaggtgcacaactggggcacattcaacggcttgaccgaagtgccgatcgcggaaaagggctttctgttcgtcggccgttccggctccggcaaatcgaccctgctggatgcgatgtcggccctgttgacgccgccgagcatcgtcgacttcaacgccgccgcgcgcgaggccgaacgcagcgggcgcgatcgcagcctggtgtcgtatgtacgcggcgcctgggccgatcagcaggacagcgcgtcgggcgaaatcgccacgcaatacctgcgcaagggcgccacctggaccgcgctggtgctggagtactgcaatgcgcatggcgaggcggtgagcctgatccgcttgttctggatcgccggcagcggcaatgcggctgccgacgtccgccgccactacatggtggcgccgcgcagcttcgatgtggccaccgagctggatggcttcgatctggacctgcgcaggctcaaggcgcggctgggtgaggaggttgcccacttcgatggattcgccggctatgccgaacgtttccggcatgcgctgggcatcaacaacgagatggccttgcggctgttgcacaagacccagtcggccaagaatctgggtgatctcaatgtcttcctgcgcggtttcatgctggacgagccgcgtaccttcgaagctgccgatcggttggtggaggattttgccgaactcgacggcgcgcaccatgcggtggtcaccgcacgccgccaggtggaaacgctgacccctgcgcgcgagcaccatgcggcgttgatggcattgcgccacagcgtgggcgagttgcgcgagctgcagttgggcgtggacagctaccgcgagcagcagcggctggccttgctggatgagcggctgcaggagctggacaaccaggaccgcggactggccggcgaagagggccagcgccgcgagtcgctggataaccacgagcagaaactggccgggctggagcgcgagcagcgcgccgccggcggtgagcagatcgaagaactggaacgcgagcgtgcgcgcgtggagcgcgagcgcgacgaacgcctgcgccgccgtgcgcagatcgagcaggcctgccgccagcttggcaccgccctggcggcaggtgccagcggctttgccgcgcaggtcgcgcatgcgcagaccgtgctggataacggcaagcacgacgccagcgcgctggatgacgccattgccgagcgcatgggcgcacgccgcgacgatgagcgccgctttgccgagatccgcgccgagctggatgcactgaagcgcgcgccgtcgagcatgcctgcaccgatgcaggccctgcgcgcgcggctatgcgaagacaccggcattgccgaggccgcgctgccgttcgttggcgagctggtgcaagtgcgcgacgaccagatggcgtggcgcggcgcgatcgagcgcgtgctgcacggctttgcgcaatcgctgctggtggacgagcggcattacgcgcaggtcagcgaatgggtcaaccgcacccatatcggcacgcgcctggtctacttccgtgtgcgtcgtaacgacgagttgcactcgcggcgggtcgatcccgatgcgttgcccggcaagctgcaattgcgcgagcacgccttcaccgagtggctgcgcaacgagctgacccgtcgcttcgactatgcctgcgtggacaacgcaaccgcgctgcgcaacgccgaccgcgcgatcacccgcgagggccaggtcaagcatcccggcgatcgctacgaaaaggacgaccgccacgcggtcaacgaccgcaaacggtggctgctcggtcacgacaaccgcgacaagctcaaggtgttcgagcgcgaagcgcaggcgctggcccagcgcatcgccagctgcgatgccgatgtcgcagcgctgcgcaagcaacgcgagcaggatcaggaacgacagctggccgcgcataccctggtggagcgcgactgggacgagatcgacgtcggtcccaaactgcaacgcctgagcgatatcgacgagcagttggtgcagctgcgcgaaggcaacagcggcttgcgcgcgctcggccaggccatcgacaccgcacgcaccttgcgcgaccaggccaagcgcacgtacgacgatgtgcggctggaacgtgcgcaactggcgcgcgagcgcatgcggctcgaacagcagcacgccgcgtgtgcgggccgcgccggcaccgccacgctcacaccgacgcagttgcagggcctgcgggaacggcttgccgccttgacgccgctgtcgctggacaacctggaagcgcatttccgcgtggtcgagcgtggcctggccgagcagctggccgacagccagggccgcgacagccggctcagtgcccaattgctggaatgcttccgcaagtattgccagcagtggcccgaagacagcggcgacttcaccgtgagtcttgccagcgccgacgattttcttgcgcgcctggaccggctggaaagcgatggcctgccgcggcacgagcatcgtttcttcgacctgctgcagacccagagcaagaacaacctgctggccttgcagcgccacacggccgaagcgcacaagggcatcaagcagcgtatggacgaggtcaatgccagcctggagcaggtgccgttcaatcgcgacaccatcctgaccatcgaagtcggcgaccgccgtctggccgaggtgcaggaattccagcagcagttgcgtgcggtgctgtcgcatcaacagaccgaagaccgcgcgctggctgaggcgcagttttccaccttgcgcgcactggtcgcccgcctgggcgcgcaggaaccggaggcacgccgctggcgcgaacaggtgctggatgtgcgcctgcatgtggaattcatcggtgtggaactggatgcgcaaacccgcgcgcaggtggagatctaccgcagcggcgccggcaaatccggtggccagcgccagaagctcgccaccacctgccttgcagcggcgctgcgttaccagcttggcggcgaagacggcgaactgccgcgctattgcgcggtggtgctggacgaagccttcgacaaggccgacaacgagttcaccgcgctggcaatgaacatcttcgaaaacttcggcttccagatggtggtggccacgccgttgaagtcggtgatgaccttggagcccttcatcggtggcgcctgctttgtggaaatcagcggccgccacaactcgggcgtgttgttgatcgaatacgacgagcaggcgca

SEQ ID NO: 45284 - DNA, 1470 bp, Xanthomonas vesicatoria
atgaagcaccaggcacggattgccggctaccgccagttgcgcgaccagccggcgtggaaattgctcgccgccgatcacgccccggagctgatcggcctgctgcagaccctgttgctggacggcgagcgccggctgccgtcggcagtactgcatgcgcgcctgcagcgtcagctggatgcgttgcgcggcgatgaactctcgcgcgagctgccgcgcaccgcgcaggcatatctggcgcattggctggcgcagggttggctggagcgccgcctgcccgaaggcgcagcagaggaagactacgaactgtcgcgtgcagccatccaggccatccgttttatcgccggcttgcgcgagagcggtagcagcgccaccgaaagccggttgtcgctggtgatccagcaactggtccagctggccgggcagaccgaagccgacccggcgacgcgcctggccgcgctgcgcgaagaacgcgaccgcatcgatgccgagatcgagcgcgtatcgaccggccgggttgccgcactggacggcaagcgcgcactggagcgcacccgcgacgtgatccatctggccgacgaactggccgaggacttccaccgcgtgcgtgatgacttcgagcagctcaaccgccagttccgcgagcgcatcatcgacgacgaaggcgcgcgcggcgatgtgctggagcaattattcagcggcgtagacgtgatcgccgacagcgaagccgggcgcaccttcgaggcgttctggagcctgctcaacgacacccagcagagcagccagctggaccaggcgctggacgcgctgctcgcgcgcggcttcgcgcgcaagctcgatcgtcgcgaacgcgctttcctgcgcgggctcaccggcaccctgctggagcgcggcggcgaggtgcatacggtgatgcaacacttcgcgcgcagcctgcgcgggttcgtgcagagccgcggctatctggaacagcgcaggctcaatcagctgctcaagcaggcgcagggtgaagccctgcagctgcgcgacagcttgcacgccaccgccgccaccggctacacccaggcgttgagcgccagccgcctgcgctcgctgtcgcagtggcggctgcacgatccacggctcacccaggtcgatggccgcgtctacgcagccgacgcggcagagatatcgctggacagcgtgggcgacctggtcgcgcaatcggagatcgatgtgcgcaccctgcgcaacgatctgtacgtgctgcttgggcagcagccccggctcacgattggcgatgccctgcagcaacgcccggccccgcaggggctgggtagcgtgatcggctatctgtcgctgggcacgcgccatggcgtggtgatcgacggccacatggaaacggtgcaatgggaaggcggcgacggcatcgtgcggcgcgcgcgcattcccttggtgtggtttacccgggagaaacgcaatgaactggtctga

SEQ ID NO: 45285 - DNA, 705 bp, Xanthomonas vesicatoria
atgaactggtctgagcaggcttcgcgggatgcggacgacgacaacgacgctgcccgcgatgccgcattggcgctgccggcgagcgatgccgccaacgccgcgccaagtggcagcttgttcctcggcgacaccggcacgttgccattcgatgcccgccgcgcgctgtgccagctgttggccggccccagcatcgacgcgcaacggcacggcggcttgtggcctgcgctgctgcgcaacgaggtggcgatccgccaggtgttgtgcgagctctttctggagctggtgctggaccgcgaaggcggcgtggcgttcacccgccaggccgacaccgccgagctggaatcgcccaccttgctgcgcagcgcgccgctgaccttcatcgagtcggtgctgctgctgtacctgcgccagcaactggccgaggccgatacgcgtggcgagcgggcggtggtggacgaggcgcagctggtagaggcgttgtcggtatacgagaagaacgtctccaccgacaaggccgggttcacgcggcgggtgatgacggccatcggcaagatgcgcgacaaccagttgctgtcgcgactgcgcggcagcgaggagcggtatgaggtgtcgccggtgttgaagctgttgttctcggcagaggatgtgcaggcgttggtggtggcgtatcgggagctgcgtgagggggaggttgcgttggattga

SEQ ID NO: 45286 - DNA, 4014 bp, Xanthomonas vesicatoria
atgaattcccagtccaacctgtcgccggcgtcgccgggtgcttccttgtttgccgagacgctggccgaacagcgcgcgcagcagttccgcatgcggcgcttgcaggtgcacaactggggcacgttcaacggcttgaccgaggtgccgatcgccgagaaggggtttctgttcgtcgggcgctcgggctcgggcaagtccaccttgctggatgcgatgtcggcactgctgacaccgccgagcatcgtggatttcaacgcggctgcacgcgaggccgagcgcagtgggcgcgaccgcagcctggtgtcgtatgtgcgtggggcctgggccgatcagcaggacagcgcctccggcgagatcgccacgcaatacctgcgcaagggcgccacctggacggcgctggtgctggaataccgtaacgcgcaaggcgaggcggtgagcctgattcgcctgttctggatcgccggcagtggcaacgccgcggccgatgtgcgtcgccactacatggtggcgccgcgcagtttcgatgtggccagcgagctggatggcttcgatctggacctgcgcaagctcaaggcgcggctgggcgatgaggtggcgcatttcgacgggttcgccggctatgccgaacgtttccggcatgcgttgggcatcggcaacgaaatggcgctgcggctgctgcacaagacccagtcggccaagaacctgggcgatctcaatgccttcctgcgcggcttcatgctggacgagccgcgcaccttcgaagcggccgatcggctggtggaggactttgccgagctcgatggcgcgcaccatgcggtggtcaccgcgcggcgccaggtggaaaccctgacccctgcgcgcgagcaccatgcggcgctgatggcgttgcgccacagcgtcggcgagttgcgcgagctgcagctgggcgtggacagttaccgcgagcagcagcggctggccttgctggatgagcgtttgcaggagctggacaaccaggaccgcggactggccggcgaagaaggccagcgccgcgaatcgctggacaaccacgaacagaagctggccgggctggagcgcgagcagcgcgctgccggcggcgagcagatcgaagaactggaacgcgagcgtgcgcgcgtcgagcgcgagcgcgacgaacgcctgcgccgccgcgcgcagatcgaacaggcctgccgccagctcggtaccgccctggcggccggggccagcggctttgccgcgcagatcgcacatgcgcaaaccgtgctggataacggcaagcacgatgccagcgcgctggacgacgccatcgccgaacgcatgggcgcgcgccgcgacgacgagcgccgctttgccgagatccgcgtcgagctggatgcgctgaagcgcgcgccatcgagcatgcccgcaccgatgcaggccctgcgcgcacggctgtgcgaagacaccggcattgccgaggccgcgctgccgttcgttggcgagctggtgcaggtacgcgaggaccagatggcgtggcgcggtgcgatcgagcgggtgctgcacggcttcgcacagtcgttgctggtggacgagcggcattacgcgcaggtcagcgaatgggtcaaccgcacccacatcggcacgcgcctggtgtacttccgtgtgcgtcgcaacgacgagctgcactcgcggcgggtcgatcccgacgcgctgccgggcaagctgcagctgcgcgagcatgccttcaccgagtggctgcgcaacgagctcacccgccgcttcgactatgcctgcgtccagaacgcaaccgcgctgcgcaacgccgaccgggcgatcacccgcgagggccaggtcaagcatcccggcgatcgctatgagaaggacgaccgccacgcggtcaatgaccgcaagcggtggttgcttggtcacgacaaccgcgacaagctcaaggtgttcgagcgcgaagcgcaggcgctggcccagcgcatcgccagctgcgatgccgatgtcgcagcgctgcgcaagcagcgcgaacaggaccaggaacgccaactcgctgcacacacgctggtcgagcgcgactgggacgagatcgacatcggtcccaagctgcagcgcctgaccgatatcgacgagcagttggtgcagctgcgcgaaggcaacagcggtctgcgcgcgctcggccaggccatcgataccgcacgcaccttgcgcgaccaggccaagcgcacctatgacgatgtgcggctggagcgcgcgcaactggcgcgcgagcgcgtgcggctcgagcagcaacacacggcgtgcgcgggccgcgccggcaccgccacgctcacgcccacccagttgcaggggttgcgggaacgtcttgccgcgttgaccccgctgtcgctggacaatctggaagcgcacttccgcgtggtcgagcgtggcctagccgagcaactggccgaaagccagggccgcgacagccggctcagcgcgcaactgctggaatgcttccgcaggtattgccagcaatggcccgaagacagcggtgatttcaccgtgagcctgtccagtgccgacgatttcctagcgcgcctggaccggctggaaagcgatggcctgccgcggcacgaacaccgcttcttcgacctgctgcagacccagagcaagaacaacctgctcgccctgcaacgccacaccgccgaagcccacaagggcatcaagcagcgcatggacgaggtcaacgccagcctggagcaggtgccgttcaaccgcgacaccatcctgaccatcgaggtcagcgaccgccgcctggccgaagtgcaggaattccagcagcagctgcgcgcggtgctgtcgcatcagcagaccgaagaccgcgccctggccgaggcgcagttcgccaccttgcgcaccttggtggcgcgtctgggcgcgcaggagccggacgcgcgccgctggcgcgaacaggtgctggacgtgcgcctgcatgtggaattcatcggtgtggaactggatgcgcaaagccgtgcgcaggtggagatctaccgtagcggcgccggcaagtccggcgggcagcggcagaaactggccaccacctgtctggcggccgcgttgcgctatcagctcggtggcgaagatggcgagctgccgcgctattgcgcggtggtgctggacgaagccttcgacaaggccgacaacgaattcaccgcgctggcgatgaacatcttcgagaacttcggcttccagatggtggtggccacgccgttgaaatcggtgatgaccctggagcctttcatcggcggcgcgtgcttcgtcgagatcagcggccgccacaactccggcgtgttgctgatcgagtacgacgagcaggcacagcggttgaagttgcccgagcgctcgcgtggcgatgagccagcagttgccgaggccgctgacgctgcgccatcgatcgaggctgcgggcaagcccgaagaagtgcagggcgccgcaaccgcaggtggtatgacagctgacgctgtctcaacagatccgacatcgcctgcggtggacgagacctcgcccgcagcccagaaaacgcaacctagcaagcgcaggccggcagtggcgacggcgaacgagcagaacacgaacgccaaacctgcattttccacgcgcgctgcggcacaggctcaagcaaaacagtcgaagaaatcgccttcgcgcgctccggcagtgactggcaagccggcatcggacaaacgcgcagcgggcgcgcagcaagcgtcggtggcgtcgtcaggaatcgcgaccaagtccaatgcaggcaagaccacacggtccgtaaaaacgccgggcaagccggttgcggcgacgggcgcatccaacgccacatcaaagaaggccgccgcaacatctacagccaagccgcgtgcaacagccgcatcgattgggcagccaggacgtggcgccggcaagacaacctcggcacacgcggcggtcaaaccgtcgctggctaaaaagcgcggtgcgaaagcaggcgctgcgcagtcgcgcggcaagcgctga

SEQ ID NO: 45287 - DNA, 1363 bp, Xanthomonas vesicatoria
cctgttgctggacggcgagcgccggctgccgtcggcagtactgcatgcgcgcctgcagcgtcagctggatgcgttgcgcggcgatgaactctcgcgcgagctgccgcgcaccgcgcaggcatatctggcgcattggctggcgcagggttggctggagcgccgcctgcccgaaggcgcagcagaggaagactacgaactgtcgcgtgcagccatccaggccatccgttttatcgccggcttgcgcgagagcggtagcagcgccaccgaaagccggttgtcgctggtgatccagcaactggtccagctggccgggcagaccgaagccgacccggcgacgcgcctggccgcgctgcgcgaagaacgcgaccgcatcgatgccgagatcgagcgcgtatcgaccggccgggttgccgcactggacggcaagcgcgcactggagcgcacccgcgacgtgatccatctggccgacgaactggccgaggacttccaccgcgtgcgtgatgacttcgagcagctcaaccgccagttccgcgagcgcatcatcgacgacgaaggcgcgcgcggcgatgtgctggagcaattattcagcggcgtagacgtgatcgccgacagcgaagccgggcgcaccttcgaggcgttctggagcctgctcaacgacacccagcagagcagccagctggaccaggcgctggacgcgctgctcgcgcgcggcttcgcgcgcaagctcgatcgtcgcgaacgcgctttcctgcgcgggctcaccggcaccctgctggagcgcggcggcgaggtgcatacggtgatgcaacacttcgcgcgcagcctgcgcgggttcgtgcagagccgcggctatctggaacagcgcaggctcaatcagctgctcaagcaggcgcagggtgaagccctgcagctgcgcgacagcttgcacgccaccgccgccaccggctacacccaggcgttgagcgccagccgcctgcgctcgctgtcgcagtggcggctgcacgatccacggctcacccaggtcgatggccgcgtctacgcagccgacgcggcagagatatcgctggacagcgtgggcgacctggtcgcgcaatcggagatcgatgtgcgcaccctgcgcaacgatctgtacgtgctgcttgggcagcagccccggctcacgattggcgatgccctgcagcaacgcccggccccgcaggggctgggtagcgtgatcggctatctgtcgctgggcacgcgccatggcgtggtgatcgacggccacatggaaacggtgcaatgggaaggcggcgacggcatcgtgcggcgcgcgcgcattcccttggtgtggtttacccgggagaaacgcaatgaactggtctga

SEQ ID NO: 45288 - DNA, 705 bp, Xanthomonas vesicatoria; identical to SEQ ID NO: 45285

SEQ ID NO: 45289 - DNA, 4014 bp, Xanthomonas vesicatoria; identical to SEQ ID NO: 45286

SEQ ID NO: 45290 - DNA, 1467 bp, Acinetobacter baumannii
atgaatattcagggaatacaggcaacttaccgccgtttatatcatgaaagttcagtctggaaattattaagggcggaaaatgcaccactcattctagcatttattgcagatctatttgcggaaaaagccgaagttctgtatggacatgccagaagcctacttgatgagtttatcaaatatagtcgtgaacaaggactgtggcaaactgaaaataatgcagcctactatttaaatagttggattaaggcaggttggttgcgtgaaatggatgacttactaagcaagaccgataccagtgaaacagtattacgtttttgtcgcaatctggatgaacggcatagcagtaccactgcgtcacatttaagaattgtacaggatgctgttcgggattttgtagtggctattagtgacaatattgacgatcgggtggccttgttagaacaaaagaaagcacagattcaacaggaaattgatgatctgcatgcgggggtagttatgcagctcaatgaaacggagcaacgagaacgaattcgggagatttatcaacttgcttctattttaacaggtgattttagacgagttgaagatgaaattcgtcagttagacaaagagttaagggttgagatgattgggggcaacgctgcacgaggtgaggtgttacttgcattgatgcaaaaagaacaactacttgccaagagcgatgcgggtagtgcttttgatggcttttgtcaattattgcaggatcaggatcgttccactgaatttcgggaacagctacgcagtattctcaatcatcctgtggcacaacagctcagtgaagcacaaaagaaatatttagggcaactcatgcgtgaattggcacgggaaagtagtagggtctttcaggtacgttgtagaacagaagagggccttcgggcatatattgaaagcggtgctgcactggaaaatcgtatgattgattgcttactgtctcaattagaaaagcaggcggtgaatttaacactggaacagcaatttgatttaaagactgaaacacagatgtatttagccgtaggttcggttcaagttggctcaccagagaattttgcattgaaaagtcctaatgagcatatggatacacgaggcgtacagcagcagcaaaatcgtaaagaaccaagtgctcagatgctgcaatatttggacagtgtacaggttcggatgattgctgaaaaaacacacaatactttgctaaaaaaaggtgtcatgagtattgccaatttaactcaagaacatccattacaggcaggtctagaggagttagtggcgtatttgcgtattgccaaagccattaaagcgcctcaattgacagaaaaaaatgagcagattcagtttagggaccaacatggtgtgaacctgcaagccagtatcccgacctattatttaagtgctgaattatttcctgaaaatttagatgaactgacattataa

SEQ ID NO: 45291 - DNA, 786 bp, Acinetobacter baumannii
atgcaaccacaaaaaagcagtttttttgacagagtacgtcgcccatcatctgatgaaaatcatgagattcaatcgcagtgcatcgcggaagtcgaagatgagtttacacgggttgaagtggatcaagagctagaaaatgatcctcaggcaagcgatgaactgtctagtatgccgcatgaggccagacgggttttggtctatttgatacggcatggaacaattttggcagctgaaaacctgaaactgtttgatgtgttatgtcgttatgaaacagcgattcgtcaacatcttgccgaagtgtatattcaactaattttagatgccagacagggcgttgcctatattattaatgtggaaagcattggtaatgaaaatgataatagtccattatcagatgattttcctacactgattcgtaaacgtactttgactttgtatgataccttggttctgctaattttacgtaaatattatcaggaacgagaaaccgcaggtgagcaaaaaattattattgatctggagcggattcagggaaatttaattccttttattccgattaccaatcatgaaagtaaagatattaaaaaattaagtggtactttggataaatttagtgaaaagaaaatacttagtgtgatacgtggtgaagaggggcgttatgaaattacaccgattatccgttatgtggtcaatgccgaatttctacaaagtttattaagcgaatataagcaattggcggataaaacagctctgcatcaatctgaacaaaataaaggaaaagtataa

SEQ ID NO: 45292 - DNA, 1203 bp, Acinetobacter baumannii
atggctagaacagcagtatggggacttttgcctgatgatgccattgcccaattacgcaagaaagaatgggatcatcaaaggcatttaaaacaacgcttgcgtcatcaacgtccattcccgattgtactttcactcaaagccccgacaggccagcaggcaatgagcaatttggatcatttccatacattttttaaggcatggaaaaattttgtctatcctgatctggtggaatggcaacaacgtcaattcaaacagttggcaacacaacaagtccctgttaagttgataattcctacattggatgtcatggtggatgtgctaggacagcaacagcgatttaaaaaaatttcagataaaatttcctatttgttactgcagccatttgtacagccacaagtggaatatgctttgttctgtacattaattgaatatttggaactgcttgaaaaatatcgtgaggcagactggcaattgctgatccagttgatttcccagcttaaagcaaatatgggagcaggacattatttaagagcattacctttgcagcatgttgataccaagtttttagaaagaaatgtgctgttggtcgaagccatttgtgatgtcttataccatggagaagtacaggcagcaggtggattactaaattggctcaattgcctggatcatccgaaaggctggctgatgatcaaacctttatgtaccctagtgcaacagtcattgggaggactgccagtttttcagctttctaccgatgtattgatacaatttgaattgcctgctcaacatattattgtgattgaaaatattcagtcaggtttagctttacctgtgatggaaaatacgatagttgtctgtggcggtggtaaaaatattaaatggctagatgcaccttggctaaaaaataaacaagtatattactggggtgatattgattccgaaggattaaatatcctgagcatggtacgacacaaagttccggatgttattcctttgatgatgaatgaagccactctattacaatttcaggataaaatggtggatgagcctgattcagtttttcttgaacctaaatatttaacagacgaagaattaatattatttcatcaattaagaagtaagtcttatatcaataaacgtctagaacaagaaagaatcactaatgattggatcagagaaaatttaaaaaggcaaattaaataa

SEQ ID NO: 45293 - DNA, 1446 bp, Mycobacterium setense
ctggaccagctgtaccagctcaaccgggaggtggccgattcgcgctcggcgcggttgctggcgacgaacaacctggccacctacctcacgctgatggagcgtcacctggaccgcggcgccaagctcaccgagatagacctggtggtccggctggaacgcgacctggcggacctgggctccgagaccgatcagtcgggcctgtcgctgatcaagtactgggccggtcagggctggctgcaccgggtcaccgaacagtccggcgacaccgaacgcaatgtctgccacctcacgtacgaggcgcgggccgtgctggatttcgcgcgtcgcatgcgccgcgaggacacgctcgccaccggcggatcgatcacggggatcgcggccgggctgcggcgcgtggccggacaggtcagcaacgacccggaccgcatccgcgccgacatcgaagccgagatcgccaggttgcgtgacgaattggatgcgctcgagcaagggcagcggcccgagcccgacctggtcgacatcgaagacgaggcccgcgccatcgctctgcagatggagcagatcatctccgacatcgggcagtacggcagcatgctcaaccgcatcaccacccgactgctggatgcctcggccgacaccgatctcggataccgggaacgtcagcgccagctgttcgacgactacgagtcgctgttcgcctcccgcgagagcgcttcctacacggccttcacccggatgatccaggatcccgagcagcgggccgcgctggtggccgacatcgaagaggtgacccgcgagctgccgcacctcgacccgggtctgcgtgaggtgatgacggggttcttcagcctggtctcggcgcagacggccgaggtgggccggacccggcagcgctgtgcccgccggatcaaacgcttcgtcgcctccggcacgctggagcacagccgcggtgtcacccggcagctcaacgatgcgctggccagcgcgcatgagctgctcagtgtctcgctcgcagacagccgcatcggtatcgaggtgccgttggtgcggaccgacttcaattcgattggcgccgttgccttcaagatccgcgatgccatcccgccgtcgcaggccgagccatccgagggtgaggtcaacctgtcggcgttctcggcgctggcctcccaggtggatgccgccgagctggccgagctggtaaacgacgcgatcgcggccgggccgctgtcgctgcccgacgcgatcggcatgctggattccgcctatctggggcatgtgatcgtgctgtggtcctgggccctcaaacaaggcaccgaaggcggggccgacgccggttcggcagcgcgggtgcgcttccggtcgctggagggcaccgaccgcgaaatcgagatcccccgactggttttcaccgaaccggtccctactgtcagcgagagcctgctatga

SEQ ID NO: 45294 - DNA, 732 bp, Mycobacterium setense
gtgcaggcctcagatgtggcgatcgacttcgatgcgctgccgagcatcgacgcggtcgagcggtccaccgaccagcgtcgtgcgccgcgcttcgacggggacgtcagcgagttgcccgaccgggcctgctgggcgctgcagcacctgctgtcacgtcgctacgtcagcaaggacaaccattccgaattgtggtcgtgggtcacccgataccgcagcgagctcaccgtgcggctgtcggaactcgatatgcggctgtgcatctcggatgatcacgacatcgcctacgtcgagcaggccgactacgagtcgcagtggcgccgccggctactgcgccgcgagaccttgaacacctacgattcgatcctggccctgcacctggccaagctgatgcgggccgccgcacgcgacgagaatgtcctgatcagccgcgacgagatccacgagctgttcgccggggtgaacaacgacaccgaccgcgacatagcgtccttcgacaagcggatcgacaacgcgatcgagcggctcaccgacatcgacatgctcgcccgcaatcgcgaggacgaggacagcttcaccatcagccccgtggtcaacgcgatcatgacggcctcgatgatcaccgaactgcagcagcagttcgagcagctcaagcggaccgccaacggcaccggcaatgatgccgacgaaaccgatgacgcacgacttgacgacgaagtggacgctcatggctga

SEQ ID NO: 45295 - DNA, 3363 bp, Mycobacterium setense
atggctgacccgaccaaccagttctcgttgtcgcgcctgcaggtgatcaactggggtgtgttcgacgggtatcactcgatcccgttcagccggcacggcacgctgatcaccggatcctccggcagcggcaaatcatcactgctagatgcgatttcgctggccttcctaccgtcgcaccgccgcaacttcaacgcctccggcgataccaccgccgcgggatcgggtacgggcaagcgcaccgtcgacaagtacgtgcgcggagcctggggcgagcggcgcgagggcaccagtcgccagatcatgtatctgcgcgggaccggtccggcctggtcggccgtcgcggtcacctacacggaccgcaccgggcgttcggtcaccggtttggtgctcaaatggctggccgccgagaagacctcggatccgggcagtcgttactacctgatcgacgacgaccgcgacatcttcggcccgtgcaacagatgggccgccaatggctatgacgcggcggtgttccgcgacgacggctggaccggcggtcgcagtgagagccagtacctggcccagctgtactccagcatcggcatccgggcgtcggaggccgcccagcagctgctcggtaaggccaaatcgctgaaaagcgttggtggtcttgaacaattcgtccgtgaattcatgctcgacgagccggccagcctcagcggcgtcgaagaagcgctggagcagatcaacccgctggtcgaggcccgcggcctgctcgatgtggcccgccgcaagcgcaacacgctgggcaacattgccgcggttcaggcgcgttacgccgacgaggcggccaagttcggggtgatcgacaccatcgacaatgccatgatccgcgattacgtcgaccatctccggctggcgcaggccggcccggagatcgacaatctcgacgaccagatcacccagctcggcgcccagcgtgacgagttcggttcgcagcagcgtcagctcaagaacgagcacaactcgctcatggcacagatcaacaccgtcacagtggatctcgtgccgctgcagcaacggctgacggaggccgagcggatcagcgaagaggtatcgcgccggcgcaccacctacgaggacaaggtcaccgcactgggcttgaccccgcccgacaacggcgaggaattctggtcgctgcgtgagacattgatggacgaggctgaccggttgcatcgcgaattgttcaccggcaaccagccctacgtcgaggcgtcggcgaaggaggttcgggcccgcgaggcgcgggagagtgtggaagccgagctggagcgggtgcagcggctgggctcccctctgcccaggaccgagtacgagatgcgggcacgcatcgcccgcgcactcgacatctccgagcgcgacctggtctacgtggccgagctgatggagctcaagccggaggagtcgcgctggcggctggcggtcgaaaaagtgttgcgcggggcgggattacgcctgctggttcctgatgctcacatggaacgcgcgctgcggttcgtcaacgagaacgacatgcgcggccggatccagctgcagcatgtccagcacggcacgcaactgcgcaccccgcccgcgggcacgctggccaccaaactccagctcgccgatccgacgcacgatagcgctgtggaggcgctcaacgtgatcgccgcggtcggtgactatgtctgtgtcgacgggccggaagagttcaccgagcagtcccgtgcggttaccgatcagggtctgcgcaaggacagcggccggctctcgatcaaggacgaccggtcccggctacgaccttcggactacatcttcctcggcggcaccgcggccaaaatcgaagcgctgcaggatgatctgaccgcggcccaggatgtgtaccaggtggcacgcaccgcccgtgagcgtcttgacgagcatcgcggccagttgcaatcccgggaacgggcctgtcgggccctgtgtgaccagttcatgcagtggagcgacatcgacaccgattcggtggacgagatgctggagcgcctgcaggacgaacacgatctgctggtgtccgacaaccccgacgccgaacggctgcaacagcgggctgacgaatgctgggagcgggtggagaaggtcatccagcagatcggctcgctcaacgaacgtgagaccacgctggaccggaggcgcaccgcactcctggagctgagcgagctcctgacggagcggctcggttccagtgagtttccgtcgcatgcccgcgacaccatcgacggctacgccgccgacatcgccttgaccctggatctgctcgactccgagccgtaccgggctgaactgacgcgggtcatcagccgcgagcgagatcggttgcgggcggaccgcaaccgctcgcacgatgagctggccgggatcatggccgcctacgacagctcgttccccgatgcgattccgaacgacagcgacgtgttcgacgagcgggtgcacgactatgtggcgctgtgccgccggatcgacgagcgcgagttgcccgacgcctacgagcgcatgcagcggctgatcaccgagcaggcaccgggggcgatcctcaacctgcacatgatcgccgacaacgaggcgcggcggatcaccgagcagatcgcccgcgtcaacaccggcctgggggccgtggagttcaaccgtggcacgcggttgacgctgcacgccggtacccggcatctcgcggcggtggacgagctcaacgagaaggcgcagcgcatctcggctcgggtgtcattggtgagcttcggcgacgagaccgcgatgttcgagcagtacaccgacattctccaactgcgaaagttgttggcgggcaacacgcccgaggaccgacagtggacgcgcgatgcgctggatgtgcgcaaccgcttcgtgctgtactgcgaggagcgcgacgccgagaccggcgaggtgatccggacctacagcaactccggtgacaactccggcggtgagcaggagaagctgatggcgttctgcctggccggggctctgagcttcaacctggccagcccggacagcaatgacaccaggccgttgttcgcccagctgatgctcgacgaggcgttctccaagtcggacccgcaattcgcccagcaggcactctcggcgttccgcaagttcgggttccagttggtgatcgtgtcgaccgtgcagaacagcaccacgattcagccctacatcgacaacgtggtgatggtgtccaagtctgacgcgtcggcgcccaatgcccggccggtggcgtcggtcacctcggcgtcgatctccgaattcgccgatctgcgacggacttcgggggacgccgtaccgagcgtgtga

SEQ ID NO: 45296 - DNA, 1446 bp, Mycobacterium setense
ctggaccagctgtaccagctcaaccgggaggtggccgattcgcgctcggcgcggttgctggcgacgaacaacctggccacctacctcacgctgatggagcgtcacctggaccgcggcgccaagctcaccgagatagacctggtggtccggctggaacgcgacctggcggacctgggctccgagaccgatcagtcgggcctgtcgctgatcaagtactgggccggtcagggctggctgcaccgggtcaccgaacagtccggcgacaccgaacgcaatgtctgccacctcacgtacgaggcgcgggccgtgctggatttcgcgcgtcgcatgcgccgcgaggacacgctcgccaccggcggatcgatcacggggatcgcggccgggctgcggcgcgtggccggacaggtcagcaacgacccggaccgcatccgcgccgacatcgaagccgagatcgccaggttgcgtgacgaattggatgcgctcgagcaagggcagcggcccgagcccgacctggtcgacatcgaagacgaggcccgcgccatcgctctgcagatggagcagatcatctccgacatcgggcagtacggcagcatgctcaaccgcatcaccacccgactgctggatgcctcggccgacaccgatctcggataccgggaacgtcagcgccagctgttcgacgactacgagtcgctgttcgcctcccgcgagagcgcttcctacacggccttcacccggatgatccaggatcccgagcagcgggccgcgctggtggccgacatcgaagaggtgacccgcgagctgccgcacctcgacccgggtctgcgtgaggtgatgacggggttcttcagcctggtctcggcgcagacggccgaggtgggccggacccggcagcgctgtgcccgccggatcaaacgcttcgtcgcctccggcacgctggagcacagccgcggtgtcacccggcagctcaacgatgcgctggccagcgcgcatgagctgctcagtgtctcgctcgccgacagccgcatcggtatcgaggtgccgttggttcggaccgacttcaattcgattggcgccgttgccttcaagatccgcgatgccatcccaccgtcgcaggccgagccatcggagggtgaggtcaacctgtcggcgttctcggctctggcctcccaggtggatgccgccgagctggccgagctggtaaacgacgcgatcgcggccgggccgctgtcgctgcccgacgcgatcggcatgctggattccgcctatctggggcatgtgatcgtgctgtggtcctgggccctcaaacaaggcaccgaaggcggggccgacgccggttcgtcggcgcgggtgcgcttccggtcgctggagggcaccgaccgcgaaatcgagatcccccgactggttttcaccgaaccgatccctactgtcagcgagagcctgctatga

SEQ ID NO: 45297 - DNA, 732 bp, Mycobacterium setense
gtgcaggcctcagatgtggcgatcgacttcgatgcgctgccgagcatcgacgcggtcgagcggtccaccgaccagcgtcgtgcgccgcgcttcgacggggacgtcagcgagttgcccgaccgggcctgctgggcgctgcagcacctgctgtcgcgtcgctacgtcagcaaggacaaccattccgaattgtggtcgtgggtcacccgataccgcagcgagctcaccgtgcggctgtcggaactcgatatgcggctgtgcatctcggatgatcacgacatcgcctacgtcgagcaggccgactacgagtcgcagtggcgccgccggctactgcgccgcgagaccttgaacacctacgattcgatcctggccctgcacctggccaagctgatgcgggccgccgcacgcgacgagaatgtcctgatcagccgcgacgagatccacgagctgttcgccggggtgaacaacgacaccgaccgcgacacagcgtccttcgacaagcggatcgacaacgcgatcgagcggctcaccgacatcgacatgctcgcccgcaatcgcgaggacgaggacagcttcaccatcagccccgtggtcaacgcgatcatgacggcctcgatgatcaccgaactgcagcagcagttcgagcagctcaagcggaccgccaacggcaccggcaatgatgccgacgaaaccgatgacgcacgacttgacgacgaagtggacgctcatggctga

SEQ ID NO: 45298 - DNA, 3363 bp, Mycobacterium setense
atggctgacccgaccaaccagttctcgttgtcgcgcctgcaggtgatcaactggggtgtgttcgacgggtatcactcgatcccgttcagccggcacggcacgctgatcaccggatcctccggcagcggcaaatcatcactgctagatgcgatttcgctggccttcctaccgtcgcaccgccgcaacttcaacgcctccggcgataccaccgccgcgggatcgggtacgggcaagcgcaccgtcgacaagtacgtgcgcggagcctggggcgagcggcgcgagggcaccagtcgccagatcatgtatctgcgcgggaccggtccggcctggtcggccgtcgcggtcacctacacggaccgcaccgggcgttcggtcaccggtttggtgctcaaatggctggccgccgagaagacctcggatccgggcagtcgttactacctgatcgacgacgaccgcgacatcttcggcccgtgcaacagatgggccgccaatggctatgacgcggcggtgttccgcgacgacggctggaccggcggtcgcagtgagagccagtacctggcccagctgtactccagcatcggcatccgggcgtcggaggccgcccagcagctgctcggtaaggccaaatcgctgaaaagcgttggtggtcttgaacaattcgtccgtgaattcatgctcgacgagccggccagcctcagcggcgtcgaagaagcgctggagcagatcaacccgctggtcgaggcccgcggcctgctcgatgtggcccgccgcaagcgcaacacgctgggcaacattgccgcggtacaggcgcgttacgccgacgaggcggccaagttcggggtgatcgacaccatcgacaatgccatgatccgcgattacgtcgaccatctccggctggcgcaggccggcccggagatcgacaatctcgacgaccagatcacccagctcggcgcccagcgtgacgagttcggttcgcagcagcgtcagctcaagaacgagcacaactcgctcatggcacagatcaacaccgtcacagtggatctcgtgccgctgcagcaacggctgacggaggccgagcggatcagcgaagaggtatcgcgtcggcgcaccacctacgaggacaaggtcaccgtactgggcttgaccccgcccgacaacggcgaggaattctggtcgctgcgtgagacattgatggacgaggctgaccggctgcatcgcgaattgttcaccggcaaccagccctacgtcgaggcgtcggcgaaggaggttcgggcccgcgaggcgcgggagagtgtggaagccgaactggagcgggtgcagcggctgggctccccactgcccaggaccgagtacgagatgcgggcacgcatcgcccgggcgctcgacatctccgagcgcgacctggtctacgtggccgagctgatggagctcaagccggaggagtcgcgctggcggctggcggtcgaaaaggtgttgcgcggggcgggattacgcctgctggttcctgatgctcacatggaacgcgcgctgcggttcgtcaacgagaacgacatgcgcggccggatccagctgcagcatgtccagcacggcacgcaactgcgcaccccgcctgcgggcacgctggccaccaaactccagctcgccgatccgacgcacgacagcgctgtggaggcgctcaacgtgatcgccgcggtcggtgactatgtctgtgtcgacgggccggaagagttcaccgagcagtcccgtgcggttaccgatcagggtctgcgcaaggacagcggccggctctcgatcaaggacgaccggtcccggctacgaccttcggactacatcttcctcggtggcaccgcggccaaaatcgaagcgctgcaggatgatctggccgcggcccaggatgtgtaccaggtggcacgcaccgcccgtgagcgtcttgacgagcatcgcggccagttgcaatcccgggaacgggcctgtcgggccctgtgtgaccagttcatgcagtggagcgacatcgacaccgattcggtggacgagatgctggagcgcctgcaggacgaacacgatctgctggtgtccgacaaccccgacgccgaacggctgcaacagcgggccgacgaatgctgggagcgggtggagaaggtcatccagcagatcggctcgctcaacgaacgtgagaccacgctggaccggaggcgcaccgcactcctggagctgagcgagctcctgacggagcggctcggttccagtgagtttccgtcgcatgcccgcgacaccatcgacggctacgccgccgacatcgccttgaccctggagctgctcgactccgagccgtaccgggccgaactgacgcgggtcatcagccgcgagcgagatcggttgcgggcggaccgcaaccgctcgcacgatgagctggccgggatcatggccgcctacgacagctcgttccccgatgcgattccgaacgacagcgacgtgttcgacgagcgggtgcacgactatgtggcgctgtgccgccggatcgacgagcgcgagttgcccgacgcctacgagcgcatgcagcggctgatcaccgagcaggcaccgggggcgatcctcaacctgcacatgatcgccgacaacgaggcgcggcggatcaccgagcagatcgcccgcgtcaacaccggcctgggggccgtggagttcaaccgtggcacgcggttgacgctgcacgccggtacccggcatctcgcggcggtggacgagctcaacgagaaggcgcagcgcatctcggctcgggtgtcattggtgagcttcggcgacgagaccgcgatgttcgagcagtacaccgacattctccaactgcgaaagttgttggccggcaacacacccgaggaccgacagtggacgcgcgatgcgctggatgtgcgcaaccgcttcgtgctgtactgcgaggagcgcgacgccgagaccggcgaggtgatccggacctacagcaactccggtgacaactccggcggtgagcaggagaagctgatggcgttctgcctggccggggctctgagcttcaacctggccagcccggacagcaatgacaccaggccgttgttcgcccagctgatgctcgacgaggcgttctccaagtcggatccgcagttcgcccagcaggcactctcggcgttccgcaagttcgggttccagttggtgattgtgtcgaccgtgcagaacagcaccacgattcagccctatatcgacaacgtggtgatggtgtccaagtctgacgcgtcggcgcccaatgcccggccggtcgcgtcggtcacctcggcgtcgatctccgaattcgccgatctgcgacggacttcgggggacgcggtacccagcgtgtga

SEQ ID NO: 45299 - DNA, 1557 bp, Bradyrhizobium japonicum
atgaggtcgggcccaggagccgcgtcattgaccttgttccgccatttgcatgacgacgcctttttagctttttcgcgcgatcacaagcacctgtacgcagcgtgtctgctggatctgcacgaacgcttcttttcaggcgcgccgtcgttcccgacgccgcagcaggtggtccacgccatctacgacgtcatgcgcgccaaccccgtcctctggaacgagggcgatgatttcggcagcctgccggaaatgatctccgcgagacgccgccggatccggaaggccgacgtcgcgctcgcttccgagaagggcgacaaggcgctcggtcttgcccgacaactatacgcccggctgctcgtctggggatggcttgaagaggaggaatacgggcttcgcgtcactgtggacatggctatgggaccgctgctcgtgctgcaacggctcgcgagcctcaacaaggatctctcgcagcgattcggcggcttgatcgtgcaaatccgcctcaacctggaggccgtcgaaaaactgaggcctgagatcaccgaccgcaagcagcgcgaagccgcgctcgccgtccgcgaggcgcgcaatcaggccgaccagttcactaagagtctgcgggccattctggccgacctgaagcgcgtccgacggaccgtcatggagtcgaaaacagtcgctacccggctcgaagcctttttcgaggagttcatcgaacagctcctgctgaaggatttcgagtccatcctcaccgtcaaccatccataccgcttccgcgacgccatcgtcgatctcgcgcggaggatctcctacagcccggaaaccatgcaggtcctcgccgaggagtacatagcttccagcatggcagccgacatcgaggacggtcgaatggccgcggccgacgacctgctggctatcgaaagcatcttcgatcagatcggggagatgttcgacaggatcgaggccttccgcaggcagctcgaagcccgggtccgcaacaccattaagtacgccgagcggggcgggcagggactcgtcggccgggccggcgacctggtgcggcgcctggatgccttactgcgcgacggcaggcaccacaaggcgacaatcgaatggagcatcgagccgctgcggtcgccctggtcggagcaccatcaggcgccggccaggcagccgcgccgtcccgtcgaagcaagggagctcgccgagccgccgtcggatccgttgtatgaactgcgcaagaagctccgcctcgagtacatcgctcgcatcgcgccccgccccgaggatgtcagacgattcctcgagggccaggtgccgccattcgcgaccagggaagcccgcttcatggaaatcgataccgtggacgactttctcgccttcgattgcgcccgccgatatgcgctgacaggcgaggttccggcgcaggtcgcggccgggttcgaactcgaaccgtgccccgacacgcccccacacgacagcgaatggctccgttgcgccaacttcctggtcaagcgatcgggcgcactccggaaggcgagggcggctcatgctcagtga

SEQ ID NO: 45300 - DNA, 639 bp, Bradyrhizobium japonicum; identical to SEQ ID NO: 43202

SEQ ID NO: 45301 - DNA, 3435 bp, Bradyrhizobium japonicum; identical to SEQ ID NO: 43203

SEQ ID NO: 45302 - DNA, 1170 bp, Bradyrhizobium japonicum; identical to SEQ ID NO: 41690

SEQ ID NO: 45303 - DNA, 1470 bp, Xanthomonas axonopodis pv. phaseoli; identical to SEQ ID NO: 45247

SEQ ID NO: 45304 - DNA, 702 bp, Xanthomonas axonopodis pv. phaseoli
atgaactggtctgaggacactggcctatacaccgacgaggacaccggggcgccggccatcgacgaccgcatgccgatggcgcaaacatccggtgccgagccgcgcggcgagctgtttttgggcgacaccggcacgctgtcgttcgatgcgcggcgtgcgctgtgccagttgctggcagggcccagcatcgatgcgcaacgtcacggcgcgctgtggccggcgttgttgcgcaacgaggtggcgatccgccaggtgctgtgcgaactgtttctggagttggtgctcgaccgcgagggcggggtggcctttacccgtcaggccgacaccgcagagctggaatcgcccacgctgctgcgcagtgcgccgctgacgtttatcgagtcggtgttgctgctgttcctgcgccagcaactggccgaggccgacacgcgcggcgagcgtgcagtggtggacgaggcgcagttggtggaagccttgtcggtgtacgaaaagaacgtgtccaccgatcgggcgggcttcgcgcggcgggtgatgacggcgatcggcaagatgcgcgacaaccagttgctgtcgcgcttgcgcggcagcgaggagcgctatgaagtgtcgccggtgttgaagctgttgttttcggcagaagatgtgcaggccttggtggtggcgtatcgggagctccgtgagggcgaggttgcgctggattga

SEQ ID NO: 45305 - DNA, 4023 bp, Xanthomonas axonopodis pv. phaseoli
atgaattcccagtccaatctgtcgccggcgcagccgggtgcctccttgtttgccgagacgctcgccgagcaacgtgcgcagcagttccgcatgcggcgcttgcaggtgcacaactggggcaccttcaatgggctgaccgaagtgccaatcgcgcagaagggcttcctgttcgttgggcgttcgggctcgggcaagtccaccttgctggatgcgatgtcggcattgttgacgccgccgagcatcgtcgacttcaacgctgccgcgcgcgaagccgaacgcagtgggcgcgatcggagtctggtgtcgtatgtacgcggtgcgtgggccgatcagcaggacagcgcgtccggcgaaatcgccacgcaatacctgcgcaagggcgccacctggaccgcattggtgttggagtacgcgaacgcgcatggccagacggtgagcctgatccggttgttctggatcgccggcagcggtaacgcggcggccgatgtgcggcgtcactacatggtcgcgccacgccgtttcgacgtggcgaccgagctggatggcttcgatctcgacctgcgcaagctcaaggcgcgattgggcgatgaagttgcgcatttcgacggcttcgctggctatgccgaacgcttccggcatgcgctgggcatcggcaacgagatggcgctgcggctgttgcacaagacccagtcggccaagaacctgggcgatctcaatgcattcctgcgcggtttcatgctggacgagccgcggaccttcgaagcggccgaccggctggtggaagattttgccgagctcgatggcgcgcaccatgcggtggtcaccgcccggcgccaggtggaaaccctgacccctgcgcgcgagcaccacgcggcgctgatggcgctgcgccacagcgtcggcgagttgcgcgagttgcagctgggcgtggacagctaccgcgagcagcagcggctggccttgctggaggagcggctgcaggagctggacaaccaggaccgtggactggccggcgaagaaggccagcgccgcgaatcgctggataaccacgaacaaaaactggtcggcctggagcgcgagcagcgcgccgccggtggcgagcaggtcgaagaactggaacgcgaacgcgcacgcgtcgagcgcgagcgcgacgaacgcctgcgccgccgtgcacagatcgaacaggcctgccgccagctcggtaccgccctggcggccggcgccagcggctttgccgcgcagattgcgcatgcgcagaccgtgctggataacggcaagcacgacgccagcgcgctggacgaggccatcgccgaacgcatgggcgcgcggcgcgacgacgagcgccgctttgccgaaatccgcgccgaactggaggccctgaaacgcgcgccatcgagcatgccggcaccgatgcaggccctgcgcgcgcggctgtgcgaagacaccggcattgccgaggccgcactgccgttcgttggcgagctggtgcaggtacgcgaggaccagacggcctggcgcggcgcgatcgagcgtgtgttgcacggctttgcgcaatcgctgctggtggacgagcggcattacgcgcaggtcagcgaatgggtcaaccgcacccatatcggtacgcgcctggtgtacttccgtgtgcgccgcaacgacgagctgcattcgcggcgggtcgatcccggcgccctgcccggcaagctgcaattgcgcgagcacgcctttaccgaatggctgcgcaacgagctgacccgccgtttcgactacgcctgcgtggacaacgccgcagcgctgcgcaacgccgaccgcgcaatcacccgcgagggccaggtcaagcatcctggcgatcgctatgagaaggacgaccgccacgcggtcaacgaccgcaagcgttggctgctcggtcacgacaaccgcgacaagctcaaggtgttcgaacgcgaagcgcagacgctggctcagcgcatcgccagttgcgatgccgatgtggcagcgctgcgcaagcagcgtgagcaggatcaggaacgccaactggccgcgcacaccctggtggagcgcgactgggacgagatcgacgtcggccccaagctgcagcgcctgagcgatatcgacgaacagttggtgcagctgcgcgaaggcaacagcggcctgcgtgcgctcggccaggccatcgacaccgcacgcaccctgcgcgaccaggccaagcgcacctacgaagatgtgcggctggagcgcgcgcaactggcgcgcgagcgcgtgcggctcgaacagcagcaggcggcctgcgcgggccgcgccggttccgccacgctcacgcccacccagttgcagggcttgcgggaacgacttgccgcattgacgccgctgtcgctggacaatctggaggcgcatttccgcgtggtcgaacgtggcctggccgagcagctgaccgacagccagggccgcgacagccggctcagcgcgcagttgctggagtgcttccgcaagtattgccagcaatggcccgaagacagcggcgatttcaccgtgagccttgccagcgccgacgatttcctcgcgcgtctggaccggctggaaagcgatggcctgccgcgtcacgagcatcgtttcttcgacctgttgcagacccagagcaagaacaacctgctggccttgcagcgccacaccgccgaagcccacaagggcatcaagcagcgcatggacgaggtcaacgccagtctggagcaggtgccgttcaatcgcgacaccgtgctgaccatcgaggtcggcgaccgccgcctggccgaggtgcaggaattccagcagcagttgcgcgcggtgctgtcgcatcaacagaccgaagaccgtgccctggccgaagcgcagttttccaccttgcgtgcgctggtggcacgcctgggcgcgcaggaaccggaggcacgccgctggcgcgaacaggtgctggatgtgcgcctgcatgtggagttcatcggtgtggaactggacgcacagacgcgcgcgcaggtggagatctaccgcagcggcgccggcaagtccggcggtcagcgccagaaactggcaaccacgtgcctggcggccgcgctgcgttaccagctcggcggcgaagacggcgaactgccgcgctactgcgcggtagtgctggacgaagccttcgacaaggccgacaacgaattcaccgcactggcgatgaatatcttcgagaacttcggcttccagatggtggtggccacgccgttgaagtcggtgatgaccttggagcccttcatcggtggtgcgtgctttgtcgaaatcagcggccgtcataactccggcgtgttgctgatcgaatacgacgagcaggcacagcgattgaagctgccggagcgctcgcgtggcgatgagccggcagttgccgatgccactgacgctgcgccgtcgatcgaggctgcggccgagtcagcacgagtgcagggcgctgcaagcgcagatggcatggcaaccaacggcgtcccaatgcacacggcatcgcctgcgacggaggagaccccgcccgcagcgcaggaaacgcagactggtcagcgcaagccggcagtcgcgacgacgagcaagcagaacaagaccgccaagaccgcatcttccacgcgtgctgcggcacagcctcaagcaaaacgcccgaagaaatcgccttcgcgcactcctgttctggccggcaagccggcatccaacaaacgcccagcgggcgtgccggcggtgtcgtcaggagtcgcatccaggtccaacgtgggcaagaccactcggtcttcaaaaacgccgggcaagccgattgcggccacaagcgcatccaacgccacatccaggaaggtcgccgccgcatctgcggcattgaaaactgccgcagccaagccacgtgcaacagccacatcgactggtcagccagagcgcggcgccggcaagacaacctcgacgcgcgcggtggctaaaccgtcaccggccacaacgcgcggcgccaaggcaggcgccccgcggtcgcgcggcaagcgctga

SEQ ID NO: 45306 - DNA, 1464 bp, Brevibacterium linens
atgtccgccctgtcatccgcgctcgcctaccggcgactgctcgaatccgatgccaccctgcgcatgctccgggccgacaaccttgccgtcatggctggaaccctcgacgctcacctcggccgacccggcacacggatgaacaccgaggatctgcacgaaagcatcgacgccgacctcgaggagctgcgcgaccacttcgatctctcgcaacggaccgcgaaagcctactgcgatgactggcgtcgcgccgagatcctagtccgccgccccgccaccgccgccagaggcgaaacctacgaactctccgccgccggcttcgacgccatccgcatgctcgaacagctgcgcaccccaccgcagaccgccaccgaatctcgactggtcagcctcgcacaatccgtgcgccagctcgccatcgacaccgacccggacacctcacggcgcctcgacgcgctgcgggcgcagcgcgaccgaatcgatgccgagatcgccagagtccgccgcggcgatccgcgctcggtcgtcctcgaccgtcggagagcctctgaacgggtcaacgacatcctccagcaggcgcagagcctgcccgccgacttcgcgcgagtgcgagctcggttcgaagagctcaaccaggacctgcgggtgtcgatcctcgccgccgaggaagatcgctcacaggtcctggacgacatcttccgcggcgtcgacctcatcgaatcctccgacgagggacagaccttctccgctttctccgctcttgtgcgcgatcccgagcagaccgcggccttcgacgaagacatcacagccatcctcgaccgcgacttctccgccactctgcctctggagacgcgccggtcgctgcgcacactgatgcgacagatgaaggacggatcgagagaggtctccgacatcctcaccgagttcgcccgtggtctgcgccgctacgtccactcgcacgaattccaacgggaccgggcgatgcgcaacctcctccaggaaggactgtccgcagccgtgccagcttccgcactggtcaggccctatgacgatgtcggcgtcgaactcgaactctcgagctcgacgttgggcagcctcggcgaggtcgtcctccacgatcccgcagaattcgatgccggtgccgaactggcagaggccgaggacgcggagatcgacttcgcagagctgctggccgtcgcccgggaatccgaaatcgacttctccgaactcagtgacaacatcaaccacgccctccaagacgccgaggcggcctcggtgggggagatcctcgaccggttccctgccacacagggtctggccagcgtcgtcgggctgctgtccctggccaatacgcacggcgaggtcgatcccgacgagcgggaggttctcacctggtccggcatcgacggcacgggccgcaccgccacgatccgcagacactacttcactgaaggcatcactctatga

SEQ ID NO: 45307 - DNA, 687 bp, Brevibacterium linens
atgacctcgaccgagcagcacacgaacggcagcgcccgagacgaaactcgtgacgatgacagaggaatggggcattcgtcgacgggactgtggaccgacgacaccggcacactgggcgaacgtacacggcgggttctgctcgaacttctcaaaggtccgtacgtctccggtgcccaaagtccgcagctgtggtcggcgctcatcgccgacgaacgcctcgtccggtcccgcctccacgatctcttcctcgacctggtcatcgacaaaatcgacgaattcgcattcacacgcaaggtcgtcaccgatgaactcgacgtgcctgccgcagtgcgcagcgaaaggctgaccttcctcgacaccgcgatgctcatcgtcctgcgccagatgctgctcgccgctcccggagagaaccgcgtcatcatcgaccgcgaggaggtctacgagcgcatggcgatctaccgcaccggcgacgaatcgagcttcctccgccacctcaacggcgcgtgggggcggatgagcaaccgcctgcgcgtgctccacagcgtcagcgaggatcgtttcgagatctccccgatggtgaagttcctcatcgacgaagatcgggtgcgcgaacttatcgacgtctacgaacgcatcgccgccgggcagagcccccgaccggacctgacagaggaggacgacgcgtga

SEQ ID NO: 45308 - DNA, 3369 bp, Brevibacterium linens
gtgaccgaagcactcttcccgctcgatgccgccttcgtcgccgatcaggcccgcgcacgcggactgggcaggcccgacgtcggcgcccaatggcgactctcggagatccagatcgcgaactggggaacgttcgactccgacatccaccgcatccccgtctcccacaaaggccacctcatcaccggcccttcgggatcgggcaaatcctcactgctcgacggcatcgccgccgtactcaccccggacaaatggctgcgcttcaacgtcgccgcccagaccgccggcaaccggctcgatcagcgcagcctcatcagctacgtccgcggagcctggacgcgcacagccgactcggaagaggaccgggtcgtcagcaagttcctgcgaccccgcgccacctggagcgggatcctgctgcggtacgacaacggctccgatcggccgctgaccttggcccggctcttcttcgtcaaaggctccggtacgaagatgagcgacctctcggacatctgcgtgctcgaacgcgcaggcctcgacctgtcccaacttcagcaatatgcacgctcggggctcgaagcacgccgactcaaagcagaccggccggacgcgctcgtgacctccaacggctcgcatgcgaggttctacgctcgcatgcgcaaggtcttcggcatggccagcgaatccgcgctccagctgctgcacaagacccaatcggcgaaaagcctcgacagcctcgatcgcctcttccgcgaccacatgctcgaaaccccggtgaccttcgacctcgccgagaccgccatcgggcagttcggcgacctcaaggacgcccacgaccatgtcgtcgagctgcgccgccagcgcgaccacctgctcaaactccgtgaggcctccgcagccttcgactccgcccacgccgaagccgcggaatcgctggctctgggcgaggcgctactgccgttccagaaacgccgcgaactcgacctcctccgccacgaactgaccgccggcacaagtcggctcgtcgaactcgaagtcgccgccgaccgtgcgaaacgcaacttggacgacgcagtcgacgaatttgatctcgcccgccgggccaccctcgaactcggcggctccgaagccgaacacctgcagcagcgcatcgccacggccgaggccgaactcgaagccatcatcacccgatgggaagcgctcagccgccaactcgagcaggcgggaatcaccaccgtcccgcagacgcagaaggagttcgccgaactccaggccacgatcgccgcggccatcgacgacgacaccgaggtgaccggacccacccacgcagaccacgatcggttctccgccgcccgacgtcgtgtgcgggaactcgaagccgagatcgactccctgcgccgctcgggatcgaccgtgcccacgaacctgctcgaaatccgccgagaactcgccgacggcaccgggctgacggagaaggcactgcccttcgccgccgaactcatcgaagtcgatccggaggaagctgcgtggaccggcgccatcgaacgtgtgctgcggcccatggcactgaccgttctcgtgcgcagcgagaacatcgcctcggtccgcgcctgggtcgactcccaccggatccgcggacgactcgtgttcgaagaggtccccgcccatgtgcccggtccgcgaccggccggaagcgactcctcgctcatcaacaaggtgcacgtggccgagacgggattcggcgactgggtgcgctcgacactgtcggaacgattcgacttcgcctgtgtcgacgcccccgaagaactcgacgaccaccaccgtgcggtgaccgtcaaaggccagatcaagacctcgcgcacccgatacgagaaggacgaccggcgtcgcatcgatgaccgaagccaatgggtgctcggtgaccgggaatccaaactcgaagcactcgtcgcctccctcaaggaggcacagtccgaactcgccgaggcggaatcgatcgtcacgaccgccgacgcgcagaccgcgcaggcacaccggcgacgcggcatcctcagcggactgcgcgaacagacctggaccgatgtcgatcagaccggggcacgggagaaagtcgacgcgctggaagccagactgcgcgaactcgaagccgccgatggcgacctgcagcaggcgatcggcgccgaaagggaagccaaggccgccaaggaccaggccgagaccgagcgcgccgatgccgactacgctctgcgccgggccaacgaggagatcaccggcctgcgcgacgagatcacccgactcgacgacgacatcaccgccggtcgcattccggaagtcgaggaccgcctcggcgaggaactcgaaaggcgcttcgcgaaggtcaccggcggcggacgtcgcgacggactggccgaggccggacaggatatctcacagactctgcaggcggagaaggatcgggctcaggccgcggccagcgatgccggacaggtggtgacgcgactggccgtcgagttcaaggctgcttggccgtcggtcggcgcgcagctgaccgcgcaggtcgatgacaggcaggactatctggcgatcctcgacgagatcgaagcccacggactgcccgaccatgaggtgcgtttccgcgatctgctgcatcagcgttcccgcaacctcatcggcgaactcctcaacgagatccttgccgcaccgcgcgacatcgaggaccgagtcgctccgatcaactcctccctgctgcggtctcagttcgatgaggaccgctacctgcggctcaaggtcaaaactcgtcgttcggagaccgtcaacacattcatcgccgacctgcgggagatcgccggcggcgtctgggagaatgaggacgaggagacggcggaacggaaatacgacactctggccgagatcatgcgccgcttctcctcgagcgagcacgtcgaccgggtgtggcggcagcagtgcctcgacacacgtctgcacgtcagcttcctggccgaggagatcgacgactatggccgagcgcatgccacctacgactcgggggctgcgatgtccggtggtcagcagcagaagctcgtgatcttctgcctcgccgccgccctgcgctaccagttggccgacccggacgaggcgatctcccgctacgggacgatcatcctcgacgaggccttcgacaaggcggacacccgctacacccgcatggcactggacatcttcatcgaattcggattccacatggtgctcgccacaccgcagaagctgctgcagacgatcgaaccttatgtgggtgcggcgacctcgatcgagaatccgagccgccagaagacgctgacctcgacgatggtgtgggaggaagtggacagtgagtga

SEQ ID NO: 45309 - DNA, 1356 bp, Pectobacterium carotovorum subsp. brasiliense
atccctcttgaggaggctattcagtctcttaccggcattcttgtcgagcatgtgagtcaggagcaatatggcattaatcaggacaatctatctcttcaggccagtcgtgagctgcgggaatggattaaacgccgtttaattgtcgaacgggatgggcgtatcttcgccaccgatgcgcttgaggtcgcgattacgtttgttgagtctctggataatcgtttcatgacctctacggcgtcccgtttgtccatcgtacagcgagaaattgaaaacctggaaacccagcttaatcctaatccggcaaaccgagtttcaaccttacgccgtcgtattgccgaactggaacgtgaattacaggaggcagaagctgggcatattgaggtgctggaaacgcatcaggcggttgaacatattcgtgaggtcttcaatttagcttccagcctgagggccgactttcgccgcgttgaagactcctggcgcgaggcagaccgtgcgcttcggcaatccattatcggtgagcaatatcatcgcggcgatatagtcgatcgcctgctgaacgatcaggatgcgctgcttaatacgccggaaggaagagtcttcgacagttttcagcagcagttacgccattcagctgagttgacggcaatgagcgagcgactgcgcgtaatcctcaatcatccctcggcttccgatgcgctcaaccgtctacagcgttacgatttgcgctggctagttaaacgcctggtccatgaatcgcaaaccgtacttcaggcacgtgcccgtagcgagcgcgatgtccgtggttttatgaaaacgggtcttgcagctgaacatcaccgtgttggtcatctgcttaatgaatttctgaatcaggcgttaaagctcgactggcagcgtcagatgattcgcaagcaagaggttcctcttcctgccgttggtgtagtggtaacgggtatccccgctattgaacgtttacgttttaaagaggtggatgacgaagcagaacagacattggatctcagtaaccatgccgctgatttaacgcagattggtgatgatttctgggatgcttttaatggcctagatcgtgatgcgttgattcaacagacactgttgcttctggcaaaagaaaatcgtcccgttggtctggctgaactggcggtgttgttgcccccggttcacgatcttgaaacgttcaccgtctggattggtatggcgagggaagcgggtatcgaggttattgattcgcagcgcgaatttgctgagcttagtgatggggaagggcgtcgctggcgatttaatctgcccactactggtctggaaagtcaggcgttaatggatattgattgggagtag

SEQ ID NO: 45310 - DNA, 750 bp, Pectobacterium carotovorum subsp. brasiliense
atggcgagcttttttgacaaactgattaaccggagcgttaccgcaaatgcaggcggtgaaccagaaccgttggacgaagaggttgccgattcgtcggttgaggaaacggcaaccagtagcgaaatgcgaacactgaaaaaaatacgcgaagcgactcaggaattgctcaaatacggcttgctggaagaggtcagtaaacccaatctgtaccgcgtattacttactcatccggaagaggttacccgcattctggaacctctcgatctggatatcggtattgatgagattcgtggcctgctgtatgtcaaagtcaggcttgatgaaacgccagagcaggatgaatggtcacaccctctggtgaggcggcaacggcttaacctggaacaatcattattagttgccatactgcgccagcattttgttgcctgggagcaagagagtggaactggtgccggccaggcgcagatagctatcgacgatctcctcccccaactccagatttaccttggcgatccggggagtgaatcaaaagaacgcacccgactgcttaccttgctggatcaattaaaagggcatgggctggtcacatcgccggatgcgcatgagcggatcgtgattcgtccgatcattgcccatcttgccgatccgattaatcttcaggcattactggcatggctacgggaacagattgcccggcaaacctcccaggataacgcgtcagaaaaggatagcagcgaggaggatgtatga

SEQ ID NO: 45311 - DNA, 2922 bp, Pectobacterium carotovorum subsp. brasiliense
ctgggcgcgttgctgtggtttgattccaccagttccagcgtgacggatatgaaaaggctttggctgttcagcgagaatcctgggcagacgcttgagcactggctgaacgtttaccatgatggcggtacacgattgctgaggcaaatggaaaaagaaacgaccgggctctggacatacacgaataaaaaacagtatctggcgcgcctgcgtgatttctttgaggttggggaaaacgcatttacgctgttaaatcgggcggcagggttaaaacaactcaacagtattgatgagatttttcgcgagctggtgctggacgaccattccgccttcgatcgcgcaacggaagtagccaatagttttgatgacctgactgaaattcatcaggaactggaaacggcgcgcaaacagcagcagtccttgcaacctgttgccctgagttgggataagtaccagaagcatgagcgacaattggctgacaggaaggcgctggaatcgctgttacccatctggtttgcacaacaggcaagtcagctctggtgggaaaagatcaatcgtcttgacgccgaacttggcgaggcagaagccagcgaagcacggttacagtcacagcttgagctgcaaaaaaaggtggttgctgattgcatgcagcgttattaccaggctggtggcgcaaacattgatgatctgaatgatcgcatcaaggactggcaaaaaaggcttggcagtctggagactcaggcgaaccagtatcaacaattgacccgcaatcttggtttgccgtctgacctgagtcagcttcaactggaggcgaatcagcatgaagtcgaacgacggcttgagcagcttgccggtgatataaagctgaaagaagaagaactgtataaaaaaagtgcgctcaaccataacattaccgtagaacttcgcgaacgagaaactgaacgcgctgagatcgcgcgtcgtccaggctctaacctccctgcaaattatcagacgtttcgcagcgatctggcaaaagcgttgaacgttgatgagtctgaactgccttatgtcgctgaactgatccaggttgaaccggaagaggcgcaatggcgcggtgcgattgagcgcgcagttgggagtaaccggctgcgtattcttgtttcgccagaatcggcaccggaagcgctgcgttgggtcaatcagcgcaacaatcgtctgcatgtgcggctactggaggtcaaattaccgcactttcccgtccggtttttcgatgatggctttacccgcaagctgttgtggaaagagcatccgtggcgagaggccgttaaagcactgctggcagaaagcgacaggcattgtgttgatagccctgaacagttgcgtgacacgccccatgctatgacggttcaggggttaatgtccggtaagcagcgtttttatgacaagcaggatcagagacgccttgatgaagactggttaacgggattcgataaccgcgatcgtctgaacttccttgccaaagaaattaccgcgctccaggagcaggttaaaaccgcaagcgaggcatttgagtttgcaaaaggcgaggtcgggcttttgcaaactcaggcaatttcattccagaaaatacaacagattgatttcgataacatcgatgttcacggcgcaaagaaccaactggaagccctcaaggagcggctggagaatctgaaccacccagattccgacgccagcgtggcaaaagcaaaacttgatgaggctcaaacggttgaatctgaaattgataagcagctcagagccgccaataaagtcactaacgggctggatacggaactcatctcagcccgggccgcagaacgcaaggcccagcaaactgcgcaacaaggtatggaggatgaagagcgagagttgtgcgcgtcacattttcctgcggtgactctggagcaactgcctaacattcgcgatctggaacgtcaacatgagcgggcaattcagcaagaaattgagggtgttaaaggtgaactgcaccgattgaacattgagttgaccaaacgtatgtctgaagccaaacgtgtggatacaggggcactcgctgaggcaggggctgatttagacgatgttcctgtttatttaaagcgtttgcaggaactgaccgaagaagcactaccagaaaagctcagccgtttccttgactatctgaatcgttcatctgacgacggcgtaacgcaactgctcagccatatcgaccatgaggtgctggtgattgaagagcgcctcaacgaactcaatgaaaccatgttcagggtggactttcaaccgggtcgctacctgcgtctggatacgaaaaaagttgttcatgaaagcctgcgcacgcttgagaaagcacagcgtcaactgaataccgctcggtttgttgatgataacggcgagagtcattataaggccttacaggtgttggtggcgcaactacgggatgcctgtgaacgacatcgtacactcggggcgaaagcgttgcttgatccgcgttttcgtctggagttcgctgtatcggtaatggatcgtcagagtggaagcgtgattgagtcacgtactgggtcacagggcggtagcggcggagaaaaagaaattatcgcttcctacgtgttgaccgcatcactgagctatgctctctgccctgcggggagccgttatccgctgtttggtactattgtcctcgatgaagcgttctcccgtagctctcatgccgtggcgggcaggattattgccgcgcttagagaatttggtttacatgctgtattcatcaccccgaataaagagatgcgcctgctgcgcgaccatacccgctcggcgattgttgttcaccggcgcggtcaggattcgaacatggcctcgctgagctgggaagagcttgaacagcactaccagcgaagggagaacgtgtag

SEQ ID NO: 45312 - DNA, 1149 bp, Pectobacterium carotovorum subsp. brasiliense
atgtattctcctgatgagctgcgtaaaaagcttgcccgacagtgggacaatgcaaaactccggactgaacgcttacttccacccggtagctggccgctctgtctgtccattggtaaaccttccgccaggctattcgcagagcaaactcagtgcgttttgcagcatgtgcagttatggcggcaagtcgtggttgggcgcgtggattgggaagatgtcagttatcgggcgagcgacagagcggtatcactgccgttacgctggatcttgaatagcccttctgagtggatcaaggcggcggcggagccggcggtgagtcgggagtttcgcttgctggaggaaattatcgaacatgtcgatcccatttttcatccgctgttggtcagtcatcgttctttctggcggcataaagatccgcaggacatcatcagtgctgccaggctggcctgccgattaacacctggctgtgcaaaagggctgccgttaaggctactttccggacaaggagtggataccaaatttatcgagaataatatttcgttattaacccgactgttggacgtgcgtttttcaggcgaagccagcgagcagggattaacgacctttcttggtgctttcgatgagtccagccactgggttctggtcgtgccgctatcgcccggcttgcttccttttaaaaaatgccgggtgacgacggccgaactggcggaaacgatattgaccgcgtcacgtgtactggtgattgaaaatgagcagtgcctgcatcaactccctgtgttatctgacactatcgcaattttagggtgcggtcttgacgtgcaatggttatctagctcggctctggatgaaaaacatattgcttactggggggatatggatagctgggggctgctgatgctggcgagagccagacgctgccgttcgacgcttgatgctctgctcatgaaccgtgaactgtttgagcaatatgccagccatagtgcagttacggaaccggtaaaagcacaggaagcaatacctgatggcttgcttaatgaagaggccgatttttatcgctacttaacccgcctaccgcgtggtcgtctggaacaggaatttttgcctgcggggatagttgaagaggctctggtcatgtggcggaaaggattataa

SEQ ID NO: 45313 - DNA, 1356 bp, Pectobacterium carotovorum subsp. carotovorum; identical to SEQ ID NO: 45309

SEQ ID NO: 45314 - DNA, 750 bp, Pectobacterium carotovorum subsp. carotovorum; identical to SEQ ID NO: 45310

SEQ ID NO: 45315 - DNA, 2922 bp, Pectobacterium carotovorum subsp. carotovorum; identical to SEQ ID NO: 45311

SEQ ID NO: 45316 - DNA, 1149 bp, Pectobacterium carotovorum subsp. carotovorum; identical to SEQ ID NO: 45312

SEQ ID NO: 45317 - DNA, 1470 bp, Xanthomonas axonopodis pv. phaseoli; identical to SEQ ID NO: 45247

SEQ ID NO: 45318 - DNA, 702 bp, Xanthomonas axonopodis pv. phaseoli; identical to SEQ ID NO: 45248

SEQ ID NO: 45319 - DNA, 4023 bp, Xanthomonas axonopodis pv. phaseoli; identical to SEQ ID NO: 45249

SEQ ID NO: 45320 - DNA, 1533 bp, Xylella fastidiosa
atggaccatgccaccctgaccaccttgcgtgagcggcaccccgcctggcggttactgacctcaccgcatgcccccctggtcgcaagctttctgcaccgcgtgttcgtcgcaccaaacgcgcgcctgctgggcgagaccgagatcacccaggcactggaagacacgctgcatgtgctgcgccaacaagagggaccggaggcctacccgaaggacgccctggactacctcaatgactgggccgcgcccgacaaaggctggctacgcaagttctacataccaggcacggatgaagcgcagttcgacctcaccccggccactgaaaaagccatcctctggctgctgtcgctcactgaacgcgcatttgtcggcaccgaatcgcgcttgctgacactgtttgcgctgctagagcaaatgagcaccggcaccgagaccgacccaatcaagcgcctggacgaactgcgcaagaagcgcaacgcactggacatcgaaatcgcccacgtcctggcaggggatgcaccgctgctggacgacaccgcagtcaaagaccgcttccagcaattccagcaactggcgcgtgagctgctgttcgacttccgccaagtacaagacaacttccgccaactcgaccgcaaggtacgcgagaaaatcgcactgtgggaaggcaccaagggcgcgctgctcgacgaaatcatgggcgagcgcgatgccatcagcgattctgaccagggccgcagcttccgcgccttctgggacttcctgctctccagccggcgtcgcgaagaactctccgagcggctggaccaggtgctagcactgcccgcagtggcggcgctgcatccggaaccgcgtacccgttacgtacactacgactggatagacgccggcgaacaaacccaacgcacgatcagccaactatcgcagcaattacgccactttgtggagagccgagcttttctggagaaccgccgcattctggacctgctgcacagcattgagcgcaacgcactcggcctgcgcgacacgacaccctccgacacagtgatgtatctggatgcgctcggggcggacattcaactgccgctggagcgccccttattcaccccacgcgcaaagccgcgcctggctaatctggtccttgtggccggtacagacgacatcgacaccacccccttgtttaaccaaattgtgatggacaaagcacgcctgcgcttagccatccaacgcgcactgcgcacccaatcgcggatctccctgcgcaccctgttgcaaaccgagccactgcaacagggtttggccgaactggtcgcctacctggagctggcccacgccagcagcagcagtgatccggacggtttgcgcggcatcgtcgacgaaacggtagaagagccgatccgctggcaggccaacaataccgtgggtgagacagtcacccgcgaagcacgcttaccccgcatcatcttcgcgcggcgtgccctctcagatcatcagaaatcatcacaaggagacagagaccatgaaggacacgctgtatga

SEQ ID NO: 45321 - DNA, 705 bp, Xylella fastidiosa
atgaaggacacgctgtatgagaatgatgtcgtagagaccccacgcaacgcactgccgacagtgcccgaactgtcgcacctgatggtgtccttgctcaaaggggtgttgtaccgcgaccaagaagaacgcctctggtccagcttgctgcgcctacagacacaggtcagagaacacaccgccgtgctgtggctggatctagtactggaccaagccgagggctacgccttcctaaagagccgccccgacccggacgccgccgaaggcagtgcccgcccgcctcggctgatcgcacgccacgcgctgccctacccggtgagcctgatgctggcactgctgcgcaaacgcatggcggagtccgatgcgcgcggcggcgacccccggctggtgctgacacgcgaggagattgccgaactgatgcgggtgttcctacccgacgccaccaacgaggcacggctcattgatcagctcaacacgaccatcaacaaggtagtcgacctagggtttttacgccccttgccctccccctccaacagcacaccaaaccacggcaactacgaagtaagccgcatcttgaaagcctttgtagatgcccagtggctggccgaattcgatgcacgattggagacctaccgtcccgtgctatcgggcgatcaagacgaacctgacaccagacctgaagcagaacgggagtcaggcgatgcgtga

SEQ ID NO: 45322 - DNA, 3435 bp, Xylella fastidiosa
atgcgtgagacctccacactcggcctaaatttcgttgccgacgacaagcgcgtcggcttccggctacagcacctagaagtagtgaactggggcaccttcaacacccgggtgtggtgctacaccctgggcgggcgcagcggcctgctcaccggcgacatcggttcgggcaagtccacgctgattgacgccatcaccaccctgttagtgccagcgcagcgcgtggcctacaacaaggccgccggggccgatgcccgcgaacgctcgttgcgctcctacgtgttgggctactacaagagcgagcgcaacgatgccaccggcaccgctaagcccgtggcactgcgcggtacgtcggactactccgtcatcctcggcgtcttccacaacgtcggctatgacaaggtcatcaccctggcccaggtcttctggctgaaggactcgcaaagccaacctgcccggctgttcgtggtggcagaacgcgcccttggcatcgccgcggacttcaacaacttgggcggcgacatcaagaccctacgtaagaagcttcgcggtgcagggtgcgaggtgttcgacagcttcccaccctacggggcgtggtttcgccgacgcttcggcatccaacacgagcaagcgttggagctgttccaccaaaccgtctcaatgaagtccgtgggcaatctcaccgacttcgtgtgcagccacatgctagaaccctgtgatatgggtagccgcattgaggatttgatctgccactttgacgacctggaccgggcgcatcaagccgtgctcacagccaagcagcaggtgaagttgctgctccctctggtcgacgacggccagaagcaccagacgcagctaggcaacattcaagccttggaggctggacgcgacggactgcggccctacttcgcacagctcaagggggaactgctgcagcaccgcctggacgcactggcggccgaaatggcccagctaactgtggagatccagcacctggaaaaacagcgcaagaccgcagacagtgcagtcacccaagtgcaacaggcactgcgagacaacggcggcgaccgcctggaagaactggcagcagagattgagcaactggagcaagccaaggcacaacgccaaaggaaatccgaccgctaccaaacgttactgaccaagattgacgagacagcgccagccgatgcaataggcttcctcacccagcaacagcgctttgcgcagcgtaccgaggaattaaacgcagccattgcgacgttgcataacgacaagagcgagaaggatcgtgctctctacgatgctcggaaagagcacaccaaactattggcagaaatcaacagcctgcaacagcgccagagcaacatcagcgccatccagatccgcatccgtcatgatctgtgtgtggcattgtccattgatgcggaggcattgcctttcgcgggcgaactcatccaggtgcgtgaggacgcacgcgattgggaaggcgccgccgagcggttgctacacggctttggcctcaccttgctggttccggacgcgtactacaaggctgtcgccacgtgggtgaaccacaaacagttggatggccgactggtgtatttccatatgcgtccacgcaatacgacgcaggaggcagcgttacatgcgcagtcgctggtacacaaactcatcatcaaaccggagtcaccacactacacgtggctgcaacaggaacttcagcggcgctgcaacgtcgtctgctgtgacaccatggaacagttccatcgtgaggtccgcgccatcacgcaggccggccagatcaaagaccccagtggccgccatgagaaggacgaccgccatcgcattgacgaccgcagccgctacgtcctcggctggagcaatgccgacaagctgcacaccttgaacgcgcaacggcaacacctggaagacagcatgggcatgttgggacaagacctcggcaccattcagcgggaatgccagaaacaacaggaacggctggatgcactcaacaagctgggggaatacccggactttgcggacatcgactggatgagcctggtccgccagattgccgcactcaccgaggaacacgcgcagctccaagccacatctaacatcttgcacaccctgcaacagcaactcatagaggcgcagacgcgagtcaacgtactgcagggcaagtggaggaacgcgttgggcgaacagggcgaggtcaagagcaaacaaaaaacggcgcagcaaatgtggaatcaggcccgtcgcatttgggatgatgcgccgctgagccaagcgcagatcgcaccattggatggcttgcgccagcaagcgctgggggagcacctgctatcggtcgaatcttgcgacaaccacgagcagcaagttcgccaatggctacaaaaacgtattgatgcggagaacgctcacctgagacaactaaatgaccgtattacaggcgccatgcaccgcttcaaggatcagttcaaggctgagaccgtggagatggacgcagacttggcggcgctgccagagtatgaacagatgctcaacggcttgcagaaggacgacctgccccgattcgaggcgcgcttcaaagcactgctgaacgtcaacaccatcaacgagatcgccagctttaacgcccaactcaaccgtgagcgggagacgatcaccgagcgcatcaaagacatcaaccaatcgctgcacggcattgactacaaccaggatcgctacatcaaccaattactgcacggcattgactcccaaaaggggcgctacatcacgctgctggcacaacccagcccggacgctgagatccgcgacttccagcaagatctacgggcatgtaccgaaggcacgttgaccggttcggacgatgagcagtattcggacgccaaattcctccaggtcaagcgcatcattgaccgcttccggggccgtgaagggctgtcggatgccgaccggcgctggacggccaaggtcaccgacgtgcgcaactggtttgtgttttcggccagcgaacgctggcgcgccgatgagagcgagtacgagcactacgctgactcgggcggtaaatctggcggccagaaagaaaagctggcctacaccgtgttggcggcaagcctggcctaccagtttgggctgaagtgggatgaggtgcgttcagaatcgttccgcttcgtgattattgatgaggcgttcgggcgcggctcggacgagtcagccgagtacgggctgcgcctattcgaaaagctcaacctgcaattgttgatcgtgacgccgctgcagaagattcacatcattgagccgttcgtctccagcgtgggattcgtgcacaacaagggcgggtgcgactcgcagctacgctgtctgtcgattgagcagtaccagacggagaaaaccaatggaagcgcgacgggaggcgccgccaccccatga

SEQ ID NO: 45323 - DNA, 1218 bp, Xylella fastidiosa
atgagttgggccacaccagccagcctatgcgcccaggtggagcgcctgtggaagcggggcgacttactgcgggcgctggtcacggacacccacgccatgacgtggccgcaccgcctgacgctgcagacgcccaagtatgcggatctgtccaaccgctttcaggcggtgcgtgattgggtgcagaccatcgctgacaccccgcagattcggatccaatggcgggaatggaagcaccgcgtccaagggacacaacggtttcctgaggccgtctatctggacaccctgcaagcggccttggccttcatcggtaagacgcatcaagcgcagcagtttgaagcggtgtggcagcagacagcagccgcgcagcccgtgctcctggcgtggctgttacgacgcccgacccaggcgctggaggtggccgaccgttgggaacgtcttttagccgtcatcgcctggcttcaggcacatcctcgtccaggcgtctacctgcgccaagtggatgtgcccggagtggacagcaaattcattgaggcgcacaaaagcgtgttggccaagctgctggacttggcgttgccgccagagagtatcgagacggccgccagcggcgtgagtcagttcacgcgccgcttcggcttcctcgataagcctgtgctgatccggtttcgtctgctcgacgccacgctgcccagcctgccgggctgcacagggctgccggacatcaccctagacacggctcacttcgcggcactgacgctccctatcacgcgcgtcttcatcaccgagaacgaaatcaacttcctcaccttccccaaggtggccggtgcgatcgtcatcttcggcgctggctacggctgggagccgctggcacgcgccgcgtggctgcatgcctgccaactgcactactggggtgacatggatacccacggcttcaccatcctcaaccggctgcgtggctactttgggcacgtgacttctgtgctcatggaccaggacacattgttggcgcatcgcttgtactgggacgaggaatccgagccgacgcgccaggccttggagcacctcaccacggaagaggctgccgtctacgatgacctccgatacgatcgccaccagcccaggctgcgcctggagcaagagcggattggctttcgctgggtgtgcgatcggctggcctgcttgctctcaacagcccacgtagcaccgccccaggatgcgtaa

SEQ ID NO: 45324 - DNA, 1458 bp, Arthrobacter sp. MWB30
ttgtcccgttcagccatgtcctccgccgacgcaatcggcgcgaggctccgcgacctcgaacagctgaccaagggtcccgcgtgggccctgacccgctcggcgccgtgggtcatcgccgtcctccaggcctcctttacccgcaccaggccgcagcttccgctcgaagagttccacgccgacgtcgacgctttcctagagcagctccggcgccaggatcctgcgcttggtggccagcagaacggcaagttgttcggtgacgaatggacgcgcaagcagttcctgacgcgacgcaaccagtcgggccggatcgtgtacgaggtcaccgagcccgcagcgcgtgtgctcgctttcctcgacagcctctccagcgaacgttccacactgaacggctcgaggctcggcacgctgctcggcgatgtggagaagctggccaacgaaacaaacccggaccagagcgcgcgcctggaggccctggaagaggaaatccacgagcgccagcagctggtggaggacatcagttccggtgaattcgacggcctccttgacgacgaagaagccgttgaagctgccggtaacatccttgacctcgccgcaagcctgcccgcggactacaagaaaatgcgtgaccgcatcgaggaactggtgggggagctccgcaaccagatcatcgaagagtcgttgagcaagggcgcaaccatggcccaggttctggaggccgacaaacggcttcggcaaagccccgaaggacgtactttccgctccttcaccgccttccttgaggatccgcaacagcagctgcgtttccgctcggccatcggcgaggtgctgagcaggcagtttgcggacgatctctcccacgaggaccgcgaaacgctgaaaaacctcgtcgcggaactgcggtaccagcacagccagatccagcggatttacggaaagctctcggaaagcctcaacacctatatccagagcgacgacgtccggcagtcggttagtctccgcaaagtgctggccgaagccgaacaggccatccgttccctgccctacgaacgcgaccggcccggcctggtgcctggacctgtgctcttcaacgccggtttcgagtccttggccatggtcaagctgttcgacccggacgagttcgccacgcccccgcgcctggccgaccccatagcgttcagcgactcggacagggtccgttcggcccgcaccggcaaagcgcgccccgatgttgtgcgggcggccatggcgggctcggccacgttgggtgaggcctgggaaaacctgcccgcggaagaacggcacatcaacagcgtccggaccctcctgtccatggcattgcagaccggcgcggctttcgaccgcgccgcctgggaacacatcgacttcgaacaaatcgacggcagcatccgcaccgcgtacctgcctgtcgtcacgctgaatgaggattccaatgactga

SEQ ID NO: 45325 - DNA, 900 bp, Arthrobacter sp. MWB30
atgactgaggacatcacgacgacggacatcaccgaagcggaggacgtcaccgttgcggaggacgtcaccgaaacggagcgggacaccgaagctgagcaggacaccgttgaggtgcccgatgagaccgcccagcacccggacccgttccggatcacgccgcgggacactttcgtggacggtgccgcgctcttccccggcgacaccggcgtgctcccgatgaaagtccgccatgccctggtgaagctccttaaaggtccctacgttgatggtgcccgcgacgagaagctgtggacgaccctcctggacaaccagctgattctccggagccgcctctctgaactcttcctgacgctccagttggaccacgaccgcaagatcgctgtcctgcgacccgttgatccggaaatcatcggggcgagctcccgctccagcatcctccgccagcaacgtgctttgagccgcgtcgaaaccatcgtgctgctccggctgcgcctcctcctggaccgccacgtcacagcccagaccgaccccacgatcacccgcgaagagatctccgacctcgtagcgaattacacccccgccggccaacaggatgccctgcgcgactccgacgtggtcacccgcaccatcaccaaactcctcgcccggcaacttctcctccccaccccgctggatgacacgtacaccatcagcaacgccctcccattggccctccccttcgaaaacatcggcgacatcccggcccacatagaggccctcgtggcagtagcagcggacgaatccggcacggagcctttgctggatatggaagctgactccagccccacttccgaagacggggacgacgacgccggtaccgccgcggacagtgacccagcagcagaggaggcagccaagtga

SEQ ID NO: 45326 - DNA, 3474 bp, Arthrobacter sp. MWB30
gtgaccatcgcaagcatgctcccgctcggcgagctcacgaatccgggccagatgcgtttggccctcgtccaggtggtcaactggggcaccttccatggcgcccacaccatgcacgtggaccgcaagggcacgctgctgaccggcaattccggtgtcggcaagtccacactctttgatgccatgctccgcgttttcgatgcccgcccgcggtcgaacgaggctgctgcccagcggtccggcggggctgtggaggacaagaggaccacgttcacctacatgcgcggcaaggtcggtgacaaggcggtcggggatagttcggccagtgccttccagcgccccggtgccacctggtccgccgtcgcgctgacgtttgataacgcagccggcacgaaagtgacggtgtcggcgctgttcgacctgccgaaaaacggcacggagtcgagcgttgggcgtttctatgtgatcgacagcaagcccctggacctcgaagcgatcgaggggatcgcacagaagcggtttaccaagagtgccttggagtcgatcttcccggacggtcaggtgttcgacgtccacaaggcgttcgccgagcggttccggcggctcctcggtatcaactcggaccaggcgcttccgctgctgcgcgttatccaggccggcaagggcttgggcggcagcgtcaacacgttcttccgggaccaggtgctggatgccccggccacgctggctgcggcggacgacgtcgttgaggaattcagcaacctgatgtcgatccggcagcggctggaggatgtccggctgcagcgcgaccaattggctccggtgccgggcctgaacaaggaatacgcccaggccttgttggacgccaaccgcctccgtgagttggccggcgaagagtttgaagcttacaagcagcagctcgctgtcacggtgcacgccaagacgttggcccgcttcaaggagttggcacagtccaaggcgcaggaactcgccgccgagcgcgtggtccgcgatgccctggccaaggagttgcgcgaccttgagctggactacaacaaccgcggtggcaacgccatttcggccattgagcagtcgttggagaacgccaaggttggcctgaagctgcgccagcaggttgaggactcggccaggaaggcgctggccgacgccgggttgaacctggaatggtccgccgagggctgggaccaggcgcacgagcaggccgccgcccgttcgattgagttgaaagacgattcggaggccttgaaagaactccgtttcgaggcgttcgatggccacgcgaccaagaagcgtgagctggctgcggcccagcaggaactgttgtcgctgcggtcgcgcaagtccctgctgccgccgtcgagcattgaaaaccgggccgccatcgcggccgcgacgggcgttccggaagaacggatgccttttggcggcgagctgatcgacctcgcggaggggcaggaccagtggcggcccgcggcggagcgggccctgcgcaacctggccaccaccttgctggttccgggggagcactttgctgccgtcacgcgatacctgaacgacaacactgttcggggcgcgctgcgcgcggtggacgtctccaagccgcttgccggcggggcgctggctgtggaggacgtgtccgacggcgacctcttgacgaagttgagcatcctcacctcgggcgcaaacgccgacgccggggaatggatccgtgagcggatcgccctggactttgcgtatgcgtgtgtcgaggacccggacgagcttgcctcgatggacaagggcctgagcctgggcggcgtggtgaagcggaaccggcacaccgttgagaaggacgaccggttcaccagccggcaggattacgtcctcggcttcgataacgcttccaagcttgaactcgtcgctgcccgcgtgggagagctggagaatgagctggccaaggctgccgaactggcccaaagccgtgaggattcgcaccaaggcatggcccgccaactggaagccctgcggcgcgtggctgaagacgagcggccgtgggagcaggtttcggctgccgttgccgcggacgagctggcacggatagagcaacggctggtggatgctttggccgcccaggcggacctcgagccgttgcgtgccaacatcgaagccgtcagggaaaagcaccagtcctccacaggggtggcggctgtgctgcagagcgaatacaaagcgctcgaccacaagatgaccacggctgatgggctgctggatgcggcgaggctcaagcttgagcagtcaccgccgtcggcctctaccgtcaccgcgctggaaccgtacttcgacggcgtcgcggacgtctccgaactgtatgagctggtcaacctggccaacagcgtccggaacaaactcctggacgagttgcacgcggccgaatcccggagccaggcgactgccgaacgcctgacgcgcatgttcgaagcgttcgtccgcgactgggggagcgccatcagcgccgaccacggcacctcaatcggtgccgcaggcgactttgaagcccgctaccacgcgatcgtgagcgacggcctgcccgcacaggaggccgagttcaggctgttcttcaaccaacgcacgcacgagtcgttcagtacgctcctgcaccttctcgatgaggaacggcgcagcatcaccagccgcatcctccctctcaacggcatcttgtccgaggtcaatttccacgagggaagcttcctggaactggatatcaagcagacgctgccggcaacggccaaggtcttcaaggacgccatccagaacgctttgaaaaccaaacacacacggccctcgcgcggcgcttcggccgctggttccgccgaaacggacgacgacgccgagctcaccgcccggtataaatcgctggaaacgctggtgaagcggctcggatcgcaaacgccggaggatcgacgttggcgtgccgaagtgctggacgtccgcggacacgtgttcatccagtgcaaggaacaccgcgaggtggcaaagcaaggaaaggccggcgcctccaaaaccggcaagaagaaaaccgaagtcttcatgcacgccgacaccggctccatgtcgggcggtgagcgccaacggttcacggccttcatcatggctgctgcattgagctaccagttgggcatcgccgagcagggcttcaccacctacggcaccgtgatgatggacgaagcgttcgtgctggcctcggaggagttcgcgggtgcgggcatcaaggcactccacgaattcggcttccagctgttgctggccgcgcccgaaaacgtcattgacctgtcacggcacctcggctccgtcacggagatcctgcgggacaagcggaccaaccgctcgggcgtcctcacggctcccgttatcgcagggccgggcgaacccggcgcatggcgatccgaagccaacccggtggacatcgtcctgcgctag

SEQ ID NO: 45327 - DNA, 1320 bp, Klebsiella variicola
atgctcatcgagcatgtgagtcaggaacagtatgacattaatcaggacaatccctctcttcaggccagtcgtgaactgcgggaatggattaaacgccgcttaattgtcgaacgggatggccgtatcttcgccactgatgcgcttgaggttgcgattacgtttgttgagtcgctggataatcgtttcatgacctctacggcttcccgtttgtctaccgtacagcgagaaattgaaaacctggaaaccaggcttaatcctaatccggctaaccgggttgcaaccttacgtcgtcgtattgctgaactggagcgtgaattacaggaggcggaagccgggcatattgaagtgctggaaacgcatcaggcggttgaacatattcgagaggtcttcaatttagcttccagcctgcgggctgactttcgtcgcgttgaagactcctggcgtgaggccgaccgtgcgcttcgccaatccattattggtgagcagtatcatcgcggcgatatcgtagaacgcttgcttaacgatcaggacgcactgcttaatacccctgaaggaagagtcttcgacagttttcagcaacagctacgccaatcagttgagttaacggcaatgagcgagcgactgcgcgtaatccttagccatccttctgcttccaatgcgcttaaccgtctacagcgtcatgatttacgctggctggttaaacgcctggtcgatgaatcgcaaaccgtactccaggctcgtgcccgaagcgagcgagatgtccgcggttttatgaaaaccgggcttgctgctgaacatcaccgcgttggtcatctgcttaacgagtttctaaatctggcgttaaaactcgactggcagcgccagatgattcgtaaacaagaggttccgcttcctgccgttggtgtggcggtgacgggagtccccgcaattgagcgtttacgttttaaagaagtggatgatgaagcggaacaaacgttggatctcagtaatcatgcgacggatttgacgcagattggcgatgatttctgggatgctttcaatggccttgatcgtgaggcgttgattcagcagacgttgcagcttctggcaaaagaaaatcgccccgttggtctggctgaactggcggcgctgttgcccccggctcacgatctcgaaaccttcgccgtctggattggcatggcgagagaagcaggcattgaggttattgattcacagcgcgaatttgctgaacttagtgatggggaaggtcgccgctggcgatttaatctgcccacgaccggtctggaaagtcaggcattaatggatatcgattgggagtaa

SEQ ID NO: 45328 - DNA, 669 bp, Klebsiella variicola
attactgatgagttggttgaagacagtgcggccagtggcgaaacgcggaccctgaagaaaatacgcgaagcgattcaggaattgctcaaatacggcctgctggaagaggccagtaaacccaatctgtaccgtgtcgtactgacccatcctgaagaggttactcgcattctggaacctcttgatctggatatcggcattgatgagatccgcggcctgttgtatgtcaaagtcagacttgacgaaacgccagagcaggatgaatggtcccatcctctggtgaggcggcaacggcttaatctggaacaatcattattagttgccatactgcgccagcattttgttgcctgggagcaagaaagtggaactggtgccagccaggcacagatcgctatcgacgatctcctccctcagctccagatttaccttggcgatccgggcagcgaatcaaaagaacgcacccggttgctcaccctggtggatcaattaaaggggcatgggctggtcacgtcgccggatgcgcatgagcggatcgtgattcggccaattattgctcatcttgccgacccgatgaatcttcaggcattactggcatggctgtgggaacaaattacgcaacaaacttccccggatgattcgtcagcaaaggagagtagtgaggaggacgtatga

SEQ ID NO: 45329 - DNA, 2925 bp, Klebsiella variicola
ctgggggcgctattgtggtttgattccaccagttccagcgcggcagatttgaaaaagctttggatgtttagtgataaccctacacagacgctggatcactggctgaatatctggcatgacggtggcgcacggtcgttgaagcaaatggaaaaagagacgaccggaatctggatttggctgaacaataaaaaacagtatctggcgcgcctgcgggacttcttcgaagtgggggaaaacgcctttacgctgttaaatcgggcggcaggattaaaacaactcaacagtatcgatgagattttccgcgagctggtactggacgatcactctgcttttgatcgcgcgacggaagtagccaatagttttgatggtttgacagaaatccatcaggaactggaaacggcgcgtaaacagcagcagtccttgcaacctgtagccctgagttgggataagtatcaaaagcaagagcaacaacttgctgacaggaaggcgctggagtcgctgttaccaatctggtttgcacaacaggcaagccagctctggcgagaaaaggtcagccatattgaagtcgagcttggtgagtcacagactcgcgaagaacagatccagtcgcagctcgagttgcagaaaaaagtggtgacggactgcttacagcgctatctccaggtcggcggcgccaatattgatgaactgaacgagcgtatcaaggactggcaaaaaacgctcggcagtcgggagactctggcgcaccagtatcaacagctgacccgcaatcttggattgccgcctgacctgagccaaccacagctggaggcgaatcagcatgaagccgaggcccgatgtgagcagtttgctgatgatataaagttgaaacaggaagaggtgtatcaaaaaggcgtgctcagccatcgcatgaccgaagaacttcgggaacgggaaactgaacgcgccgagatcgcgcgtcgtccggattctaaccttcccgcccattatcaggcatttcgcagcgagctggcagaagcgctgaacgtcgatgagtctgaactgcctttcgttgctgaactgatacaggttaaaccggaagaggcgcaatggcgcggtgcgattgagcgcgctgtcgggagtaacaggctacgtattctggttgctcctgaatctgcacaggaagcgcttcgctgggtaaaccagcgcaacaatcgtctgcacgtgcgcctactggaggtcaaattaccgcactctcccgccaggttttttgatgatggttttacccgtaagctgttgtggaaagatcatccgtggcgagaggccgtcaaagcattactggccgaaaacgacaggcattgtgttgacagccctgaacaactgcgtgacacacctcatgctatgacggtgcaggggttaatgtctggtaaacagcgtttctatgacaaacaggatcagaaacgtcttgatgaagactggctaacgggattcgataaccgcgatcgcctgaacttccttgccaaagaaatcgccgcccttcaggagcaggttaaaaccgctaacgcagcgtttgagtttgcgaaaggcgaggtgggggttttgcaaaatcaggccatttcattccagaaaatacaacaaattgattacgatagcatcgatgttcccggcgcaaagagccaactggacgcgctcagggagcggctggagaatctgatccgcccggattctgacgccagtgtagcgaaagcaaaacttgatgaggctcaaacggttgaatctgaactcgataagcagctcagagccgccaataaagtcactaatgggctggatacagaactcacctcagcccgggcagcagaacgtaaggcccagcaaactgcgcaaaaaggtatgcaggatgaagagcgagagttgtgcgcgtcacattttcctgtggtggctctggttcaactgcctgacattcgcgatctggaacgtcaacatgagcggggaattcaacaagaaattgagggtattaaaggtgaattgcatcgactgaacattgagttgaccaaacgtatgtctgaagccaaacgtgtggatactggggcgctcgttgaggcaggggctgatttggacgatattcctgtctatttacagcgtttgcaggaactgaccgaagaagccctgccggaaaagctcaaccgctttcttgactatttgaaccgttcatctgacgacggcgtaacgcaactgctcagccatatcgatcatgaggtgctggtgattgaagcgcgactcagcgaactcaatgaaaccatgtttagggtcgattttcagccggatcgctacctgcgtctggataccaaaaaagttgtccatgaaagcctgcgcacgcttgaaaaagcgcagcgtcagctaaatgcagctcggtttgttgatgataacggcgagagccattataaggcgttgcaggtgctggtggcgcaattgcgggatgcctgtgaacgaaaccgtaccctgggggcgaaagcgctgctggatccccgttttcgtctggagttcgccgtgtcggtgatggatcgccagagtggtaatgtgattgagtcgcgtactggctcgcagggcggtagcggtggagaaaaagagattatcgcgtcttacgtattgaccgcatcacttagctatgcgctttgtcctgcggggagtcgttatccgcttttcggcactattgtccttgatgaagcattctcccgcagctctcatgccgtggcgggcagaatcatcgccgcgctcagagaatttggcttacatgcagtatttatcacccccaataaggaaatgcgcctgttgcgtgaccatacccggtcggcgattgtcgtccaccggcgcggtcaggattcaaatatggcttcgctgagctgggaagaacttgaacaacactcccgacgacgggagaacgcgtaa

SEQ ID NO: 45330 - DNA, 1149 bp, Klebsiella variicola; identical to SEQ ID NO: 42261

SEQ ID NO: 45331 - DNA, 1473 bp, Pseudomonas sp. PI1; identical to SEQ ID NO: 43373

SEQ ID NO: 45332 - DNA, 675 bp, Pseudomonas sp. PI1; identical to SEQ ID NO: 43374

SEQ ID NO: 45333 - DNA, 3378 bp, Pseudomonas sp. PI1
atgaacgatttttcgccacaggagctcgatttcgtggccgacgacagccgcgtcggctttcgcctgcagcggctggaagtcctgaactggggcacattcgaccggcgtgtctggcgctatgaactcgatgggcgcaacggcctgctgactggcgacatcggttcgggcaaatccaccctggtcgatgccgtcaccacgctgctggtgccggcgcaacgcatcgcctacaacaaggctgcaggcgccgagacgcgtgaacgatcactgcggtcctacgtgctgggccactacaagagcgagcgcaacgaaaccaccggcagcacccgcccggtggcgctacgcgacaccaccagctacagcgtgatcctgggtgtattccgcaacgaaggctacggccaggcggtcacactggcgcaagtcttctggtttcgcgaaccacagggccagcctgcgcgcttgttcgtggctgtagagcgggaactgtccatcaccgagcacttttccggattcggcagcgacatcaacggcctgcgcaagaagttacgcgcgatgggctgcgaactgaacgacagcttcccgccctacggcgcctggttccgccgccgcttcggcatcgagcacgagcaggcactggaactgttccatcagacggtttccatgaaatcggttggcaatctgaccgatttcgtgcgcagccacatgctcgaaccgttcgacgtagggcgccgcatcgaggcactgctcggccatttcgatgacctcgaccgcgcccaccagtcggtactcaaggccaagcgccagatcgagttgttggctccgctggtggaggatggccttcgccacgggcaaatcaccggcgagatccaggcgctgcgccaaggacgcgatgcattacgcccgtactttgccggtttgaaggcagcattgctggagaggcgcctggaattgttgactcaggatgcgacgcgctgggatgcccgcatcaagcaattgggagagcaacgagacaacgcccgaatcgagcaggggaaactcgaaggcgcactgcgcgagaacggcggcgaccggctgcaacaactcgctgccgccattcagcagcaggaggccgagaaacagcaacggcaggagaaagccgacgcgtacaccacgctattgacgtgcattggcgaagcagcgccgggagacgaagctgctttcatgacacaaagatccaccatcggagaacacgccgaagcgctgcgtacaagcattgcggaccacgatacgcagatcaatgaagacggctatgcgctgcggcggggtcaggaagaacacaaagcgctcagcgacgagatcgacagccttgcgcgtcgcaagagcaatatcgacgcggcccaagtgcgtatccgcgaggcattgtgcaccgccctgtccatcgcagaggaagacctgccctttgccggtgaactgatccaggtgcgcgaggacgaacgcgactgggagggcgcggccgaacgcctgctgcatggcttcggcctgtccctgctggtgccggatgtgcactacaaggacgtggccgattgggtggaacgccagcaccttggcacgcgtctggtgtacttccacgtgcgtgcgcgcaagtccacgcaggccgtcagcctgcccccccagtcgctggtgcgcaagctgctcatcaagcccgacacgccgcactacgattggctggaacgcgaactgcaccaccgcttcgacctggcctgctgcgacaacaccgagcagttccgccgcgagacccgcgccatcacccgcgccggacagatcaaggacccgagcggacgccacgaaaaggacgaccgccgccgcatcgacgaccgcagccgctacgtgctgggctggagcaacgccgacaagctgcgcatcttgcgcgacgaacgcgagggcttggaacagcaactgggcgacatcggtctgcgcattgccaacacacagcgattgcgcgggcaatgccaggcgcaactggaggccttggccaagctcgaagtcttcacccgctacagcgaaatcgactggcaggcaccggcacgcgagattgcccggctgaccgaggaacgcgaccgcctcaaggcggcctccgataccctgcgggaactggaaagccaactggcgcaggtcgttgagcgcctgaaggagatcgaagacgatcttggcgaggcacaaggcaaacgcggagaaatccgcagcaaacacgaaactgcccaggcacagcatgcgcaggctctcgaaatccagacgcaagccgcactcgacgacatgttgctgcaatctcttgagggctggcgcgccgaagtcctgggcgaccaccagctcacggtggagtcctgcgacaaccgcgaacaggacgtgcgcaatggcttgcaggcgcgcatcgatgccgaagacaagcgtctctcacgcttgaccgaacgcatcatcaacgccatgcgcggtttcaaggaggccttcaaggcagagaccgccgagatcgacatcagcctggccgcgctgcccgagttcgagcgactgatgaaggatttgcagcacgacgacctgccgcgcttcgaagcgcgtttcaaggaactgctcaacgtcaataccatcaacgagatcgccaacttcaatgcccagctcgcgcgcgagcgggaaacgatcaaggagcgggtcgatgtcatcaaccaatccttgcaggtgatcgactacaaccccggacgctacatccggctgctggcgcaacccagccccgatgcggagatccgcgacttcctgcaggatctgcgtgcctgcaccgaaggcgcgctgagcggctcggaagacgaacagtattccgagaccaagttcctgcaggtcaaagccatcatcgaccgcttccgggggcgtgagggactggccgagatcgaccggcgctggatgcagaaggtgaccgacgtgcgcaacggcttcctgttttccgccagcgagcgctggcgcgaggacgatgccgagcacgaacactactccgactccggcggcaaatccggcgggcagaaggagaagctggcctataccgtgctggccgccagcctggcctaccagttcggcctggaatggggggcggtgcgctctcgctcgttccgttttgtcgtgatcgacgaagccttcgggcgcggctcggatgaatcggcccagtatgggctggaactgttccgccagctcaacctgcaactgctgatcatcacgccgctgcagaagatccacatcatcgagccatacgtgtccagcgtcggcttcgtgcacaacgaaggcggccgtgagtcgcggctgcgcagcctgagcatcgaggaataccgggcacagaaggctgccgccaggggcggcgctgtatga

SEQ ID NO: 45334 - DNA, 1206 bp, Pseudomonas sp. PI1; identical to SEQ ID NO: 43376

SEQ ID NO: 45335 - DNA, 1461 bp, Arthrobacter sp. W1
atgcagccctcgcaccgcgcgaatagtttgtggcttcagtcccagcagttcaaaagctcggcagcgtatcggcttctgaccgcccagccgtgggctgtggcgttcatccgtgcagagttcaccgcagatcgttcccgtatcgcattggagcttttccatgcctcgctggattccttcctgaagcaggcacgcaaaagcgatgaccagatccctgcatcctattcggcccaggatttcgccgagacctgggtcaagcaggggatcctggctcgtccgctgattgacgggcgcttcgtctatgaacccagtgcgcagaccttgcgcaccttgcgcttcttggcggatttctccaccgacgattcgcatttgaactcctcgcgcctgaacactttgctctcgtccctggagtcgctggcccacgagacggatccggatcccgaagcgcgtatccgtgccctcgaatcccagatcgcgctgcgccaagcccaaatcgaccagctgcgcagcggggacgatccggcggtgctctcccgcacgaccgcgttgtcggccacccgttcagtgctcgatctggcctccagcctgcctgcggatttccggcgcatgcgcgatggcgtccaggacatgctccactcgctgcgcgaaggcattctggatgcgtccactgcaaagggcgtcgccgtgggccaggtgctggaagccgatcgccaattgcgctccaccgccgaaggcgaaaccttcagcggattcaccgagtttttgaattcccccgaagcgcagcagcggttccgcgcggcactggccgaggtcctggaacgcgacttcgtcgatgatcttgaaacccccgaacgacagatcctcaccaacctgttgcgtgaactgcgccgccaggcggctgaagtccatgcctcctacggcaagctctccgagtccctgcacgccttcgtccagtccgaggactacaagcaggccgagctgctgcgccaggcagtgcgcgaagccgaactggcgatcagcaagtccacgagcctgaagccgcgcagcggcctggcccccatggagctgttcgccccgcagttcgtcacccttgccgggcttggaatctatgacccctccgagcatgtggctccgccgccgctggcccaggcgccggaattcagcgaagccgacattgtgcgcaacccgtcgacaccccaggccgatatgcagttgctgcgtgaatccatcacccggcagctgggccagtccggttccggttcggttcggctcgatgacgtctttgaatcattggatgccgagcagcggcacctgaatacgattcgcgccctggtggagatcgggcgcaccaatggcgagccgctgaacgagagcgacctgctcagcattgaattccagcaactcgatggttctcagcgaaccgctatcctgcccgcgttgagctttacgaaggagccgctatga

SEQ ID NO: 45336 - DNA, 687 bp, Arthrobacter sp. W1
atgaccacgagcgattcatacgccgcaccgatcaccgacccgctgttcgacggcgataccggaaagttcacgctgccgctgcgccagctgctggtccggctgctgcgcggcccctacctggacggatccaccgatccttcggcgtggcagctgctgctggaccagcagcagggcatcagcgattacttctccgagattttcctggccttgcggctggacatggatcgcaagatcgccatgctggccccggtccagatcgaacaggtccacacctccccgatcgctccgcgccgtccgctgaaacgcgatgaaaccctgctggccctgcgcctgcggctgctgctggagcagcattcgggcagcggcagcgatgcggtgatttcgcgggcaggcatgcacgagatcctggctgagcaccgccaggcatcggaccgtgacgacaagcgctttgccgaatcctgcgatgccgctatcacccgcctgcagtccttgcgcctgctcaccggcaccgagctggagaacgagttccgcatttccccggcactggcgatggccttgccgatcaccaatatccaggacatcccgcgctacattgcggccatcgacgccaatgacccggcgttcagcctgggcgccgatgacactgatgacctcgcagagcagacccccgagttggtgcaggagtaa

SEQ ID NO: 45337 - DNA, 3327 bp, Arthrobacter sp. W1
atgagcattgaaatgactctcccgctgggcggggcgctcaacccaggccagcatcgcctgagccgagtacagatcgtcaactggggcaccttccacggcttgcatgatctggcggtggaccgtgccggcacgctggtcaccggccatccgggcgtgggcaaatccaccctgttcgatgcgatgggccacgtcttcttcgccactccccggctgaacgaatcggccaatgatgcggccacccgcgaggaccgccgcaccacgttctcctatatgcgcgggcgcaagttcaagaccagtgccggcaccgtctaccagcgtccgggcgcgacgtggagcgccattgtgctcagctacgacgacggcatgggcaataccgtgaccgccggcgccgtcttcgacctgcccgacgccggtctggaaggccaggtctccaagcactacctgttgtgcgagggcaaggtcgatatcgcggagctggaaaaccacggaccgcgccgcttcactgtgtcctcgctgtccaaggctctggcacccagcgaagccttcgacacgcacaaggcgttcatcgagcgcctgcgccgccggctcggagtggaaagcgacaaggctttcgctctgctgcgcaccttgcagaacggcaagggcctggccaagggcgtcaaccagttcttccgccatgaggtgctggaagaaccagccacgctgaaggccgccgccgcggcggtggaggacttcgcccacctgcgcggcatctaccgccagctggataccgcccgcgcccagcgcgacgtgctggcgcaggtgcccgagcaggaccaggcctaccgcgacttggccgggcaaattgccagcacccggcaattgctcgaaagcgacgtgaacaccctggaagcccaggtccgccaactggtgctgcgcaatgacctggcctcccatgaatccgagctgtccaagctcaaggccgacgaggccgagcttcgccagcgcaaggatcagctcgatgaccagctggcgtcgctggaagccgcccacgattcggccggctccgcttccctgatgctgctggagcgcgaagccgatgtggcccgcaaggcgctgagcgagaaggaaagcctcatccgcaccctgcagcagcaggcggcggatgccggattgtcctttgaattctccgccaccggcctggatgagctgcgggccaatgccgcacgcaccctgcagcagctcagctcgattacccatgatgcccagactgtcgagtacgaggccatggccaccctggtcaacctgcgcaagcgcgcagaaaccctggccgagcagatccgctcctaccagcgccgggccagcaacatcgacgacaggtcgatcgccgcccgccgcgccattgcctcggcctgctcgctcaaggaagaacagcttcccttcgctggcgagctcatggatgtctcggccgatgccggcagctggcgcctggccgctgaaaagtccctgcattcgctggcccgcaccctgctggttccgggcgagctgctcgcccaggtcacccacgccatcgaccggctcgacggcttgggccgtgtgaggtggagcgatatctcgcagcagccgcgcaccgcgcaggccggcccggcggatctggtcaccaagctggacttcgcgccgggcgacgccggggcctggctgaaagccaagatcaccgccgactatccattggcctgcgtcgagaacgatgctgccatgcatgtgcaccccaaggcgatcaccccggccggcacgatcaagtccggcaccggaacttttgagcgcgacacccgcaccctgccggcgtccgagtacctgctgggcttcaccaacgagtcgaagatcgccgagctgcagtccaaggcggcgcggctggacgagaagatcatcaaggcccagcaggctgccgacgagcgcagcgcggcgaagaacaaggtcgtggccaaggcccagctgctgcaggctctgattgccgacgagcggactttcggccagctcgatgcctccgaagcgctggaggcattgcgccgcagcgagcagaagctcggcgacgcactggcgctgtccggggactcctcccgggtccgccagcagattgaaacggcgaaggccgaagccgaaacgctggtcggcgacctcgcgctggtccgctcgcgcatcgcagatcttgagctgcaggtgcagcgcgcgcagcagatcctctctgccagcgaagagctggattccggatgggaagacagcattcccccggccttgcgccagcatcagctgctgggcccggtactgcagcaggttgccgccggcgactgccctgccagcgaggacatcagcgaagcctttgccgaggtcaagctccagttgggcagccaggtcaattccctgcagtcgcggcgccaggaaatcggtggcgcattgagcgaaaccttccgtcgtttcgcccgcgagttcggcacctcccacgcgcaaacccacggcaccaccgctgaagccgcagagcactacgcgcagctgcacgaccagattgtggccgatggcctgcctcaccatgagacgcagttccgcgaatacttcgcgaaccgttcctacgaacgcttcagcgacctgttgcagctgctggatgaagagcgccggatgatctccgagcgcatcaagccgctgaaccagatcctctccgaggtggccttcgagcatggctcggtgctccgcctggaagtggccaatgcgattccggtgaaggccggaaccttccgcaaggaattgaaggacgcgttgcaggaggcctacaccaccaaggacgaaagcaccctggccagctcgtaccaggcgctggaggcactggtcaccgcgctcagcgacccagccatgaccgcctggcgctccaccgtgctcgatgtccgccagcatgtgatgatcagctgcaatgagcacaagcccaacggagaaatcgaaaccggcctggaaccgggcacgctctccggcggcgaaggccagcgtttcacttccttcatcatgggtgccgcattggcctaccagctgggcttcgcctcggccgggttcacctcctatggcacggtgatgattgacgaggccttcatccaggccaactccgaatatgcggcggcaggcatacgcgcgttgcaggagttcggcttccatctggtgctcgcggcccctgaagacaagatcgatttgagccgccatctgggatccatcacggacatcatcaagcatccgggatccaacatttcgggcttcgtgactaccggccgttccccggccatggccaccacgattaccctgcgcagctag

SEQ ID NO: 45338 - DNA, 1458 bp, Novosphingobium sp. MBES04
atgcagaccgagagcaacgaacatcgggagaaaggcacgcgcgatgccctgttcgggcatttgcctcccagcctctttgccgttctcgcctcccccgcccggcgcgattacgcgcggctgatcctgtgggtctaccgggccttcttcggcgagcactacacgaaccccgtacgcaaggacgacctcgtcgccttcattgcgacgcagatcgaccgtctctccgacatcgcggacgacttcgcctccgacgccgccaacgcggatgcgagccagaacccgctgaaagtctacgtcaaactgcgccaggccggatggctggtcgagcactcccgcggctatgtcgagatggtcgatctcgatgcctcggtctcgatgctgctcgagacgctcagcgcgatcgaggaaggcgaagcggtccatttcggcggcaccatcgccgcgctcgagagcgtgatcgagcgcctgggcgatgatcccttcgacaaggcctcctcgcttgccgatgcggcgctgcgcgcgcggcgcttccagcagcacctctccgccatcatcggcaacctgcgcgcccatgagcaacgcatcgtctccgatccgcagcccacgcagatcctggcgcgcttcttcgacttcgtcgaggacgtgctgatcgccgactaccgggtcatcaagaccaccaacaaccccttccgccaccgcaaccggatcatccagatgatctcggactacgagcacgacgccgaggtcgtggccgccttcgcccgcggctatcaggcgcagggactggcgacgaacccggagaacgcgacctcgcgcgtgcgccagcacctcgaccaggtaaagcgcatcttcgatgccgccgaggagcgcctcgacgacatcgacgccttccgcagccgcctcgaacagcgcattgcgcgtaccgtcagctacatgaacgagatcgacggctcgagcctgctgcgcgtcacgcacctcctgcgcgatgcctcggccctgccgctcgaatgggacgatgcggtggaggttccctccgagctgaccgatcccgtgcgccactggggcccggacagcctcgccgcgccgaccgcccggcgcatcgtcgccccgcccagtcccgtgcgcacctcgacggtcgatcccgcaatgatcgcctacgaccattcgcagaaggcctacctcctgcgccttgccgtcacgccgcagaagatcgccgactatgtcgagcgtaacctgggccaacgcgacgcgctcgatgccgatgccttcggcattgcgaccccggaggaagcgctgctgctgcaaggcgcgcgccagctcgacatgtacgccagcaaggacctctcgcggcggtttcgcgtcgtccatgatccgggccgcgtcgttgagaccgactggtccgccttcaccgcctttcgcatcgaacgtctttcccctgaacctgcgagcaacgagcaatga

SEQ ID NO: 45339 - DNA, 786 bp, Novosphingobium sp. MBES04
atgaacggccccacgctgtacgatcttgaagagctgctggagcacccgcagaaccgcgacctctccaaggagatgatggtgcgcgcggccgaccgcctgctctaccagcagtgcctgttccgcgacgaccacaacgcggccgggacctatgacctgctcgtgcgccaccgggtctacttcgcagggctcttcgatgcgctgggccgcgatctcgtggtccgtcccgacgagatgatggtcgagctgcgcccgcaggagagcctgacccgcacgatcctctcgctcgacgagacgatcctcctgctcgcccttcgcgccactttcgaaaacggcgtcctcaccatgagccaggaggagttcggccacgtcgagacgacctcgatggaggtcatggagcgctacgaccagtgggtcgcgcgcacccgtccgccatggtcgcgcgtgcgccgcatcctcgacagcttccggcgccgccgcttcatcgacctgggcgatgaaatcccgcaggaaaacggcattgcgatcaccatccgcccctcgatccgcagcgtgacgggcgacgcctggcagacgcgcatcgaggaatggatggaagccacccgcgcccgcctcgagaccgaggccgcgcaggacgagcccgagcccgaggtcgaggccgaagacgtcgccgcgcccaagaacaccgaggcccaggcgcccgacacagctccggaaacggacgccaccacatccgaagacgccaaatccgaagacggggacgacacctcgcaggagaccacctcgtga

SEQ ID NO: 45340 - DNA, 1416 bp, Novosphingobium sp. MBES04
gtgatcacgctcagccgcatcaacctcatcaactggtacaccttcgagcgcctctcggtggacctgcgcggcagcacctcgctgatcgggcccaacggcgcgggcaaatcctcgatcctcgatgcgatccaggtcgtcctcaccggcaacaaccgcaactacttccagctcaacgccagcgccaacgtcaccgcggggcagacccgcaaggtgggcgagaaccgctcggtcttcgactactgcctgggccgggtcgccggtgagacgctgcgcaccaattgcctcagctacgtcagcctcgtcttcgagcgcgagagcgacggctactgctggacggtcggcatcgcgatgagcgcggtcgagggcgagcagaccgaaaccgtgctgggcgccttcatcgcgccgggccagtcgctgcgcgacgccgacttcatcgaggagagcaaggacggcgcgtcctacgtgctgccctatgccgatctcgtcacccgcctgcgtacgcacgagggcttcgagaacttcggccaccgcccgacccacttcacccgccgcgtgctctcggtgctcggcggcaagggccaccacgccgaccccgagaagttcctgaaggccctgcgcaacggcctgcgcatccgcgagatgaagtccgcgaccgagttcgtgcgcgagttcctgctcgatcccgccgggcttgatgtcgacggcctgcgcaagtcggtcgcgacctggcgtggcctcctcaagaagatcgacgacctcgaagtccagaagaagcaggtcaccgaggccatcgcggcctaccgcgagctggacgagaaggtctccgaggaaacccggatgcgctggattgccagcaaggccgagcgcgaccgcctcgaagagcacctgcgcgtcgtcaccggccagcacgaagccaagctggccgagcaggacctcgtcgaccgccgcgtcgtgcgcacccgcgagacggtgggccgcctgcgcgaggaaatccgcgacatctcgcgcgcgctcgacaacgacacgcgcgagcaggcgatccgcgaattccgcgatctcaacctgcccatcgccgaacgcgccttcactgaagcggacggccagtaccaggcctatttcgccgccatcggcgcggtcgcggggctcgccgaccgcatcgtgcgcacctatgcgggcgaggaataccgccacgccagcgaagcgctcgaagcgctgaaagcccgcatcgccgatggcgcggcgctgtctgcgcgcgacatcgaccagatcgtcgtccagctcctgcccccgctcgaacgctacgtgacgagcgcgcaggacgcgcgcgaggcgcacctcgccagcttgccagcctcaggcagcagctgcgcgagaaccgcgagcagctccagggcctggagcgcggcggcgcgctga

SEQ ID NO: 45341 - DNA, 1452 bp, Microbacterium hominis
gtgtccgccgtcgcccaggttctcgagctcgcccagcttgcggagcgcgatgcggcgtggaagctgcttcgagccgacagcgcgcccgtggtcgccggtcttctcggcacccacctgggcggagacgagcgccgagtcgacgctgaggagctgtacgagcggatcgatgccgacctcgagcggctccgtgcgcaggggctgatcttgccgctgactgcgaaggggtactgcggggagtggcgatcggcaggcttcctggtgcgtcggccgtcatcggaagcgcggggtgagacgctcgagctttccccggatgcgatcgccgggatccgcttcttgcaggggcgtgccgccccgcgttcgagtgtgaccgagtctcggcttgcgagtcttgcggcgcaggtccgtcgcctcgcgatcgacaccgatcctgacgtgtcagcgcgcatcgcgctgctcgaggaagagatcgagtcgatcgagcggcggatcgagagcctgcgttccggtgacgagtccgcgatcgatgaagaccgggcgctcgagcgcgttcgcgacgtgctggcgcaggcggcggacgtgccggacgactttgctcgggtgcgtgctgagtttgagatgctgaatgcaacgctgcgggcgaagatcgtcgagtccgatgtctctcaggcggccgtcgtcgacgaagtctttcgcggaatcgaccacatctccgactcggatgcaggccgcagtttcgctgctttctcccagctcgtccttgaccctgcactcggtgcggcgttcgaggccgacatccgccgcatcctcgaccgcggattcgctcgcgacctcacctcggatgagcgccgggcactgcgcgccttcctcacaacgctcaagggacgaagcgcggagatccacgacgtcatcacattgttcgcccgggcgctccgccgctacgtgcagtcgcaggactaccagcgcgatcgggtcctgagaactcttctgcgggaggctcagcacgcggggatggaagccgccgcgcatacgcgtccgtggcatccgacgtctctcacgctggatctctctgctgtcgcgctgtcgagcgtcggggggatcgaccttcacgatcccgccgaattcgccgccaccgaagagatcgtcacgcagacgacatccctcgcgagcctcgaggagctacgggcgatcgctcgcgaaaccgagatcgacttcgacgaactcacccggaacgtcaacgacctgctcgccgaggtgccctcgtgcaccgtcgcagatgtccttgctcgataccccgcgacgcagggggtcggcagcgtgatcggacttctctcgatcgccgccgagcagggcaccgttgacggcgagcccgaggtgctcgcttggcagggcgccgacggagttccgcgtgcggcgattgtggccgcgcaccgattcacaggagcggtggtatga

SEQ ID NO: 45342 - DNA, 660 bp, Microbacterium hominis
atgaccgaatcgaccacggcggatgtcgcccccgacgagcacactggcctctggcgtggcgacgccggcgagctccctgatcgcacgcggcgggtcttgctgcgtctggtgcgtggcccgtatatatccggcgcgcgcgaggcgcagctgtgggcggtgctgctcaccgacgaggctgtcctccgctcccggcttgccgacctgttcctcgaattggtcatcgatcgtgacaacgagttcgccttcgtccgcaacgctccgtccgaggacgccccgaaggcagtgcggtctgaggcgttgacgttcctcgacaccgcaatgctgcttgtcttgcgccagacgctgctgagcgaggagggtcgcggtcgggtgatcgtcgggcaggcggaggtgttcgagcagctcgccgtgttccgcaccccggaccgtgatgagaaggacttcgcgagccgcgtcaactcgtcgtggaacaagatgcagaacaagctccgcgtgctgcacgccgttggcgatgaccgtgccgagatttcgcccgtgctccgactgctcgtcgatgccgaccagatccgcgcgatcacatcggagtaccaccggatcgcccgagagggcggaggagaatccgctgccccgtcgacggatgccgaggatgacacagaatga

SEQ ID NO: 45343 - DNA, 1122 bp, Microbacterium hominis
gtgaccacgcttgtcacaccgtttgacctgcgcgcgcgggcgaagaagctcttcgaccgcgatgcccgcacctgggccgccgagcagcaggccgatgtcgtgctcgaggttccgctgcgtccgccaacggagcgggaggcgctggacgatctcaatcgggttcgacagtgggtcgacgcctggcgcgacgtgagcgagggctggggtatcgagctcgagtgggtcgtccgccattggtcacgcatcgggtcgcaggaaatccccgttcgcgcggtgctgcgcggttcggattcgatcgctcgagcggcgggcgagacggatggctggcgacgtctggtggcgcgacttgacgagttgagaggcctggccggttccgacgccagcagtgtgctccgcgccagtgcccgtgcgatcgccgatctcgatggcgccgatttcgacaggctcgtccatgtgctggcctggttgcgcgagaacccggaatcgggccacctggtgcgggaactgccgatccgcggcatccacaccaagtggatcgaatctcgccgcggactcgtcgaggcgttgcatcgggcgggaaccggtgcgcccggactgggccttcgcgagctgtcaccgctcatacggatccgtgctctcgatccgtcgctctcgttccagggactcaccgatgtgtcggcgcccgtcgacgaccttgcggcaagcacgatccggcccgagcgcgtgttcgtgttcgagaacctcgccactctgctcgcgatgccggatgtgccccgagctgtagcagtgcacggtggtggtcaccgcgtcgatctcgtcgcccgcctcccgtgggcgcagacggtcacctactggggcgatctcgattcgcacggattcgccattctcaaccgacttcgagccaggggagtggacgcaacgtcggcattgatggatatggatactctgttcgatcaccgtgatctgtgggggatcgatccggacccgaacgtcggcgtgttcgagctgctcacgtctgatgagcgcgcgacgctccggtcgctgagcgcggagggcaacgtacgcctcgagcaggagcgcgtgccgtggagctatgcgctcgcgcggctcggggtgtgttga

SEQ ID NO: 45344 - DNA, 1458 bp, Pseudarthrobacter phenanthrenivorans
gtgccccgctccgccaggtcatccgctgacgccatcagcgcccggctccgggacctcgaactcctgaccaagggcccggcctgggccttgacccgatcggcgccgtgggtgatcgccgtgctccaggcttcctttacccgcacccggccgcaggtgccgctggaggaattccatgccgacgtcgactccttccttgaggagcttcggcggcaggaccccgggctgggcggcggggccaatggcaaggcttttggcgacgagtggaccaggcggcagttcctgacccgccggaaccagtccggcaggatcgtctatgaggccaccgaaccggccgcccgcgtgctggccttcctggacagcctgtccagcgagcggtccacgctgaacggttcccgcctgggcaccctgctgggggacgtggaaaagctcgccaatgaaaccaacccggaccagagtgcccggctcgaagccctcgaagaggaaatcgaggaacgtcagcagctgatccaggacatcagtaccggcgggttcgacggtctgctcgacgacgacgaggcggtggaggccgccggcaacatcctggacctcgccgcgagcctgcccgccgactataagaagatgcgcgaccggatcgaggaacttgtgggcgaactgcgcaaccagatcatcgaagagtcgctgaccaagggcgccaccatggcccaggtgctggaagccgacaagcggctccggcagagccccgagggcaggacgttccggtccttcaccgcattcctggaggacccgcagcagcaggtgcggttccggtcggccatcggcgaggtcctgagccgccagttcgccgacgacctgtcgcccgaggaccgcgaaaccctgaagaacctggtggccgagctccgccagcagcacagccagatccagcgcatctacggcaagctcagcgaaagcctgaacacctacgtccagagcgacgacttccgccagtccgtccggctgcggcaggtcctgcgggaagcggagcaggccatccggtccctcccttatgagcgggaacgcccggcactggtacccggcccggtgctctacaacgccggcttcgagtcgctgtccatggtcaagctcttcgatccggacgaattcgccgcgccgccccggctggccgaccccatcgccttcaccgactcggaccgggtgcgctcgcccaggaccggcaaggcgaaacctgcggtggtccgggcggccatggccggggccgcaagccttgccgaggcctggcagcagttgccggccgaagagcagcacatcaacagcatccgcgccctgctctcggaagccctgcacgcgggggccgatttcaaccgcggggcgtgggatggcctggacttcgaacagatagacggttccacccggaaggcctacctcccggtggtcacgctcgcaaaggattcagatgactga

SEQ ID NO: 45345 - DNA, 810 bp, Pseudarthrobacter phenanthrenivorans
atgactgaggaaatcacgacggcggaggaagcggcggttgggcatgccgatatcccggcggcatcgggcaccgggtacaccggggcagtctcaccccgtgacacgttcgtcgacggcgccgcgctgttcccgggcgacaccggtgtgctgcccatgaaggtccgccaggcgctggtgaagctcctcaagggcccgtacatcgacggcggccgggacgagaaactgtggacagtgctgctggacaaccaggtgatcctgcgcagccgcctctccgagctgttccttgccctgcagttggaccatgaacgcaagatcgctgtgctgcgccccgtggatccggacgtgatcggaggcagcacccgttccagcatcctgcgccagcagcgtgcgctcagccgggtggaaaccatcgtgctgctccggctccgcctgctgctggacaggcacgtcacggcacagacggaccccaccatcacccgggaggagatcagcgacctggtggcgcattaccagccctccggccagcaggacgccctccgcgacgcggacgtggtgacccgggccatcaccaagctcctggcccggcagctcctcgtccccaccggcctggacgacgtctacaccatttccaacgccctgcccctggccctgccgttcgaaaacatcggcgacatccccgcccacatcgaggccctggtagcggccagaaccgatcccaccgggaccgaggcgctgatcgacgtcgacgccaacccggtggttgaggccacagacgacgatgacaccgacgaagcggaggccggcaagtga

SEQ ID NO: 45346 - DNA, 3465 bp, Pseudarthrobacter phenanthrenivorans
gtgacgatcgcaagcatgcttccgctgggtgatgtcacgaacccggggcagatgcgccttgccttggtacaggtggtcaactggggcacgttccacggggcgcacacgatgcacgtggaccggaacggaaccctgctcacgggcaactccggcgtggggaagtcaaccctattcgacgcgatgctgcgggttttcgatgcccggccacggtccaacgaggccgctgcacagcgctcgggcggcgccgtggaggacaagcggaccaccttcacgtacatgcgcggcaaggtgggcgacaaggccgtgggtgagggatcggccagtgcgttccagcgccccggtgccacctggtccgccgtcgcgctgacgttcgacaacgctgccggcacccgggtgacggtctcggcactgttcgaccttccgaagaacggcaccgagtccagcgtgggccggttctacctgatcgacaacgtgcccctggaccttgaggccgtggagggcatcgcggacaagcgcttcaccaagggcgcgctggagacggtcttcccgcacgcgcaggtgttcgacgtccacaaggcgttcgccgagcggttccggcggctgctgggcatcagctcggaccaggcgctgcccctgctgcgcgtcatccaggccggcaagggcctgggcggcagcgtcaacaccttcttccgcgaccaggtccttgacgcccccgccacgctcgccgcggctgatgacgtggtggaggagttcagcaacctgatgtccatccgccagcggctggaggacgtccggcagcagcgggaccagctggcccccgtccccggcctcaaccgggagtatgcgcagtcgctgctggacgcgaaccggctccgcgaactggtgggggaggagttcgaggcctataagcagaagctggctgtcgaggtccaccggaagaccctgctccggtttaaggaactggcccaggcgaaagccaaggagctgggcgccgaacgcggcatccgtgacgggctggccaaggagctgcggcagctggaagcggactacaacaaccagggcggcaacgccatctcggcgatcgagcagtcgctggagaacgcccgggttggcctgaagctccgccgccaggtggaggaggcggcccagcaggcactgtccgacgccgggttgcagcttgagtggagcgcggccgggtgggagcaggcgcatgagcaggcggcggcgcggtcggccgagctgaaggatgattcgcaggccctgcaggagctgcggttcgaggccttcgatgcgcacgccacccgcaagcgcgagctcgcggccgctgagcaggagctcgtgtcgctgaagacgcgcaagtccctgctgccgccgtcgagcattgaaaaccgggccgcgatcgccgcggcaaccggcgttcccgaggaccatatgccgttcgcaggcgaactcatggacctcgccgaaggggaggaacggtggcggccggccgccgaacgcgcgctgcgcagcctggccaccacgctgctggtcccgggtgagcacttcgccgccgtgacccgctacctgaacggccacaacgtccgcggcgcgctgcgggcggtggatgtctccaaaccgctcgccggcggtgcgctcgccgtcgaggacgtgcgcggcggcgacctgctgaccaagctggacatcctcgcctccggcgcggccgccgttgccggtgaatgggtccgggagcgcatcgccctggatttcgcctacccctgcgtagaggacccggacgagctggcggcactggacaagggcctgagcctgggcggcgtggtcaagcggaaccgccacacggttgagaaggatgaccgcttcaccagccgccaggactacgtcctcggctttgacaacgctgccaagctggagcttgtggccgggcaggtggaggacctccggcaggaagtggccaaggccgccgaactggcgcaaagccgcgaggactcacaccagggcatgagccggcagctcgatgcgctgcggcggattgccgaagacgaccgcccctgggaacaggtgtctgctgcggtggcggcggaggagctcgcacggatcgagcaacggctcaaggacgccctggccgcgcaggcggacctggaaccgcttcgggccaccattgaggaggtccggcagaaacaccagtccagcacggaatcggcagccgtcctgcaaagcgaatacaaggcactcgaccgccagctgaccggcgccgacgcgatgctggaagccgctcgccggcgcctggcccaggcgccgccgtcggacgccaccgttaccgccctggaaccgcacttcgcggaattcggcgacgtgaccgagatgcacgagctggacaacctggccaaccgggtccggaccgccctgctgggcgaactgcacgccgcggagtcccggggacaggccactgccgagcggctcacgcggatcttcgagggcttcgtgcgggagtggggcagtgccatctcggcggaccacggaaccagcatcggcgcggccagcgagttcgaggcgcgctaccacgcgatcgtgaacgacggcctgccggcgcaggaggcggagttccggcagttcttcaaccagcgcacgcatgaatccttcagcacgctgctgcacctgctggacgaggaacgccgctccattaccagcaggatcctgccgctgaacggcatcctgtcccaggtgaacttccacgaaggcagctacctggaactggacatcaagcaaacactgccgcccaccgcaaagcagttcaaggacgccatccagaacgccctgaaggcccgccacacccggccggcgaaggcggaggcggggcgtgccgatggttccgctccggagaaggacgacgacggcgagctcaccgcccgctacaagtcgctggagacgctggtgaaacggcttggctcgcaggcgcccgaggaccggcgctggcgcgccgaggtactggacgtccgcggccacctgttcatccagtgcaaggaacaccgggaagtggccggtccgcgtggcggcaggaagaccgaggtgttcatgcatgccgacaccgggtccatgtccgggggcgagcggcaacggttcaccgccttcatcatggccgcggcattgagctatcagctgggcattgccgagcagggcttcaccacgtacggcaccgtgatgatggatgaggcgttcgtcctggcctccgaggagttcgccggtgcggggatcaaggcgctgcacgaattcgggttccagctgctgctggccgcgcccgaaaacgtgatcgacctgtcccgccacctcggctccgtgacagagatcctgcgggaccggcgcaccaaccgctccggcgtcctcaccgcgcccgtgatccgaccccgccccggggaagaaggagcttggcggtccgaggccaacccggtggacatcatcctgcgctga

SEQ ID NO: 45347 - DNA, 1464 bp, Flavihumibacter sp. ZG627
atgacctttgaggaaatccttctacagtttaaaacagctaaacctttactgcttttacgggcaaaaaatgctgcgtttattatttccttttttcaaaaagtattttctgatgctaacataactactattaccaatagcgaattgcgaagtaaactggaaggctacatggaagaactgtcgtatgaagaaagagatgaagaactggaggcagggacattgtttgatgatttttccgtaagagctgctcagtatatcgataaatggagcaatagcggttttttaagaaaataccccaatgacgaaggagaagatctgcatgagttaacgcctgataccatcaaagctttgaaatggctttctgatctcgaacgcagagagcatgttggaaccaacagccggttcaaggatatttttttcaagcttcagaaaatgattgaacaaaccaatgaagatgcagaagcaagaatagaagaactccaaaagaaaaaatgggccattgaagatgaaataaacctgctgaaatcaggaaagaagccatcggtatttgacgaaacggaaataaaggaacagttttacgatttaaataaaatggcaagggaactgcttgccgactttagcgaagtagaacaaaactttgagcaaatacgaaaagatattcaacggaaatacacggaaaaggatgtagctaaaggaacactgttagtatttgcccttgatgctctcgatgatattgaccagaaaccgcaaggaaaaagcttcaaagcattttgggagtttttaatggatgaaagaaggcaacaggaatttacacaacttacagaaaggctttaccaacttttaaatgaacacaatattgattataataatgatagatttttaaaacacctgaaacgtttcctgcatgtgtctggccgaaaagtgattgattctaaccggaagctaagtgaaaaaataagccgggtactttctgaaaaaaatcttttggaaagaagaagggctatggaattgattggtgatatacgacagatggcgtattcccttatcgaaacaaaaattagggaggatgattttatagttattgaagatgaaccatacattaatctttttgacagatgggaacctggtgaagagaaagacgatattaccggtatattatttccagatggtagcgcagatgaagaagatgcggattttaaaatactgttcgatcagtttacaattgacagaaagaaattgttgcaaagaatcgatgcaatgctcgaagaaaaaacccaggttactttaaaagaaataatcgatgagtatggaattgaaaatggcctgagtgaaattgttggctatttttcgatagccacttcaagtacacatcatattataatagaagaagcaaaagaaccaattttaattggcgaaagaaaagtaaatgtgccaatggtaatctatacaaggccaacaacaaagtaa

SEQ ID NO: 45348 - DNA, 597 bp, Flavihumibacter sp. ZG627
atggaaataaaaatcgcaagggctccatttgccgcagtcattattaaactattgcaggggcccgtgtatgcagatgataaaaacatctggcgggaactactgggctggcaatctgccatacaggaatattttggtaaaataggtatggaactaatcattactgaacaggatggctttgcaagggttatgcagcccgaaactgatgaaaatgatgataatccgctaccacgccttatgaaaaaacaatccctcaattatgaagctacattgctggctgtaatgctcagggaaggacttgaagagtttgatgtaaaaagcgaaggaacaaaattctatctcactcaaaaagaaataaaggaacggattgaattgttttataaagagcaaaccaataagagtaaactttggaaagatttatcaaaaccaataaccagtttaataaatattggcatactaaagctgaatcgtgaggatactgtcaataaggataacaaccagtacgaaataaaaagaattatcaaggcatttatcagcaatgataaacttgaagaaataaagaataagttaagcaactatgtcaacactgttcagcaataa

SEQ ID NO: 45349 - DNA, 3399 bp, Flavihumibacter sp. ZG627
atgtcaacactgttcagcaataataattcagataatggataccgattaagacaccttgaggtgtttaactggggtacatttaacggtaaagtatataaactgcagccggatggacgcacttcgctgcttaccggtgcaaatggcagtggtaaaacaacgctgattgatgcgttgctcaccatacttgttcctaccaataaaagattttataatcaatcttctggagctgaatcgaaaaaggaacgtgatgagaattcctatttctggggttatcacggtaaaacattttcggaagctgaggaaaaatcaaagacagagcagttgcgtaccaagacagataatccttactcagttttactggcctgttttcaaaattccggtacacagcatacaattacattggtacaggtcagatggtttagtaatggcgggcttcagaagatatttatagtttctccctacccgctgaatattactgatcattttggaaaagaccattttgattttaaaggcgattggaagaagaaactggtaaagcaatatgccaaaactgaagtttataacagctttaaagaatatgcggccaggttcagcgaattgtttggtttgagagataaagccctctcacttttcagccagacggttggaattaaagtattaggcgatttaaccaattttatccggcaggaaatgctggaagaatcagatgcagaggagcaatttaaaggcctctataatcactacagcgacttattgatcagccacaaagccatacaaaaagatgaaaagcaacttgaattgctggagccggtaataaaaaacaaacacagattggatgaattgcgacaaaaaaaagaacagctggattttatagaagaacagatgcctttttatcttggtaaaattgagtatggattgcttgagaaagatgttgagagacttgaacttgatattgaaattgccaacagggataaagagttaatttctgcttccgtagatagacttgataaagaaaaggaacagcttgttatgcaacgggctgcattgaatattgacagccagatttctctactgaataaagatatcgacggagaaacggaaaaaagaaatcgtaaaagtgctgaaaacacccggtatgtaaaattttgcgagcagctaaaactggatactgaaattgatgtagctgtattcagaaataattacaataaaatacttgaattaaatacctctgttcctgcggagtcagagaagtttgcagaaaagaaattgaggctaaaaattgagcaggaaagcgtaggtaacaaaatcgaggatctgcaacagcaaattacttcgcttttagcacggaaaaaccgtatccctgacgacctgattaatgcaagaaaaagattggttgatatattggaaacaacggaagatgaaattccgtttgtaggtgaattaatcaaagtgaaagcaactgaaaatctttgggaagattcaatagaaaaattgctgcataacttttcgatgcagctattagttccggaaaaattcagcaaagcagctaaccagtttatttataacaatgatatgcggacaaagctggtgtatcataaaattgaccgaagaccatccaacagtattgtacgttggccaactgagagtgatgctttggtaaataaacttgaactaaaagaatcagaatattcgaagtggcttgaaaccactctgcttgataggtttaattattattgtaccgatgatttggaagtattttatggttcacccaaggccgttacatcaaatggcttgatgcggaatgtaaaccggcatgaaaaggacgaccggccgggaagatggaataagtcaaaatacaggctgggatgggataacaaagcaaccattcaatacttgcagcagcagaagtataatgaggaaaaaaaacatgctgcactttccggtgagatcaaagaactaacaccgcttattgcagctttgcagctaaaggtgcaaaccatttctaatctcatacagataaaaaattatgatgacataaactgggcgcaacatgcagaaaagattaacacattgaataagcaggtgcaggatttaaaaaaatcaacagatgcttatgagttaattgaaaaacaaatcaaagaagtaggaaaacaattacagactgaaaatgagaaaagagatgctttaataacaaggattagtaaacttgacgacgaatataacagcaagaacctgcgtaagctcaacctgaaatttgaagaattacaggaagcaggtgaacaggcaattattgaatttttaaaggaagaagaaattgcttcctccggtattcaaacattaacgcagtttgatagtatgatgatgcaatctgcaattaaattaaaggcaaggcaaaaggcagcaggtaatgcggttaacaaacttgaacttgataccactacattaattgcagcctttataaatccgggagaaaaaattaccaatgaatttgctaactggagcggagatgtaatgaatataaaacccgacctcacagggcttggcgacctggaagatttgtataaaactatacaaacacagcggcttgttgagcataagcggaggttccgggactatatggataaaagtatgctggatgcactcaccagctatagggcctggctcaacaatgagttgagtaaaattgaggatatgattgaggaattgaatgtgccattaaagaagataaccttcaaccgcaatcctgatacttatcttcaattggaatgtcgccagctaaggggcgaaaatgaaataaatattttcagaggtcagttaaacgctgccatacccaatacactggattttgcaattcaaaaagatgagagttaccgacaggaggtttttaataatatcaaggagttaattactgaattacagaaagaagaaacctggcgaagaaaagtaacggatgtaagaaactggcttgtattcagtgccagggaatattctgcaatggaaaacaaagcaggtcaataccatgacaatacagccagctattccggtgggcaaaaagcacagtttacatacgctattttaggtgctgctattgcccaccagtttggaatatttcagcaaggtaaacagcataagagtctccgctttatcacagttgatgaggctttcagtaagttagatcctgaaaagagccggttcctgatggagttttgcgcacagctaaatcttcagatattggtggttaccccgctggacaaaattaatattgcggagccttatattaatgcggttcattttgtggaaataaaaaacaagaaaagttctgttctgtataaccttacaatggaacaatactacgagaagaaagaaagttttaaacagttagccgaaacaagagaatga

SEQ ID NO: 45350 - DNA, 1161 bp, Flavihumibacter sp. ZG627
atgataacaccaaatgaactttttgagaaatctgataaactgttttataaggttatcacagcagttttgaaagagcaggatatttttcccctggtcatcccttcgaacaagaagttgtcaggtacaaatttcagtgagcttaaagcagcaatcgttccactttatcagcaatcaaagcaagtcaaagggaaaggttacactattgaatggaaagaaaaagtagttgacggtacaaagcagaaaataccatcaaaaatcttttttgaagccctcgatgattaccttttttatgcaaagcgaacaaaagactacgaagcaattattaatgcttttgataacataactgcatcatgtaatagcttgtcagcctgggcgaaagaaaacgttattttcctacttaaccaagcggataaaatagacgatttaataaaagtctgtatttatttctgtaataataaaccacctcataatctatacttaagagagttgccaattgaagttcattctaagtttgttgaggataatactgcagcattaaaaaaaatgcttgatgtaatgttgcctccaaattggataaacaaaactgaaactgatttttccagccgctactacatcaagaagcctaatatctatgcccagataagaatattggatgaaagtctgaagccaataattggatatgatgagttagcattgacattagaagactccgcattgctgaattggaagcccgaaaaagtttttatagttgaaaacagggcatgttttctttcatttcccaaagtaaaaaatgccgtagcaatatttggagaagggtttaaaagcaggataagcaaacatattccctggcttgcaaaagcagaattattttgttggtttgaccttgatgcggctgggtttgaaatgctgaatataatccggcaatattaccccgaagcaaaaagttttttaatggatgagaaaacctacaatcagttcagccagttttcagttacttccccatacagaaaactgcaattagaaaaattagatgccaatgaattgaaactatatgaatttttgcaagccaatagcacgagattagagcaggaacgcataaccaattcttatatttcagaacaacttaaatcactcttagttggggttttaaaaaatggctaa

SEQ ID NO: 45351 - DNA, 1470 bp, Xanthomonas sacchari
atgaagccgcatgtccggatcgccggctatcgccagttgcgcgaacagccgttgtggaaactgctcgccgccgatcatgcccccgagctgatcggcctgctgcagaccctgctcggcgacgcccagcggcggctgccggccgatgtgctgcacgagcgcctgcagcgccagctcgatgcgctgaaggacgacgagctgtcgcgcgaactgccgcgcaccgcgcaggcctacgtggcgcactggctggcgcagggctggctggagcggcgcctgcccgaaggcgatgcgcaggaggaatacgaactgtcgcggcaggcggcgcaggccatccgcttcatcgccggcgtgcgcgacagcgccagcgtggccaccgagagccggctgtcgctggtgatccagcagctggtgcaactggccgggcagaccgagaccgatccggacgcgcgcctggccgcgctgcgcgccgagcgcgagcgcctggacgcggagatcgagcgcgtggccgccggcaagctggccgcgctggacggcaagcgcgcgctggaacgcacccgcgacatcatccgtctgtccgacgacctgaccgaggatttccgccgggtccgcgacgatttcgagcggctcaaccgcgagttccgcgagcgcatcatcgacgacgagggcgcacgcggcgacgtgttggaaaagctgttcgccggcatcgacgtgatcggcgagagcgaggccgggcgcagtttccaggcgttctggagcctgctcaacgacgccgagcagagcgtgcagctggacgcggcgctggaggcgctgctggcgcgcggcttcgcccgccgcctggaccgccacgaacgcgccttcctgcgcgggctcaccggcaccctgctcgaacgcggcggccaggtgcacgaggtgatgcagcatttcgcgcgcagcctgcgcggcttcgtgcagagccgcggctacctggagcagcgccggctcaaccagctgctgaagcaggcgcagggcgaggcgctgcagttgcgcgaccagctgcatgccaccgctgccaccggctacgtgctgccgctgagcagcgcgcggctgcgctcgccgtcgcagtggcgcctgcacgacccgcgcagccagctggtggacgggcgcgtgcaggcggccgaggcggcgacgatctcgctggacagcgtcggcgacctggtggcgcagtcggagatcgacctgcgcggcctgcgcaacgacctgcacgacctgctcggccgccagccgcaactgagcatcggcgaggcgctgcggcagcgcccggcggcgcagggcctgggcagcgtgatcggctacctggcgctgggcacccgccatggcgtggtggtcgacggcgaatgggaagcggtgcaatgggagggcggcgacggccaggtccggcgcgcgcgcatcccgctggtgtggttcaccaaggaaaaacgcaatgagctggtctga

SEQ ID NO: 45352 - DNA, 690 bp, Xanthomonas sacchari
atgagctggtctgacgaattccacggccacgacgccgatgccggcgatgtcgccgcggccgccgccacgtccgctgcggccgatggcggcaccgcgctgttcgccggcgacaacggcagcctgccgctggaggcgcggcgcgcgctgtgccagctgctgtccggccccagcgtcgatgcctaccggcacggcccgctgtggcaggccttgctgcgccacgaggccgcggtccgccgcgtgctgagcgagctgttcctggaactggtgctggaccgcgatggcggtgtggcgttcgcgcgccaggccgataccggcgagctggagaccccggcgttgctgcgcaccgcgccgctgaccttcatcgagtcggtgctgctgctgtttctgcgccagcaactggccgaggccgatacccgcggcgagcgcgcggtggtcgacgaggcgcaactgctggaagtgctgtcggtgtacgagaagaacgtgtccaccgaccgcgccggcttcgcccggcgggtgctggcggcgatcgccaagatgcgcgacaaccacctgctgtccaagctgcgcggcagcgaggaccgctacgaagtctcgccggcgctgaagctgctgttctcggccgaggacgtgcaggcgctgtcggcggcctatcgcggcctgcgcgacggcgtggccgaggcggcgccgtga

SEQ ID NO: 45353 - DNA, 3825 bp, Xanthomonas sacchari
atgacgtccctgtccgaatcgtccaccgtccccgtcgccccgtccctgttcgccgagaccctggccgagcaacgcgcgcagcagtaccgcatgcgccggctgcaggtgcacaactggggcaccttcaacggcctgaccgacgtgccgatcgccgagaagggcttcctgttcgtcggtcgctccggttcgggcaagtcgaccctgctcgatgcgatgtcggcgctgctgaccccgccgagcatcgtggacttcaacgccgccgcgcgcgaggccgagcgcagcggccgcgaccgcagcctggtgtcctacgtgcgcggcgcctgggccgaccagcaggacagcgcctccggcgagatcgccacccagtacctgcgcaagggcgcgacctggtcggcgctggcgctggagtaccgcaacgcgcatggtcaggcggtgagcctggtgcggctgttctggatcgccggcagcggcaccgccgcggccgacgtgcgcaagcactacatggtggtgccgcgcggcttcgacgtggccgccgagctggacggcttcgacctggacctgcgccggctcaagctgcgcctgggcgaggacgtgcaccacttcgacagcttcgccggctacgccgagcgcttccgccacctgctcggcatcggcaacgagatggcgctgcggctgctgcacaagacccagtcggcgaagaacctcggcgacctcaacgccttcctgcgcagcttcatgctcgacgagccgcgcaccttcgaggccgccgaccgcctggtcgaggacttcgccgaactcgacggcgcgcaccacgcggtggtgaccgcgcggcgccaggtggaaaccctgaccccggcgcgcgactaccacgccgaactgctggcgctgcgccacagcgtcggcgagctgcgcgaactgcagctgggcatcgacggctaccgcgagcagcgccgcctggccctgctcgatgcacgcctgcaggaactggacacgcaggaccgcggcctggccggcgaggaagggcagcgccgcgaagcgctggacaaccacgaacagaccctggccgagctggagacccagcagcgcgcgcagggcggtgagcaggtcgaggcgctggagcgcgaacgcggccgcgtcgaacgcgagcgcgacgagcgcatgcgccgccgcagccaggtcgaacaggcctgccgccagctcggcatgggcctggccggcagcgccagcggctttgccgagcaggtagcgcaggcgcgcgcgttgcgcgacggcgtcgccggcgaggccagcagcctggacgaggcgattgccgaacgcatggccgagcgccgcgaggacgagcgccgcttcgcggtcatccgcaccgagatcgaggcgctgctgaaggcgccctcgagcattcccgcgccgatgcaggcgctgcgcgcgcggctgtgcgccgagaccggcctgtccgaagccgccctgccgttcgtcggcgagctggtgcaggtggaggccgaccaggctgcctggcgcggcgcgatcgagcgcgtgctgcacggcttcgcgcagtcgctgctggtcgacgaacgccactacgccagcgtcgccgactgggtcaacaagacccagctcggcacccgcctggtgtacttccgcgtgcgccacaacgcgccgctgcagcagcgcgagcccgatgccaagtcgctgctgcgcaagctggaactgcgcgaccatgcctatgcgccgtggctgcgccaggaactggcgcggcgtttcgactacacctgcgtcgataccgtggcgcaattgcgcgatgccgagcgtgcgatcacccgcgagggccaggtcaagcatccgggcgatcgctacgagaaggacgaccgccacgccgtcggcgaccgcaagcgctggctgctcggctacgacaaccgcgacaagctcaaggtcttcgagcgcgaggggcagaccctggcgcagcgcatcgccgcctgcgatgccgacgtcgccgccctgcgcaagcagcgcgaacaggaccagggccggcaactggccgcgcacaccctggccgagcgcgagtgggacgagatcgacgtcgcgcccaagctgcagcgcctgagcgacatcgccgagcaactgctgcaactgcgcgagggcgacaccgcgctgcgcgcgctgggcgagcagatcgccactgtccgcgcgcgccgcgaccaggcgcgccgcacctacgaggacgtgcgcctggagcgcgcgcaggtgagccgcgagcgcgcgcgtctggaagcgcagcgcgagacctgcgccgcgcgcgtggccaccgcggtgatcggcccggcgcaggtcgcagggctggacgcgcgcctggccgcgctgccgccgctgagcctggacaacctggaagcgcatctgcgcagcgtcgagcgcgggctcggcgaacagctggcgcagagccaggcgcaggacgcgcggctgagccagcaggtgctggactgcttccgccgctactgccagcagtggccggaggacagcggcgacttcaccgtcagcctggccagcgccgacgatttcctggcgcgcctgcagcgcctggaaagcgacggcctgccgcgtcacgaagggcgcttcttcgacctgctgcagacccagagcaagaacaacctgctggccctgcagcgctacaccgccgaagcgcacaaggcgatcaagcagcgcatggacgaggtcaatgccagcctggaacaggtgccgttcaaccgcggcaccctgctgaccatcgaagtcagcgaccggcgcctgctcgaggtgcaggagttccagcagcagttgcgcgccgtgctcggccaccagcagaccgaagatcgtgcgttggccgaggcgcagttcgccatgctgcgcgggctggtgcagcggctcggtgcgcaggagccggagttgcggcgctggcgcgagcaggtgctggacgtgcgccagcatgtggagttcgtcggcgtggaactggatgcggacagccgcgcgcaggtggagatctaccgcagcggtgccggcaagtccggcggccagcgccagaagctggccaccacctgcctggccgcggcgctgcgctaccagctcggcggcgaggacggcgaactgccgcgctacgccgcggtggtgctggacgaggccttcgacaaggccgataacgaattcaccgcgctggcgatgaacatcttcgagaacttcggcttccagatggtggtggccacgccgctgaagtcggtgatgacgctggagccgttcatcggcggcgcctgcttcgtcgagatcagcggccgccacaactccggcgtgctgctgatcgaatacgacgagcaggcgcaccggttgaagctgcccgagcgcagccgcaacgacgcggcgacgcctgcggtggaatccggcgtggcggtggaccaggctggcgccgatctgccaccgccggccgcggacgcagcggccaccatcgccgagcccggcgcagcgactgtggcagacaccgttgccgcgccggcgcgtgcctccgccaaggcgcgcgatggccgcggcaatcgcgccaagtcgaccccgcgcaaggcgtcgccaatggcgccgggcaaacgtggcgacacgcgtgccgcgccgtcctcggcaaagaccacctcggcgaaggcgccacgcacgtccaccgcggctgcggcagctgcgtccgcggcaacgcggccagccgcgcggtcggcgtcggcgaagccggtgaaagcaggcacaggcagcaaacctgcgaagccggccaaggcggcagcagtcaagacgccgcctgcgagcggcaagcgccgcggccactga

SEQ ID NO: 45354 - DNA, 1575 bp, Bifidobacterium animalis subsp. lactis KLDS2.0603; identical to SEQ ID NO: 41902

SEQ ID NO: 45355 - DNA, 810 bp, Bifidobacterium animalis subsp. lactis KLDS2.0603; identical to SEQ ID NO: 41925

SEQ ID NO: 45356 - DNA, 3498 bp, Bifidobacterium animalis subsp. lactis KLDS2.0603; identical to SEQ ID NO: 41904

SEQ ID NO: 45357 - DNA, 1221 bp, Bifidobacterium animalis subsp. lactis KLDS2.0603; identical to SEQ ID NO: 41905

SEQ ID NO: 45358 - DNA, 1470 bp, Xanthomonas citri subsp. citri A306; identical to SEQ ID NO: 41638

SEQ ID NO: 45359 - DNA, 702 bp, Xanthomonas citri subsp. citri A306; identical to SEQ ID NO: 43556

SEQ ID NO: 45360 - DNA, 4023 bp, Xanthomonas citri subsp. citri A306; identical to SEQ ID NO: 41640

SEQ ID NO: 45361 - DNA, 1575 bp, Bifidobacterium animalis; identical to SEQ ID NO: 41902

SEQ ID NO: 45362 - DNA, 810 bp, Bifidobacterium animalis; identical to SEQ ID NO: 41925

SEQ ID NO: 45363 - DNA, 3498 bp, Bifidobacterium animalis; identical to SEQ ID NO: 41904

SEQ ID NO: 45364 - DNA, 1221 bp, Bifidobacterium animalis; identical to SEQ ID NO: 41905

SEQ ID NO: 45365 - DNA, 1470 bp, Xanthomonas fuscans subsp. fuscans; identical to SEQ ID NO: 45047

SEQ ID NO: 45366 - DNA, 702 bp, Xanthomonas fuscans subsp. fuscans; identical to SEQ ID NO: 45048

SEQ ID NO: 45367 - DNA, 4023 bp, Xanthomonas fuscans subsp. fuscans
atgaattcccagtccaatctgtcgccggcgcagccgggtgcctccttgtttgccgagacgctcgccgagcaacgtgcgcagcagttccgcatgcggcgcttgcaggtgcacaactggggcaccttcaacgggctgaccgaagtgccgatcgcggagaagggcttcctgttcgtggggcgttcggggtcgggcaagtccaccttgctggatgcgatgtcggcactgctgacgccgccgagcatcgtcgacttcaacgctgccgcgcgcgaagccgaacgcagtgggcgcgatcggagtctggtgtcgtatgtacgcggtgcgtgggccgatcagcaggacagcgcgtccggcgaaatcgccacgcaatacctgcgcaagggcgccacctggaccgcattggtgttggagtacgcaaacgcgcattgccagacggtgagcctgatccggttgttctggatcgccggcagcggtaacgcggcggccgatgtgcggcgccactacatggtcgcgccacgccgtttggacgtggcgaccgagctggatggcttcgatctcgacctgcgcaggctcaaggcgcggttgggcgatgacgttgcgcatttcgacggcttcgccggctacgccgaacgtttccggcatgcgctgggcatcggcaacgaaatggcgttgcggctgttgcacaagacccagtcggccaagaacctgggcgatctcaatgcattcctgcgcggtttcatgctggacgagccgcggaccttcgaagcggccgaccggctggtggaagattttgccgaactcgatggcgcgcaccatgcagtggtcaccgcacggcgccaggtagaaaccctgagccctgcgcgcgagcaccacgcggcgctgatggcgctgcgccacagcgtcggcgagttgcgcgagctgcagctgggtgtggacagctaccgcgagcagcagcggttggccttgctggatgaacggctgcaggagctggacaaccaggaccgtggactggccggcgaagaaggccagcggcgcgaatcgctggataaccacgagcagaagctgctcggcttggagcgcgagcagcgcgccgccggcggcgagcagatcgaagaactggaacgcgaacgcgcacgcgtcgagcgcgagcgcgacgaacgcctgcgccgccgtgcgcagatcgaacaggcctgccgtcagctcggtaccgcgttggcggccggtgccagcggctttgccgcgcagattgcgcatgcgcagaccgtgctggataacggcaagcacgacgccagcgcgctggacgaggccatcgccgagcgcatgggcgcgcggcgtgacgacgagcgccgctttgccgagatccgcgccgaactggaggcactgaaaaaagcgccgtcgagcatgccggcaccgatgcaggccctgcgcgcgcggctgtgcgaagacaccggcattgccgaggccgcgctgccgttcgttggcgagctggtgcaggtacgcgaggaccagatcgcctggcgcggcgcgatcgagcgtgtgctgcacggctttgcgcaatcgctgctggtggacgagcggcattacgcgcaggtcagcgaatgggtcaaccgcacccatatcggtacgcgtctggtgtacttccgtgtgcgccgtaacgacgagctgcattcgcggcgggtcgaccccggcgcgctgcccggcaagctgcaattgcgcgagcacgcctttaccgaatggctgcgcaacgagctgacccgccgtttcgactacgcctgcgtggacaacgccgcagcactgcgcaacgccgaccgcgcgatcacccgcgagggccaggtcaagcatcctggcgatcgctatgagaaggacgaccgccacgcggtcaacgaccgcaagcgctggctgctcggtcacgacaaccgcgacaagctcaaggtgttcgaacgcgaagcgcagacgctggcgcagcgcatcgccagctgcgatgccgatgttgcagcgctgcgcaagcagcgtgagcaggaccaggaacgccaactggccgcgcacaccctggtggagcgcgactgggacgagatcgacgtcggccccaagctgcagcgcctgagcgatatcgacgaacagttggtgcagctgcgcgaaggcaacagcggcttgcgcgcgctcggccaggccatcgacaccgcacgtaccctgcgcgaccaggccaagcgcacctacgaggatgtgcggctggagcgcgcgcaactggcgcgcgagcgcgtgcggctcgaacagcagcaggcggcatgcgcgggccgcgccggtaccgccacgctcacgcccacccagttgcagggcttgcgggaacggcttgccgcattgacgccgctgtcgctggacaatctggaagcgcatttccgcgtggtcgagcgtggcctggccgagcagctggccgacagccagggccgcgacagccggctcagcgcgcaattgctggaatgcttccgcaagtattgccagcagtggcccgaagacagcggcgatttcaccgtgagccttgccagcgccgacgatttcctcgcgcgcctggaccggctggaaagcgatggcctgccgcgtcacgagcatcgtttcttcgacctgttgcagacccagagcaagaacaacctgctggccttgcagcgccacaccgccgaggcccacaagggcatcaagcagcgcatggacgaggtcaacgccagcctggagcaggtgccgttcaaccgcgacaccatcctgaccatcgaggtcggcgaccgccgcctggccgaggtgcaggaattccagcagcagttgcgcgcggtgctgtcgcatcaacagaccgaagaccgtgccctggccgaagcgcagttttccaccttgcgtgcgctggtagcgcgcctgggcgcgcaggaaccggaggcacgccgctggcgcgaacaggtgctggatgtgcgcctgcatgtggagttcatcggtgtggaactggacgcgcagacgcgcgcgcaggtggagatctaccgcagcggcgccggcaaatccggcggtcagcgccagaaacttgcaaccacgtgcctggcggccgcgctgcgttaccagctcggcggcgaagacggcgaactgccgcgctactgcgcggtggtgctggacgaagccttcgacaaggccgacaacgaattcaccgcgctggcgatgaatatcttcgagaacttcggcttccagatggtggtcgccacgccgctgaagtcggtgatgaccttggagcccttcatcggtggtgcgtgctttgtcgaaatcagcggccgccacaactccggcgtgttgctgatcgaatacgacgagcaggcacagcgattgaagctgccggagcgctcgcgtggcgatgagccggcagttgccgatgccactgacgctgcgccgtcgatcgaggccgcgggcgagcctgcaggagtgcagggcgctgccagcgcagatggcacggcaaccgacggcgtcccactgcacacggcatcgcctgcgacggaggagaccccgcccgcagcgcaggaaacgcagactggtcagcgcaagccggcagtcgcgacgacgaacaagcagaacaagaccgccaagaccgcatcttccacgcgcgctgcggcacagcctcaagcaaaacgcccgaagaaatcgccttcgcgcattccggctctggctggcaagccggcatcggacaaacgcacagccggcgtgccggcggtgtcgtcaaaagccgcatccaggtccaacgtgggcaagaccacgcggtcttcaaaaacgccgggcaagccgattgcggccacaagcgcatccaacgccacgtccaggaaggtcgccgccgcatctgcggcattgaaaactgccgcagccaagccacgtgcaacagccgcctcggtcgggcgaccagcgcgtggcgccggcaagacaaccgcgacgcgcgcggcgacgaaaccgtcaccggccgcaacgcgcggcgccaaggcaggcactgcgcaggcgcgcggcaagcgctga

SEQ ID NO: 45368 - DNA, 1455 bp, Azotobacter chroococcum NCIMB 8003
atgatggaccacgccagcctcgaggccctgcgcagccatcaccccgcctggcggttgctcgcctcgccccaggcgcccctggtggcgagctttctgcaccgggtattcatcgcgcccaacgtacgggtgatggccgcggccgatctcgccgaggcgctggaggacgagttgtacgcgctgcgcgagcgtctgggcgaagagaccttctccagaaagccggccatcgactttctcaacgactgggccagccccgagaagggctggctgcgcaagttctaccggcagggttcggacgagccgcagttcgacctgaccccggctaccgagaaggccattgcctggctgggccaactgtcggaacgcagcttcgtcggcaccgagtcgcgcctgctgaccctgttcgggctgctcaagcagatgagcgagggtagcgaggcagacccggccaaacgcctggccgagctgcagaagcggcgcgacgagctcgatgcgcaaatcgcccgcgtgcaggcgggcgaggtcgtgctgcttgacgacacggcgctgaaggatcgtttccagcagttcctgcaactggcgcgcgagctgctgaccgacttccgcgaagtggagcacaacttccgccggctggaccgtcgcgtgcgcgagcgcatcgccctgtgggagggcagcaagggcgcgctgctcgaggagatcatgggcgagcgcgacgccatcgccgactccgaccagggacgcagcttccgcgccttctgggacttcctgatgtcttcccggcgtcaggaggagctgaccgccctgctcgaccaggtgctgaccctggcgccggtggccgaactcaagcccgaagcgcgcctgcggcgggtgcattacgactggctggaggccggcgagcacacccagcgcaccgtggcccagctctcgcagcagctgcgccgctttctcgacgaccaggcctggctggagaaccgacggatcatggagatcctgcgcggcatcgaggccgggaccctggccgtgcgcgacagtcctcccgcgggcgagttcatggacatcgccgagccggccgcggacatcgagctgcccatggagcgtcccctgcacacgccggcgctcaagccggtgatcgccgacatcgccctgcaggcgggcgcggaggatatcgacgccgccgcgctctatgcgcaagtggtggtcgacaaggcgcggctggccggccatatccgcaaggccctgcaggagcgtgcgcaagtgaccctgcgcgagctgaccgaggcccagcccctgcagcaggggctggcggagctggtgacctatctgcagctgggcagcgaaaccttcaggaccgtggtggacgaaggcacgtccgaacgcatcgcctgggaggcgccggcgagcgacggcgtgccggtgcgcaagacggcgcacctgccgcgcatcatcttcgtgaggtga

SEQ ID NO: 45369 - DNA, 657 bp, Azotobacter chroococcum NCIMB 8003
atggaagaaccacaacagccgcagggcagcgccgccccccaggtcgacctttccgtgctggcgatcgccctgctcaagggcgtgctctaccgcgagggcgacgaacgcctgtggggcgcgctgctcgacctgcaggccagggttcgcgactacgtggccgtgctgggcctggagctgatgctcgacgaggccgaaggctacgcctttctgaaaagccgccccgaacccgaggacacctccgccacccaccacctgccgcgcctgatcgcccgccgcccgctgtcgtttccggtgagcctgctgctggcgctgctgcgcaagaagctcgccgaattcgacgccggcggcggcgacatccgcctggtgctgagccgcgacgacatcgtcgagctggtacgcgtcttcctgccggacagcagcaacgaggcaagactcatcgaccagatcgaaacccacatcaacaaggtcgtcgacctgggcttcctacgccgcctgaagactgcgggcggcccggccagctacgaagtccggcgcatcctcaaggcgttcgtcgatgcccagtggctggcggatttcgacgcccggctggcggtctatcgggcgcagctccgcggcggagaagcgccgcaagccgaccggccgggaggtgcgggatga

SEQ ID NO: 45370 - DNA, 3363 bp, Azotobacter chroococcum NCIMB 8003
atgaacgagccacaaaccccgagcctggatttcgccgccgacgacgccctgtccggctttcgcctgaagcgcctggaggtgttcaactggggtaccttcgacggcaaggtctggacgctctcgctcgacggccgcaacggcctgctcaccggcgacatcggctccggcaagtcgaccctggtggatgccctgaccacactcctggtgcccgcccagcgcatcgcctacaacagggccgccggcgccgacagcaaggagcgcagcctgcgctcctacgtgctcggccactacaagtcggagcgcaacgaggtcaccggcagtgccaggcccgtggccctgcgcgaccacaacagctactcggtgatcctcggcgtgttccacaacgccggctacggccagacggtgacgctggcgcaggtgttctggatgaaggacgcgcagggacagccggcgcgcttcttcgtgggggcggagcgcgagctgtcgatcgccgccgactttgccggattcggcccggacatcgcgcagctgcgcaggaagctgcgcgcgctgggcgcggaaatcgaggacggcttccccaagtacggcgcctggttccggcgccgtttcggcatcgacaacgaccaggccctggagctgtttcaccagacggtgtcgatgaaatcggtgggcaacctcaccgacttcgtgcgcagccacatgctcgaacccttcgacgtggcgccgcggatcgccgcgctgatcgcccatttcgacgacctgaaccgcgcccacgaagccgtgcgcaaggccaagcgccaggcggagctgctcgcgcccctgacggcggactgcgaccgccaccaggggctgtcgggagagctggaaggcctgcgcgcctgccgcgacgcgctcaggccccgtttcgccgagctcaagctcgacctgctggagcggcgcctgcaactgctgggcgaagaacaggcccgcctgggcacacagaaagagcgtcgtctggaagagcgggaccggcagcgcagagaagaggaccggctcaagcgcgcggtggcggaacagggcggcgaccgcctggaacaactggccgccgagatccgcgagcaggagcgcgagcgcaatcgccgccagcagcgcgccgaacgccatcgcgacctgctgagccgcctggacgagccgccggtcgccgacgaggcggcattcgaggcactgcgccagcggctcgatgcccgccgcgaagccctgagccagcaggaaagcgacgtccagaaccgcctcaccgagtggggggtgacgctgcgcgagggcaagcgcgagcacgctgccctgtatgaggagcttgccagcctcaaggcccggcgcagcaacatcccgaaagcccaggtaggcatgcgcacggcgctgtgcgaggcgctcgggctggacgaggcggtcatgcccttcgccggggaactgctccaggtgcacgaggaggcgcgcgactgggaaggcgccatcgaacgtgttctgcacaatttcggcctcgccctgctggtgccggacgagcactatgcagaggtgtcggcctgggtggatcgcacccatctggccggacgcctggtgtatttccgcgtgcgcccggcacgccagggcggcgcgccgagcctgcacgcggattccctggcgagaaagctcgcgatcaggccggactcggcgttctacgcctggctggagcgcgaactcgcccagcgcttcgattacgcctgctgcgcgacgccggagcagttccgccgggaaacccgcgccctcacccgcagcggccagaccaagacgccgggcgagcgccacgagaaggacgatcgccacagcctcgacgaccgcagccgctacgtgctgggctggagcaacgcggccaagatcgccgccctggaggcgcagcgacacagcctcgaactgcgcctgggcaagatcgcccaagacatcgccgggacgcagaacgaacaggcccggttgcgccagcggctggaagcgctggcggcgctccgggagttcgcggacttccgcgagcaggactgggccgcttgtgcgacagccatcgcccgcctgcaggaagaaaaggcgcgactggaagccgccagcgacaccctgcaggagctcggcgcccggctggccggcgtgcaggacgagttgcgggccggcgaagaggtgctgtcgaagctggaccaggcgctcggcagcgtcgagggcaagcaggaggccgccagggcgctgcaggcggagaccaccaccctgctcggcgaccttcccgtcgccgcgcgtcaaaggctcgatgccttgcgcacggaaatgctgggtgagcaccagctctcggtcgagtcctgcgacaaccgcgagcgcgagctgcgcgatgccctgcaggcgcgcatggacgccgagggcaaggcactctcgcggctggccgagaagatcatcaaggccatgtcggccttcaaggacgagttcaagctggaaaccgccgaattcgacgccagcctggacgccgccttcgaataccgcgcactgctcgaacagttgaaccgcgacgacctgccgcgcttcgagaaccgcttcaaggagctgctcaacgtcaacaccatcaacgagatcgccaacttccacggacagcttgcccgcgagcgcgaaaccatcaaggaacgcatcgcgcggatcaacgagtcgctggcgcaggtcgactacaaccccggccgctacatcgtgctggaatcgcaggccagcccggacgtggagatccgcgacttccagagcgagctgcgtgcctgcaccgatggcgccctgaccggctccgacgacacccagtactccgaggccaagtttctccaggtcaaggccatcgtcgaccgtttccgcggccgcgagggccagacggagcaggaccggcgctggaccgccaaggtcaccgacgtgcgcaactggttcctgttcgccgccagcgagcgctggcgcgaggacgacagcgagcacgagcactactccgactccggcggcaagtccggcggccagaaggaaaagctcgcctacaccatcctcgcggcgagcctggcctaccagttcggcctagaatggggggcggtgcgctcgcgttcgttccgcttcgtggtcatcgacgaggccttcggccgcggctcggacgagtcggcgcaatacggcctgcagctcttcaggcaactcaacctgcaactgctgatcgtcacgcccctgcagaagatccacatcatcgagcccttcgtctccagcgtgggcttcgtccacaacgagggcggccgggcctcccggctgcgcaacctgtccatcgaggaataccgggcgaacaaggcggaaccggcgccgtga

SEQ ID NO: 45371 - DNA, 1188 bp, Azotobacter chroococcum NCIMB 8003
gtgaactggaccacggccagcgacctgaagcagcaactgtcgcgcctgtgggagcgcggcgagctgctgcgcgcgcagatacaggaaatgccggcgtttccgctgcgcctgcccctgaagggcccgggctcggccgaagtgaccgggcagttcgaggcggttcgccactggatcgcccagctcgtggccatgccgcacctgcgcatcgagtggcgcgaggtccgccatgcggtgatgggcgcgcaacgcctgccccagtccctctggatcgacagccccgaggcggccatcgcctggctcggcaagcggcgcgagtacgagtgcttcgccggcctggtggcgctgacccgttcgcgccagccgagcctgctcgcctggctcgccaggcgccccctgcaggccgtcgagctggccggaaaatggccgcagctgctcgacttggtggagtggatgcagcgccacccgcgccccggctgccatctgcgccaggtcgacgtgccgggcgtgcacagcaagttcatcgagacgcaccgcgccgtactggcggaactcttcgagctggtgctgcccgccgaggccatcgccggcgaacacggcggcgtgggcggattcgccgcccgctacggctttctcgacaagccggtgcgcatccgcttccgggtgctcgatgcgcgcctcggcctgctgcccggcacgccgctgcccgacgtgacgctggacgccgacagcttcgccagactggccattcccgtgcggcgggtgttcatcaccgagaacgaaaccaacttcctggcctttccggcgctgccggacagcctggcgatcttcggcgccggctacggctgggatgcgctggccagagcccgctggctcgccggctgcaccctgcattactggggcgacatcgacacccacggcttcgccatcctcgaccagttgcgcggcaggttcgcgcatgtcgaatccttcctgatggaccggcagacgctgctggcgcaccaggcgctgtggggagaggaagaaaggccggtgcggcacgacctgccgaggctcgatgccgacgagcgggccctgttcgacgaactgcgcgacaaccgcatccgccgggccctgcgcctcgaacaggagcggatcggcttccactgggtgcaggcggcgctggccaggcttgccggcgacgggcgctga

SEQ ID NO: 45372 - DNA, 1479 bp, Bifidobacterium adolescentis
gtgtatgagaccggggtgctgcgattgctgctgcgcggcaattccatgctgtacgtcgcgctgctgcgctccacgttcgacccgctcaccggcgagctgccacgcgagatcgtcgaggaacggttctcccgcagtctgacccgacttgcggaaacgggcgattacacgcccaaggaagggcagacgtccgcggaagccgcgcacacgatcctgcagcagctgacgaaggaaggcgaaggcgactacgcttggctcgccaattcgctcgacgtcgcctcgcaccgctacctgtaccgtctcacggcgcgcgcccaccgtgcgatcgaggcgctcgaccggctcgaggacaccacgaaagcgctgtccggcgcgcaggccaacagcatcatcatggagatcgagcatgcgcgcatgcagctgaccgccgacccccgcgaacgcatccgcctgctcgaacgcgacatcgaggagcggcaaaggcagatcgacgaattgaagcacagcgacacgttggacaagctcacctcccaacaggtgggcgacatcatcggcgtcatccacaacacgctgcgcggcgtgccgatcgacctgcgcgaactggcgctcgaggaacgcgacaacggcgacaatctgcgccgaagcatgcagtcgggctccatcagcgtggagcaggcgctcggcacctaccatgacgaataccacaggtcgttccacgaatccgacagcggccggcgtttcgaggacgcgttccaggtgatcgtcaccgacgagggacgccgtgaaatcgacgaggcggtgcgagacatcgcccagaacccgtatctcgagggcgagcccggcatcctgctcgcccaggtacgcgccgaactcaaacgcatctacgagggcatcgaggacgtgcgccggcagatccgcatatccgacgaggcggtgagccgtctggtgcgccagcagaccgacacgcattaccgcaccatgctcgacaagctccatagactgttcgtgcgggccagcgacgacgcgaagacgcaccccggctcggacgaacgcccataccgtacggacaccggcacggcgcaattccaggcattgccgtccaggcccgcgaaatcgatggcgcgcgcggccacggccggattggacgacgcgccttcgacgaacgtcaacgcgccggacctgaaggccatggtcgagatgtgcggcccgcggctgacgcacatgatcggactcatcaggcgcgatccggtcaaaacggcggacggcaggttcgtggatttcgcggcgagcttcaaccggctgccccgggaggaacggcgcgaaagcgagctgatcggcttcctaagcgccctacgcacgcaggacggaccggcaaccgtggcatggcattgcgtatccatcgacggaggcgagcgcgtgtggcgcaccaggccgatcctcaccaccgaggcggcgcttgacgagatcatcgaggagggatga

SEQ ID NO: 45373 - DNA, 840 bp, Bifidobacterium adolescentis
atgacggacaacaccgacggattcgacactggcatcggcatcgaagaggagacaggcccggaatccggcatgccgtccgaagggccggatatgacgagggacaggccgggattgttcgacggggatacgggagacatgcctcttgaggcgcgtatggccgcgatcgcgctgaaacgcgaacgctacatcgacggcagcctgtacgacagggcgtgccagtaccgtgaggccgtggaacggtcgttgaacaacgacatgctcagactggtcgacaacacgaaataccggatcatgtacgcgtcgccggtcacggacgcggagacgaacatccgctcgttgaagacgcgtgtgagcctcacccgcgaggaggccgccacgctcgcggccctgcgcatcaaggtgctggagtacgagaaccagaagacgaagccgggcgactggctcatcagcttcgacgacatccgcgcgctgctcgccacgggagcgggcttcctcacggccagcaacgacgaggagggcacggcgaagaagatcacgtccgtcatctcgcgcatgcgcacctacgggtatctcgcggaaacgggggacgagaacatgtacgtgctcacgccattggtgccgatggtgctcgaccagaagctcgccgaccggtggctcggctccgatgatacggacggcgatggtatgaaagacgcggatggcgatggttatgacgattcgtccatcggcgcggatggtggcgatacttccgattcgaccgggacggtttcgtccggcgtcgagcaggacgcgttcgatttcgattcggccgatgacgcttttgatggagggcaacactga

SEQ ID NO: 45374 - DNA, 3459 bp, Bifidobacterium adolescentis
atggaagacggcatgaaaatcgtttccgaccgttggatgctgcaaagccggcagatcgtcaactggggctcctacggcggctaccacgtgttccgcccgtccatggacgatgcgatgccggtgaccctgctcgccggcgcgagcgaatcgggcaaatccacgctcgtcgacgcgcagatctcgctgctctacccgtccggcaccccctacaataaggcgtcgaattcgggacgttcggaacgcaacgactacacgtacctgcgaggcatgatcggcatcagcgacggcgaaaacggtgagaccccgatcttcctgcgcggcagggacgcggacggcaccccgcagaacatctggggcgcgctcgtcgacacatacgcgaaccgcagcgacggcggactgttgtcctgcgcaaaattcctctacctgaccgcaggcgacgggccggacggactgcgccgccaatacgtcacctggaaccagaccatcgacccgcgcctcatggaccggcaccgcgacacgtcattcacgcgaggactgatggaacagacctacccaggatgcacgacgcacgtcaacgcgcaggcgtttcacgcctccatctggcaggacatgggcctaagcgccgaagcatgcaggctcctgcacaagatccaatccgccgacgcgccctccaaactcgacgacatcttcaaacagggcgtgctcgacgtgcccgaatccatccggctcgcccgcgaaaccgtcgacgactacaaccggttcagcgagaacttccacagcatggaagacaaaatggaacgcgtcgccatcctgcaggacatacaagcccgctacggcgaatacgccaaacaagccagcgaacgccgcgaatacacgcccatcgaccccgaccgcgagcaaggcgagacgacgctcgccgcatggacatggtcgcgcatggccagcgaagtacgcgccggactgccatcggcgcaacgcaaagccaaggaatcccaggacgccatcgaccggtctcagcagcgcatcgacgaactcgacacgcaaatcgaagctgtcaaagaacgcatgaacggcatcgacggcggcagcctgcagcaactcggcaaggacttcgaacgcgcacgccaggacgccgacgaggcgcgcagacaacggcacgccatcgccgaacggttcgaacgcgtcgaaggcagactccccgccgacgagcagacatggaacgccaaacgcgccgcgctcgccttgtcgctcgatacgtacgacaagcgtttggaagacgcgcgatccgaataccagcggatggtggtggaacgtcacgcccggcagggcgaacgcgacctgttgaggcaggattaccggcgcaagatcgaacacaggacgcgcatcagcgacgacatggaccatgcgcgcacgctcatcgcacgggcgacgggcttggacgagacggaactgccgtacgtggccgaactgatggacgtggacgaggggaacgagcaatggcgtctggcgatggacgtcacgtacgcgcccatcgcgcagaccattctcgtggacaagcggcatgagcaggggttcgccgcgaaggtcagcgcgatcgatccgacgcgtatgacgcggcgtgcctggcgtttcgtcgataccgacgcgcaatacgattcggcctgcaacgaggggtggatgtcgtcgaagctgcggtacaaggaggattcgccgttcgtcggatggttgaaggagcagaccgcgtcgcaacggttcgacgcgcgttgcgtggaggcgatcgacgacatggaccgggccgaacggcaggtgcaggtcgacgggcagatcaaatccggcgaccgtggattccatggcgtcaaaggcctgcgtcaggtcatcggcttcgtgaacgaacggtatctggccgaattggaacgccagcttgacggggcggaacgggcgttggaggacgccgaccgccgcggcaggcagatggccaacgccatgactctgctgcaggacgagcatgagctcgcattgaccgtcgcggatctgccatggggcaagatcgacgtggacgggctcgagacgaaggcggaacggatccgtctgcagatcgaacggatcgaaagcgatccggaactggcacaattgcaggacgagttgaaacagctgctacggcagaaggacgacgagggcaagaacaggtaccgtgccgaagcggaattggaaaacgtgcagcatgccgtccaggccgaacaggcatggctcgacatgcatggcgactccgatttcgacgatgccgcattgtccgacatggtgtcgaatctgctggccgacacgtatgagacctgtttcgacacgtcgcgtccgcaggaacggccgcagcgcatcgccggcggtttcgaccgtgaggggacggcgccgttcgacgtgcgcgtgctgcgcagaatcggcaacaccgtgcgtgcgagactccagcagatcgacgagcgtgccgtccaattgcgcgccgacacggaacgcgccatgggcgactatctgaagcaccattccacggagggcgacaccgtcatggcgagcgtggaggactatccgtatttccttgacgagctcaagaacctcaacatgctcgtcacccgcgccgcgaccgacgaggagtatgcgaacagcgtcgaaaagctgtatatgagcttccaacagctcaaccgcgcgttcaacaccgacgaggagaacgtcagggagcagctcgaccgcatcaacggcatgctcaaaggccaacagttcggcccccgcggcggcaggctctcgctccacgtggacttccacccgatcgaccggcagttcaaatcctcgttgggccgcatcatgtcgaagctcgacgattggacacgcaacgcgcgcagcaatcccatggagacgcgcaaggcgttcgcaggctgcgaaacgttcatcggcaggctccaggcggaactcggccagatccgcgacacgaacggcatcaaggaatacggtgcgcgcaacctcgatccgcgcgtgcgcagctcgttctacgcgatcgtgcaccataacgatctgcccgacgagcgcatcagctccaccggcggcaagtccggcggcgcgttgcaggaactcacctcgttcgtctacggcgcggccctgatctacctgctcggcggcgacctgaccggcaagcccacctacaccacgctgttcctggacgaagccctcatcaaagccgacggacgctacacgaaacgcgcgctgaccgtgctgccgcgcctcggcttccagatcatcgtatccgcgccggaaagcaaaaccgccgaaatcctcagcatcgcagacaaggcgtacgtggcatacaaggatcccgcaaccggcaactcgtacctgcaggagctcgaccgcgagccggcaacgcaagccgaaacacaagacgccaccgtcgagcagacgcaacccgcgacggaggcataa

SEQ ID NO: 45375 - DNA, 1236 bp, Bifidobacterium adolescentis
atggcagcggccagaaacaccacaggcgaaacggacatccgccggaaactcgacgaatacgtcgacgcccacctcaccaggcacatgtacgacaccgacgaatcctggccgctgcgcaaaaccatccgactgcccaaacaagccgaactagagcagcactacaaccaaatccgcacccaaaacgaaaccatctgcgactgggcgcggcaacaccactgcgaaaccagcgagaaaaccaaaatcgtctccagcggactcatccaacaaaaaagcccgctcatcgactccgtgaccatacccgacctcgacaccgccctccgcatcgccaccaaacaaacccgcgaacgctacctacgcgaacacgaccgcatgagcgcgctcgccaaagaattcggcctcgaaccagcgaacgccatgaacgtcgccaaaaccctcaaagaccacgacgacaccgacttccacctcgtcatccaagccgcccactacttcgcaaaccacgactgccacaccatgaccccacgcatggcgcccatcccaggattcagcgccaaatggctcggcacacccaactcccaacgccgcaaagcgatatgccagctcaccggacaagacaacctcaccttccaggaacgcccgaacgaactccgactacgcctcatggacgccgaacaccacgaccaacccgacctcatcgtcacccaaccatgggtccgcagccagccaaccgacatcgaacacgccatcatcatcgaaaacaaagacacctaccaggccatgcccaccgtcgaacacgccatctgcatcctcggcaacggatacgccgcaacatcacacatcacaacactcctgccatggctcaccaccatccccaacatcatctactggggcgacatggacgccaacggactcgacatcctctccaaactacgcgccaccggcatcccatgcacatccatactgatggacaccaccgcataccggacatacgaacaatacggcacccaattcgacgccaaaaacaaacccctcaccacacaaaccccacaacccacacccggactcaccaccgaagaacgcaaactctacgaaacactctgcacaggaacagacatccaatacctacgcatcgaacaggaacgcatccccatacgcgacgccacaaccatcctgcacgaccaacaccactggccaatcgacatacccggcaacgacataccaaacaacaacaccaaatag

SEQ ID NO: 45376 - DNA, 1575 bp, Bifidobacterium animalis subsp. lactis; identical to SEQ ID NO: 41902

SEQ ID NO: 45377 - DNA, 810 bp, Bifidobacterium animalis subsp. lactis; identical to SEQ ID NO: 41925

SEQ ID NO: 45378 - DNA, 3498 bp, Bifidobacterium animalis subsp. lactis; identical to SEQ ID NO: 41904

SEQ ID NO: 45379 - DNA, 1221 bp, Bifidobacterium animalis subsp. lactis; identical to SEQ ID NO: 41905

SEQ ID NO: 45380 - DNA, 1470 bp, Xanthomonas axonopodis pv. phaseoli; identical to SEQ ID NO: 45247

SEQ ID NO: 45381 - DNA, 702 bp, Xanthomonas axonopodis pv. phaseoli; identical to SEQ ID NO: 45248

SEQ ID NO: 45382 - DNA, 4023 bp, Xanthomonas axonopodis pv. phaseoli; identical to SEQ ID NO: 45249

SEQ ID NO: 45383 - DNA, 1470 bp, Corynebacterium humireducens NBRC 106098 = DSM 45392
atgagtctggtttcccatgcgctcggcttcgcgcgcttccgcaggacgtcccctgtgatgtcgctgctgcgcagcgatcatctgccggtggtgctggccgtggtggcacgctacttcccgcagggggcggtggcccggccggtgcaggagatctacgcgcttctcgacgaagacctgcgcaatctcaatgccgagggcttctctctgccgcgtggcccgcaggattacgtgggcgactgggtgcgtagtgagtggttcatccgccggccgggaaccagccgcaccggtgagacgattgagcccagcgaggagtcgctggcggtgctcgatgcactgcagcgctgggatcgaccgcaccgtaccgtgtcggcctcccggatggaggcgctctcgcaggccctgcagaccctcgcccgggaatcggatccggacgcaggccagcgtctcgccgagctggagcgcgaacgtgaggagattgacagactcatcgactccacccaccggggtgagttcgaggtgctcacgtcagcgcagattcaggagcgagtgggggacattctggatctggctgcatcgataccggcggatttcgcgcgcgtgcgccaggagatcggtgatctcaaccggcagctgcgtcgtcagcttcttgacccggaggatccgcgcggtgacgtcctggaggagatcttccggggggtggatctcatcggcgaatcggatgccggtcgcagcttcaacagtttctttgatgtcctgctggatcgggaacgttccacgctgatcgaccggtggatcagcgaggttctcgggagggacgccaccggggagatcccggaggaactgcaggtccgtctgcaccgggttttccgggacatggaggagtccagttacgaggtcagtgatgagatgacttcgctggcgcgcagcctgcggcactacgtcaccaccgatgagttcgccgagaatcggcgcatggtccagttgctgcgggaaacccggcacgccgccgcgcaggcggcccaggcgggggcggtgcatccggtcaaccagatggagaccccgttggtgcggatcggcatgcaggtgcgttcggtggcagcactgcggctgcggaacccgggcgaggagcaggtcgggcagcagccggagaaggtcgctgaggtcgagctgaacacagacaccctgctcgcagagatccgggccagtgagattgacttcgaggagctggaggaagcggtggccagagctctcgcacttcacgtgaccgccaccatcgctgaggtcatgcatcaacatcctccgacgcagggcttggcgagcgtggttggtctcctgcacctggccatgcaacgaggatctcccactggtgccccgcaggttgtggagtgggaggatgaaggaacgagacgaagggcgaggatcagcggttggcagttcacacgtccggacaccacagaggagcagcgatga

SEQ ID NO: 45384 - DNA, 630 bp, Corynebacterium humireducens NBRC 106098 = DSM 45392
atgacggaaccgatgtggccaggcgattccgggaccttgtcctatcactcgcgccgggctctggtgcagctgctcaaggggccgatgatccgggcggagatgcatccgcaggtgtggaaggcgatcgtcaccgatcggggggcactgcagactgctctgcacaatgtcttccttgacctcgtcctcgacgaggaagccgggatcgccttctcccgggccgcagccggcgggcaggacgtggaggtcgagggacgccaggaaccggtgccgaaagtgctgcgcaccgagtcactgagccacatggacaccctcatcatcctgcacctgcggcaggaactggcgttggcggcgcctggagagcgtgtcatcatcgaccgtggtgaactccgggaccagatcctcctctaccgggtcgatgcagaatccgatgaggcgaagctcgcccgacgttatgaggcggcgttcaagcggatgatcgactattcgttgatgtacaagaccgagaccgaggggcggtatgaggtgtctcctgccctgagacagatcttcgatgcagccaccgtcgagggggtccgtgtcgagtacgagcgattccgcaccgacaccaccattccggaggaccaggcatga

SEQ ID NO: 45385 - DNA, 3318 bp, Corynebacterium humireducens NBRC 106098 = DSM 45392
atgagcatccatcccggccagtaccgcctttcgcggatccagctgatcaactggggcaccttcgagggaagcctggacatcccggtatcgcgggagggtttcctcatcaccggtggatctgggtccggaaagtccacgcttatcgacgccatcactgcggtcctcctccccggtgaccgcgtgcgcttcaacgccgccgcgcaggcgaacaccccgcgaggcaagggacgtaacctcgtctcctatgtccggggtgcatggcgttcccgcgaggaccacgcctccggccaggtggtggccacgtatctgcgacctcgggcaacctactctgtcgtcggtctcacctacgacaacgccgagggggaggtgtacaccctcgtggcgatgttctatctgaaatctggtcataattcaccgactgatgtggaacgtttctacggcctgttctctggtgagttcactgtctatggactggtggactatctgggtagtggcatcgacaagaggcgcatcaaggcggtccacaagaaggcgatcttctccgacaggcactccgtgttcgcggcgaaattccgttcccgcctggggatcgccagcgaggaggcccagttccttctgcaccgcgctcagtcggcgaaggacctccagagtctcgacgacctcttccgggactacatgctcgtcgaaccggacaccttcgccaaggccgaccgtgcccttgaacagttcggggacctcgagggagcctatgaacgggtcgaggacatccgcgctcaggtggaggcgctggaacccctggtggggctgcagaagagaaaggaggaggcgtcgacaagcaaggagcatgcacaccacctcaagcaggccctgccgacggtgaccaaccggatcaagcgtgaggagcaggaagcgctggtgcggcgtttcatcatcgaacatgacgaggccctgtcccggttgcagagtgcacgccaggccttgacgcacgccgcggagatgcagcggatcgcgcaggacgcggtggaccggacactcggtgcacgacatggtgagctcagtgcgcgtcggtccgcggcggtggagcaggcgcagcggacacgtgcggagcgaacgcgggtggtggaggcggtggccggtatcggcggcgtggaaccggaggatgccgaaggctatcagcagctgagcaatgacgcacgggtgatagttgacgagttcacggagcgtcgggaaaagctcgatgccagcagtgaggaggccgtcagcgcccggacccgcgccgaggatgagctcaaggcggcggagaaggagctgaatgcactcagtcgtggtaccagcaacatcgaggcccggcttctcgacgtccgcgacaagctgtgccgagatctcggtctcaacaaccgtgatctccccttcgcgggtgaactcatcgatccggtcgacgcggactgggaaccggtgatccaacggcggctgagcactctggcggccactcttctggtgtcggagacggtgtttccccgggtgcgggagtgggtcgatgcgcaccacctcggtgcccgactggtgatcaacgccgtgcacacgaaggagacctactcgtccccgcgtctggcccacaatgctctgccccgcaaggtgaccgtcatcgaatccccgttccgtgactggctgcacgcagaactgggtaagaggcacaacttcctgtgtgtggcagatgccggggcactcggggagctccgccccagcgacaacggagtcactctgcagggtctggtcagattcgcgctgcggtccggtgaccccaccgagaggctggagaaggatgaccggcgtcgcctcggtgaccgaagcacctatcgtctcgggtccacgaaccacgcgaagattgagctgctccggcaacaggttgccacgttgcgtcggacagtggaggctgcgagaaatcgtctccgcgaggcacgcgtgcgtatcgagggactccagcgggagtaccaggcagcgcagctcattctgcggaccacgtgggcggatgtggatgtcgccgcagcagacaccgtcgtggcggatctggatcgtgcccttgaggagctgaccagaactcctgtggccgctgaactacagctccgtctggaggcagcgaccctcgatctccggcgggcggatcaggccgccgaggaggccgtgcgccatcaggctgtccttgcggacaagaagggcaccgcagagaaggagctggcccgtctaaagtcacagccggtcgccgacgtggacgaggacatcgcgcgcgagctagaggagcggctcactggtgccactcgccgcctgcacgcaggcaacgtcgatgaacgcacgcaggcactgcgcgaggaactcgaccaccggctcgaggcgttggaggtaacgttgcgcaacaccgacacacagatcggaaatcacctcacccgctacatccagacctggccggccgagcaggcggacatcctgccccaaccggagtacatcggggaggccctcaaccggctgaccctcctgcgcgatgaccgactcgcggagttcacccagcggttcctctctctcatgaacgacatgtccacccgcaacctgggtgccattgcgcgtaccctgcgcaacgcgcgccgggagatcgaggaacgcatcgaaccgatcaaccgttccctggcccgctcggagttcaacaccgatcgctacctgcacatcgaggtccgggacagacgtggggaggtcgtcgtacagttccagcgtgacctcgatgaggccaccagcggaggactgggcagcagcgacgagaagcaggcgttcgctcgctaccagtcgatagcgaagatcatgcggaagctcggttcccaggattccgccgatcgacgctggcggagcctggtgctggacactcgccgacacgtcagcttcatcgggctggagcgcgacagcgccggcgagacgatcaacacctacgtcgactccacctccttgtccggtgggcaggcgcagaagctggtgttcttctgcctggctgcggcgctgcgctaccagctggccgaaccgggggcgcagtacccggcgtatgcctccgtcatcctcgacgaggccttcgaccgcgccgaccccgccttcaccaggcagaccatggacgtgttcgccagcttcggtttccacatgatcctggccacgccactcaagctcatccagaccctgagtccctacgtcggtggcaccgtggtggtcagctactccgaggcgcccgattcccgcggggaggtccggggtgtgtccggactgtcccggatcgaggtgggctga

SEQ ID NO: 45386 - DNA, 1134 bp, Corynebacterium humireducens NBRC 106098 = DSM 45392
atggtggtcatgcgtgccgacgcccgggtgaaactgcagagctacatccgccgtcaccgacggaaactgcttctcgacgccttccccggccacggcttccccctccaccctccgactgcccgcgccgcggctgcggacgagaagggggcccgccgattcgtccgggactgggagggcgtaccgggcgtcgtgtgggagaagcgcgactggacggcggcgggtgccggccggcacccggtgcctgtccgcttcgaggtggacagccttgatgcgctggtgcaggaggcggagctgggggcggaatgggccgcgtgggtgcagcgccgagacctgctggtggacgcagggtgcgacagggaggccgtcgtcacggccatcgccctgtgggcggatcaggggatgccgaccctggagacagcactgcgtgtggtgacctggtttcgggaacgcccgggtgtgacggtgctgccccgtgccgtggccgtggaaggggtggataccaagtggctggaacgtcaccgcccgctggtggagaccctgttggccgctactcggggagtgtccggccgcgaggacctcgggctgctggccccacccgaccgcgtgcggatgcgatctcaccccggtgagggccccggtgggttgagtgatgtggaggttcccgtggaggagctggctgccgtctcaccggcacgcggcatcctcatggtggagaatctcagcagctttctcgccctgccgacatggccgggggttgttcacgtgtggggtgtgggttaccgggcggcgtcattggctgcggaaccctggttccgggctgcacccctcctgtactggggcgatctggatgccgacggcttctccattctctcgaatgtacgcggcatccacggggatgtgacatcggtgctcatggatgtggacaccgtgcgcaggtggtcccgtctcggagttccggaccgggaattccaggtgcgctcctatccgggactgaccgaggcggagggagcggccgtcgaggcgctcattatggccgggcatctgcgcatcgagcaggagcgcatccgtttcgacgttgcggtggcggcgatcgaggaggctgtgttgatacgcctgggccggagtggtgcctga

SEQ ID NO: 45387 - DNA, 1488 bp, Corynebacterium glutamicum
atgaccgttgtatcgcacgcgcttgggtttaagcgatttaggcaggaatccctagagctgtctttgttgcgcagtgacaactttccggtggtgtttgccgtggtggcgcagtattttccgcagggggctatcgctaagccagcctcagagctgtatcagctgctcagcgatgattttcgagtgctgcgggaagaaggatttgagctgccgaaaagcccgtcggattatgtcagcgattgggtgaagtcccggtggtttgtgcgtcgtcctggtagttcgcagactggtgaaaccgtagagccgagtgaagagctgttggcagtgctggattcggtacagcggtgggataacccgcatcgaagcatttcggcgtctcgaattgaatcgttgacgcaagcgcttcagactttggcgttggaatcagatcccagcacggcgaaacgtttggctgagttagagcgtgaacgcgacaggatcgaacgccagattgaagcggttcacgctggtgaatttgaggtcctcaccactgtgcagataggtgatcgggtagcggatatcttggatctggcggcttctattcccgcagattttgccagggttcggcatgagctgagcgatttgaatcggaagctgcgcaggcagttgcttgatcctgaagactcccgtggtgatgttctagaagagatcttcaggggagttgatctgattggggattccgatgcggggcgcagcttcaatagtttctttgatgttttgttggatcgcgagcgttcaagtctgattgatcgatggatcagagaagttctaggacgcgatgaggctattgatctggatgcaaaattacggacagggctgtaccgaattttccgggatatggaggatgccagcttcgaggtcaacggggaaatgacaggactggctcgaagtttgcgtcactatgtcactaccgaggagttcgcagagagccgacgcatgattcagttgcttcgcgatacccgcagtgccgcagctaaggctgccgaggctggtgaagtgacctcgctcaatcatatggacactccactcgtgcgcatcggtatggatgtgcgctccattgctggattgaagttgaaaaatccaggtgaagaacgcgtcgaggatctgccggagccagttgaagagcaagaactagacacggaagtcttgctggaacagattcgagcaagcgagattgactttgaagaattggaagaagcagttggtttagttcttgctgagcaatcgcatgccacgatcaccgaggtactggaacatttcccagcaactcaaggcctcgccagcattgttggcttgttgtacctagcgatgcgtgatggtgtttccacaggtcacgcgcaagtagtggagtgggaaagtgaatctgtcctgcatcggcgacggattacgggatggcaatttatcaggggtttaaacagtgaagatttggcagaaagcgagatgaataaatga

SEQ ID NO: 45388 - DNA, 639 bp, Corynebacterium glutamicum; identical to SEQ ID NO: 42725

SEQ ID NO: 45389 - DNA, 1107 bp, Corynebacterium glutamicum
atgccattgcttatcgacgacgccctccaccgcagcaaaaaatacttccacgcgcacttaagcgagctgctcctcggcgaatttgcaggcctcagcctgcccctgcacccaccgacggcagctaaagccgccgccgatattgatgccacgagggaatttatccgccaatgggagggacgcgatgacgtggaatatgccgtgcgaaactggtctcctgtgggcttaggtaaaactgaagtacccgttaggctgacgttgaacacgattgaggaattagttgtgtttgcgcaggtagaggatgaatggtcttcacttcacgagaggttttcacagctgtctggttttacagcggaggtggtggcgaaacatgtgtcgctgtggcgttcgctgtctaacgaggatctctccaaggcggtgttagttgtggaatggtttttggagaaccccaactctggcctgctgaaacgcgcagtcgcggttgaaggcgtgcacactaaatggcttgaaaaccaccgcgtactcattgaaacgttagtggccgacaaacgtggtgaacctggtcgtgccgatcttggacttggtgacgccgaagctcgcgtccggctccgcttccattccgtagatgctcccgctgggctcacagacattgaagtaccgctttccaacctgtgcgaattacaagaaccgcaagtaattctgatggtggaaaacctcgattcatttctcgctttactcacttggccgggcgtaacaattgcttggggtgcgggctaccgtgcagtagacattgttcgaggactctacttttctaatggtcggttgctgtactggggtgaccttgacctgaacggtttcaaaattctcgacggcgtccgcagccacgttccccacaccgaatccgtgctgatgaaccctgaaaccgtctcccggtggcgataccttggcgttgccgaccgagaattcaaggcagaaagctttgacaaccttcacgattttgaatctgacgcacttgacctactcattacagacggtgagctccgcattgaacaagaacgcatccgcctcgatgttgctgttgaagaaatcgagaaagtaattcgtgggtga

SEQ ID NO: 45390 - DNA, 1410 bp, Geoalkalibacter ferrihydriticus DSM 17813
atgcttttcggcaagctcccagacgatatctttcggcccctagccggtcctaatcgccacctcttcgagaaggtgctcaagcgtctccacacgctcttctttgatgacgacaacccggactccgacgcgccgcggcgcgagatcgttcagcacgagatctatcaagtgttggcaatcgaggaaactctcgccctgaaagacgaggaggccgaggcggtctacgacacgattccgctggccgccgattacatttatcgccgcctcgttaacaccggatggctggagcccgaggaggacggataccacaccaacgttgttcccaacccgaacgccaggctcttattggaggctttgctcggaattgaggcgcacgaaaaaaagaactacggccgaacagtcatctcgatccttgcccacattgaatcagcgatcaacaacccgaaggaacggggcatcgtttttctggatgccgtttcacaaactcgggagttctccaaccatctcaggggcattttgtacagcctgaaagaggtgcaggatcttctggctaagatcaatgaccccaagaaggtgctggcctccttcttcgaagagttcgttgagaatatccttatcgcagactacaaaacactcaattcagccgataatccattccgttttcgtggacggattatcagcttgctccagcaggccgagcatatcgacagcatttttcatccccttgtggaggcgtatgcctctcacttcagtattggcgaagatgatgccgctgcgcgtcttcggagggatatggactacatttccagggttttccggtcagtagacagacgcctggaaaaaatcgattccttctgttcccgacttcaaaacaggatggaggagaccgttcgctttatcgatcgaactatgcctggcatatccaatcggcttgtcgatcttctcagcagtctcggtccagttctacaggatgatggtgatctcccggacatcccaggcccccttcttagcaatcagaccaaggtcctaagccccttcagcctatacagtccccgcggtcgcaaagaaaaaccggcggcgcaggttctcaggcccaaatcagtgaatccagaggtgaagctgcgcaaggaactcatccgccggtttatgaaaaaaagagctttcgaaccacaccgggtcgtgatgtatctcgaccgacagatgggcgcgcggacggtgatgagcgcctccgaattcgaaatcctaacagtagacgacctgatttcttttttgctcatccgacatctacccaaaatgtatggccgtggtcagttcaaggccaaagcatacagtgtcagacgaaagaaggatttagttcagacggactggatctcttgtcccaacttcatcgtcgaaaggcgtaaaaatgcttaa

SEQ ID NO: 45391 - DNA, 3486 bp, Geoalkalibacter ferrihydriticus DSM 17813
atgaagcatctcgttaagatcattttcgtccagtggtatctgtttgatatccaagaaattccgatcgtcggcactaccgccgttctcggtggcaatggagcaggaaaatcctccattctggacggggtacaggtcgtcctggccggtggcgacaaaaacaagatttatctaaacaaggggagcaacgaacgctcagcacgaacaattcgcgaatactgcctcggaattgtcagtgatcccaatgcgccggtgaaactcccgtcccgcgacagggcgaatacctatatcgtcctgtgcttctatgacgatcagaaggacgaacatatctgcgctggggttgctatatgggcaacggcggcggagccaagagaggacatcctcgggtatttcattacaaaaggtgcccccctttcagtcgatgatttcaacgaagatacatctgaaggggcagcatcccttccctgggcacgcgtcaaagaccgcctgactcgtcggttcaggttgggcgaatcacttgagcttcccaacaagggcccaggggatttcacccgcaagttctacacgcacatgagcgctgagccggccatgccgatgagcgctcccactgtggtcaagtctcttttgtcagccatctccttcaaaccaatcaatgatccgacgaaattcgtccgggagaacatgctcgacagcgatcacatcaatatccgtgatctcagtgaatcgctgaaattttggcgcggcctgcgcgataaggccgtgaaaaccagtgagctaatttcggagctctctgatctcgatcgaatctgtcgcaacgttgagggtttggatggagagattctccatcacgagcacgcatcgtacgctgcacgcattgaaatgtgctatgagctggccagccccgttcagatggaactggacgagattaacgacgatctcgtgcgccttgacaaagaagctaaggagttggaggaggaaaaagagacggttcagaaaaaactttgggaaaaacaacgtgacctggaaaaggaggatgtcactcagcggattcagaaactggaggatgagaggaatattaaggagaaaaacctacgtcagacaaggagttctatcgactccaggcgtatggattgtctaagcctcaaaaccctgagcgatggcgcatccaacattcctgaggagctttccagtgctgccaaagagttgctcgccgaggccgatatcgacgatttgctcgggcaggcatggccgcagtcaccgactcatttcgacatgttggttgaaaagtttacaaaagcctccaccaacgctttgccttcgatttccgctcagtccgcaaatctctggcagcaaattgtgccgttgcaagagaataagagggaactagaggcgcaagctgccatgctcgccagaaagcaggctcctataggaaaggcgacccgcggcttgatggaactactcgccaagaatcaaatcgaggcgactcccctgtgcgatttgatagatgtcagcgatgagcggtggcgagacaccatcgaagctgtcctcggtaatgctagggaggcgctcatcgttccgccggaaaagaacaaggctcgcgatgctatccgaatctaccgctatgaagggaaggggttccgtggttcgctcgtcgtcaataccacgaaaactgcagagtgggagaacctgtcgaaaaaagactctttggccgagaaggtaactacggatgatcctcacgcccgcgcctttatcaatttgcgcctcggtaacatcatctgtgtcgagaaagaatcagatctgctacagcaccgtcgagcggccacgaccgatcttatgctcgcctcgggtggcaccgtcacaatgatgtcggaggtgccgtattccattttgggaagacagaaccgagaggcgctgcgcgttcgcctctcgaaattgatcgaaaccaaagcagtggagattgaaaagctcaccgcgcatcaaaatcgcgtcgaagacgccgtccagatcattaagggcttcgtcgccaagttcaccaatgccgaatgtgttaccgatcttgcttccgaacgaagatccttggaggatcggatagaggagttaattagcgaaatcgaactgctgaatcagaaggagaacacgaaacttaagcagctcattaccgatttgaagggcactcttgatgatgtggtgaaaaggttgatggaggcccgaagtgaagcggaatctaaaagagaattccgtgtccacctgagcaacttcattgctgagcgagagagagaggccgaagccttcgaggcctccctgggggaaatacgcgaagattcccgtctcgatccggcgctcgcctcggaaaccttgtacagactgcgcgtccgcttcgccgagagcgaaaatgtttatgaagctgtgatcaatcacattcatgggcacctcgaaagccggcggaaaactcgcgccacctccaaggaaaaggtcatggtgggtcttacgaattttctcagcaaaaactttgcacagacatttttgctgggtgatggcgcacttgacttcgagacttttgaacagcgggcgaagttcattgctgaagagaaaacgcgcctggaggagacaactctcgcagaatacgagacaagggcggagaacgctctgaaggaagtagaggtcaccttccgtaccaaattcatcagtcgtctcgtcgaacgcctcggggcagtgcgcgacaatattgccgggctgaacaaaattctcaaaaaccgccccttccacggggaaatctaccagtttcgctgtgtcgccaatcctgaattggacaaagtcattaaattcgcaaaggcgattgaagaagaccgctccagccaatacatgggcggtcttttcgacccggccaacgatcccgattcgccgcaccgtgaagcgatcgagttcatcaactgggcttttcaggacgatgacgccgccaaactcgtctccgactaccgtaactactatgtcttcgatgtggagatgttcgaccgtgatgggaataaagtagcaaacctcaagcaccgcatagccaaaggttccggaggagagaacatggcgccgttctatgtggccatcgggtcctctctttccgcctcatatcgaatcaccaaaagactcaatggcacagtggcgggagggatgaatctagctccctttgatgaggcattttcaaaacttgatgctgccaactgttttaactgtctggaatttcttaaggataccggtctacaagtgctgttggcagcgcccgacgaaaagtacccgacactggccgcacaggtcgacacggtcgtctgggtttatcgcgacggcgttgacgtcgagattgagacggaattcttgtcaacgaaagcgcatgacctactacgctccgataatccctttttcataaaaaaagaagatgatggaaccgagaaggaatcggattctatatccatcgagcgttccgttgtcgggggcacctga

SEQ ID NO: 45392 - DNA, 1191 bp, Geoalkalibacter ferrihydriticus DSM 17813
atgaaccctggtcatgatctccttcggaagcttttccaaatctggcagcgaaatccggatggaaaacagagaaagacccttacgatcacaaaggagcgggctccagcatattttcagacaatcgatcccgatgccaaagatcagttacatgcttgcttgaaaaacgccgccgccgagggatgcatcgagctggtttggggaaagcattttgaaagccatcttctgcgcaaaatcatcctcctggacggagaaacgctaggacgatttttgggagtgccgctcgcccgcgagattgccgccgaagcacaggcgaagttgatgttccatgtcccccctgaagagtcttggctctcggatcttgttgcccgggtagcagaaaaatggtcccgtggagaggcagcttaccggatttcccctggagaggtcggggaagttaagctcctgatcgacgccttgggcgcggttaaagaaggcaaacagaaaggcctcgatttacgcaccttcagcgccagggtactgggtgactcgaaggcgatggagagaatgtacgaccgcttcgcccgcatctggaatgaacagttcgatactggcttggagccaaaggagcttttcgaaagtctgggcctagtcaaattcccacaacccctgtttttcaaagggccagtgaggataaaaagtgggggagattggctgaacatggagcccctaaaatggggattcggaattcctcccgatgcgattgaagatatcgcgtttgcgctaatgccctcctatattctgacgatcgagaatctcgcctcctttaaccggcatgtacgtgaggtggatgatgaaggtctaatcgtcttttccgccggctttctcaatccgcatacagcagaggtaattcagacccttgaacgcaaactggactctcatactcccttttttcactggggggatatcgacgtcggaggtctccgcatcgccaatcatctgcaggcgcaaatccgaagggaccttcgactccatctgatgagtcccgaaatcctttcacggcacggagaaatggtcactggcagcctgccgcggttcagggcaaaatccataagcccgcagattcaggatttgatggacgccttggtgagtcatgacccagctattattttggagcaggaaagtatcgacccgcagcctccacagattccctga

SEQ ID NO: 45393 - DNA, 1536 bp, Mesorhizobium plurifarium
gtgtcggatgcttcgcgtccgcaaattttcggtcaactcggcccggacatctttacggtgttctctggtggcaaccggctgctctatgagcgtgcgatcctcgccgtctacgaggacctttaccggtccgaccttctattcccgacggaggcggaggtagtcggcgtgatctacgactgcatcacgcgggagcccggtctttgggccgaggacgaagccgccgtcgatctcgaccgcctcgtcacgcggaccggccgacgagtcaggcgtcgacgcgtcgcaggtgtggacgatctggccaccgggaccgtgatcagccggtcccgccacatctacaaccgaatgctgcagacgggctggctggacgaggcgagctatggcctcaagacaaccgtggagatgccctccggcgcgatgcgtctcgccgaattcctgtgctccctgaaggagggcggggccgagcaactcggcggcttggtggtggaggtgaggaacgcgatccgtgcggtgcgcgagaagccggccgagaacgctcttggcctcaacaaggccgcccaagactcggcgcgtttcggacggtacctgagaagcgtgcttgcggcgctgcgggaagttgatcggcaggtgctctcctcggatacgcttgccgatcggctgcgacactacttcgaggacttcgtcgagcgggtgctcctgcgcgactacacgtccatctcgaccacggcgcatccctatcggcatcggcagaccattctcgtctcgctcgacgagttggaggattccgagattgatctggccgccgtggccgacgcgtaccttgaagcccggctcgttcccgatgagaaagcggcgcgtgacctcgtgcaggaggacctgttccggatccgccgcgtgtttgagcggatcgacggatctttcgaggcgatccagcagcacaggtccaggctcgagacgcggctgcgtaatgtggtcaggtatgctgggcgtcgaaccaatttcctccagcgcagtgagcatgtgatccagggtctcgacgacgctctttcgcagggcgtggacgatattgcgatacaaggattgattgagccccggactaccgtggtcgcacccgaactcctcgcgaagccgcgcggcgcgcggccgcagatcgccgacgccgacctgacccttccggcgcccgatccgatacgcgaattcaggcgtcagctcgagcgggagtacttggaccgcctgaccatttcgccggcaaaggttagccgtttcctcgaaaggcgggtaccgccctttggcgagaccacggcggccttcatgaggatcgagaccgtcgacgacttcttggccttcgaagccatccgaatgatggtcgccggcggcctcggcggcgacgctgactcgcggctcgcgaaggcgctcgagggccggttcgaactcgtagcgtccgacgagccggtgtcaaacgagtggctggactgcggcggctttcatgtgaagcgcctcgacgatagcattacccttgaggttaggcatgctgcttga

SEQ ID NO: 45394 - DNA, 651 bp, Mesorhizobium plurifarium
atgctgcttgagttcaacgccctcgaaaactcgaacccccgcggcttcctgagggtcacgcagctcatctcgcatctgatgcggcaccagttcgtccacgtggaggaccgcgggggcgcgacgctgctcgaaatgctgcaccgtccggagctcgcgaagcttgtcgaggcttactttgacgtcgccggctaccgtctcgtccaccgggagaccgaaggctgggcggggatcctgcccgatccggagcgcacatcgctgccgcggctgcgtatcgatgagacgatcgcgctactcgtcatgcggcggctctgggaagaggcgctccaactcggcgaaatctacatcaacggaactgtccgcacgacgctcaatgaggggtatgcggcctatcagggcatagtcgccggcagccggcgagcggcgctggcgccaagcgagtttcgcgacgtgctccgtatgctcgaacgcaaggcgatcgttcgccttggtgagttcgacgcagacgcgcaggacatggacctcgacattcgagcgctcatcacgagcatcgccggcgacgacttcgtcgcgtcgctcgagcagatcctgtcgcgtccggccgccccgacgcccaacgcggacgatcagaccgtggtgggagacgaggcatga

SEQ ID NO: 45395 - DNA, 3435 bp, Mesorhizobium plurifarium
atgatggaactgcggcgcatcgtcctcgtgaactggcacatgatggtgcgggccgatctcgatctggccggcgatgtggccatcctaggccagaaccgatccggcaagtctacgatcatcgatctgatacaggcgatcttggcaggcggttcatcccgtctctaccggttcaaccggtcggcgggcgagagcaacggccgttcggaccgcacgctcgggggctactgcctcggccaactcaacgaggacacattcctcaggaaccaggcgaggagccacatcgcgcttgtcttcgagcatccggaaaggcggcggatgcctgtgagcctggggctgtccattgaggctgcccgcggacaacagacagaggtagtgggacactttgtcgccgagggaatcagcgtcgactcatcgatgctgctcgatatcggcgaagacgcgccgcggccgaccatgtggcccgtcgtccgccgacggctcgatcaggcctgcggcgaagggggcggtcagctcctcacgccggacgacgccaaaacattcatccgcgagtacatgcgcgcgctcttcacagggcgccgcgcgtcggacccggagcggtttgttcgcactttcgtggccgcgctctccttcacggacatctcgtctgtcgagcagttcgtgcaccgttacctgctcgagcccaagccgatcgacatcgccgagcttcgcgattctatccgccgctaccgggagatccagaagaccattgccgacctcaaccgacgactgcaggcacttcgcgcaatccgcgcccaaatagaggagttcgaccgacttcttgccgaggaactcacctgccgagcgatcgagaagaccgccatgcttgtcgaaggattcgccaagctgttggcgaatatcaatgaacataggtcgaagtctcacgagctgcatgtagtgatggaggagttcgcgcgggtggaggaggagattgagcgtgagaccgaggggctcgcgtccgtccagcgacagctcgcggcgaccggcgcgcagggacagcgcgtcatccttgagcaggagattagggggctggagcgggaccatgccggcgtcatggagcgcctgctggcccgacacctccgcgctgcgcgcgcgatccagctcctgaagttgcgcgacaagctaagcgtcataaacctgggcgaacttttcctcgcgctcgagcgcgtcgaggaggccagccgcgggctcgcaccgcccgattggccacgcgatccggcgaagatggacgagctgctggacgcggtctccgaagctgcgattgcccgggcggaaaaggtggccgaccgacgagacgacgccatcgtttgggtcaagcaacttgaggccgagactgccgaggacagcaaacaacttgccaacgccaaacggggacaggtctcccttaatcccacaacctcgaaacttatggaggctctgcggcgcgaaggaatgacaccgcgcacactctgcgaagtcgccgacgtagtcgacgaacgatggcgcaatgcgctcgaggcgctgctcacccgcgaccgcgaggccgtgattgtcgatccggagcacgcctaccgtgcgaccgagatcctgcggcatggtcgcgacgcctatccgggatgccgcgtagtcaacacccgcaaacttcagtcgaggtccacggtgcccgaaggcggcacgctagcttcgatgatccgcagcgacgataaactggccatggcgttcgtagtctttaggataggcaatgtccggcttgccgagaaccaagatgagcttctgtccggcgggcgcgccgtaatggccgacggtgcatattacgacggcctgattaccgagatgcgccggccggacggcctcaagattggccgggctgcggcaccgctgatggaggccacgctgcgggagcggatcgaacagcgctcgcagcttctgaggattcatcttgagaagaagcactttttcgaggatgcgatccggcggcttgaggattgcagcaaaccggtagacgaaaaggacaagctggaagcgctggcactcgcgctgggggatctggccgaccggcgggcggacgcgcggcggcgactcgatcggatatcggcccaggtcgatcctgaactactcgattcggagaagcggtcgcaggccttattgaagagcctcaacttaaatcgcgatgaaatgatcggtagtcgcgagtcgctcaaaacaaagattgaggaggtcaaggcgaggctgggcgcgggcgaacagagcgtcggctcttatctgtgcctcgctcatcgccgtcgacagttccgtagtgtcgtgacctccgcggcacaaatgcgatcgctccgcgagcgatatagagggcatccggctaaaagcccggccaggatcgcttcggatatggagaaagctgcggacgatgcgaagcagagacatcgggaactcggtcacgagatcagggcggctcttgggaagtatgccattgacttccccgacgcactcgagggctatgcggatgtgccgatcatcggcacggtgaaaccatgggtgtcggacggcattgcgatgctggaagacaacgaactcatccggtaccgcgagcaggcagacgaggcggcggatcgggtttcgcgtctttttaaaacgaccttcattcatgagctgaacagccgcttcgggcagcttcattcagagatggagaagctgtcggcggcgctccgtacacgcccccttcacggtgagatctatcgtctgacggagcttgtcaaaccggagttcgacgacctctatcatctcgccaaggacagtgagaccgacgagcgcgttctggatgctctgttcggtcgggccgagcctcgcgacgagcggcacgcgcgggcacttaatcagatagaacagcttctcgctgacgagaccttcgattttaccgtctttcaagactaccgcagctatttcacctatgacctcaggatgcgcgacgtcaccaccggacggacgacgagtttcgatcgccgacgcggcgtggccagtggtgccgaacgccaggtgccgttctacgtcgtgatcggagcagccctcgccagcgcttaccacggcgtccgccaggcgaccgcgccgagcgatctcgggataggacttgccgtgttcgacgaggcctttagcaagatggatggccccaaccagcggacgctgctcgacttctaccgcgcgatcggccttcaggtcgtcatagccgcgccgaccgagaaacgcgcggtcgtctacgagaacctcgactatataatcgacgtattccgcagcggcgacgtgtccctcgccgaatccatccgaatcaaggatcgcgtccgcgaggagatgcgcgctgccaatccgcagcacgcgacggacgacgaactcgcggaacgcctcggtctaaaggcaagtgctgccgaatga

SEQ ID NO: 45396 - DNA, 1248 bp, Mesorhizobium plurifarium
atgagccggcgtgggttttcgactatcatttcactcatcgacaatctgctcgcgcgacatgaacgcaatcccgccgcgcgaaacctgatcgccgcgatcgacaatgacggcttcgccaatatggacttgcgagacaccttcgatgaggaactcgcagtgctggagcgagcgggcggactcgagctgatccaaaccggccccaggacagagcgtcgggtaaccggtgtaaggctgaaagatgccagggtgctctaccgaaaggtggaacggcgaccggctggcgaactggcgtaccaagctgtctcagaactgcgggcgcagccggggctgcccgccggcgccaccagcttgatcgacgacgtcgtcgcagcctggtcgcggggcgtgtcccacatcggaatccggaagggggacgggcgaacgcttgcagacgtgataggcctcgccatcgcagtacgcggtcgcatgtcgggcgatccgcaggaggatcaggacttccggacgttctcgcggctgacggtcggcgacagtaaggtgctggagaagaatgtccggcaggtcgcagtagcgatgacgaagatcttcgcgggcatggacgagcagattcgcctcaatccggaggagctgcttgctagcgccggtgtcagacgcctgccgcaaccaatcctgctgcatggtgacgtatcgctcggcggacggtcctttccggcgatgccttatgtcggaatacccactgactgcgccggcgggataggtctcctgacgaagcccgactacgtcctgacgatcgagaacttcacttcattcgttcggcacgtccgagaggtcgcacggtccgaacaggccctcgtcatctattcgggtggcttcccttcacgaccggcgctcgcgacgatcacaaggctggcggcccaagcgcaggtgccgacatttcactggggagatatggacgctggaggcgtccgcatattccagcacctcgaaagacatcttgccggcttcgacattccgctgcgtccccatatgatggacactgaactgctccggcgcttcgggaaacccgcaccgggcgtggccggtcctgtcgccgacaggcacgtgagcgcgatcgccggcttggcggatttcctcaccgcgagtggtctcgtgcacgagcaggaggagttcgatcccagaagcccgatcacggagactcttgctccgggggagcagaaggcgccgatgccccgcccggatcccttgcagtga

SEQ ID NO: 45397 - DNA, 1527 bp, Mesorhizobium sp. SOD10
atggcactttttcgttatcttaatgatgacgcgtttctgatcttttcacgcaaattccgattcctctatgaggcggcgttattagatgcctacgagcgcttcttctctcgtggagcatccttccctacgcctcaggaagtcgtccacgcaatctacgatctcatcaaacgaaagcctgagcttcttgccgagggcgacgatgttggtgaaggccttcccgacttagtgtcaaagcgccgtcggcggctgaagtttgcaggcgaggcgaatgaggctgcggaaacagcgttgcgggtcgcaagtgttgcctaccagaagctgatccagaccggttggctcgaagaggaagaatatgggctacgagtgaccgtagatatgcccatgggggcaagcttggtcatgcagctcctgtccagtctgaagtccgacgtgagccagcgctttggtggcgtcgttgtcaacgtcaaacaaagtctggagctggcggcaagactccagccaggatcttcaggaaaggacgccgtggatgctgcatatgccgtggtgcaggcgagagaacacgccaccgcctttctcaagacgctcagggcgatcctctcggacctgaggcggatccgccggactattatggaatcgcggagcatgcgcgagagggtagacgcttactttcaggaattcatcggcgaattggttctaaaggacttccaagccatccacactttcaatcatccctttagattcaaggaccacatccttgacctggctcgcgatatctctctccaccccgaaatcatgaagatgatcgcttcgggctatgtcgagagcggaatggccgatacccgcgaggatgggcttagaacagcagagaccgaccttctatcgattcaggaagtctttgatggcatcggcgagatgttcgaccggatcgccatctttcgccggcagctcgaacagcgactccgcaacacggtcaaatatgcggaacaagggagcagtggcatttcgagccgggcctcatcgctcatacaccggcttcacaaggtaatggaccagcgccctaccctttctgagttcgcttgggtacccctcccggtcgagccgatgcgaacgccgtggtcggaaaggcacctcgcgcagccgcggcaaccacgtaaggcgctggagtcaatggcggtcccacccaaagtcctggatccgttgctggcgctgcgtaagaaactcaagaagcagtacatggaaagaatcgttccagacgagaaacaactactgcaatggctaaatgataaagttccgctggcggtgacgaaagaggcacgtttcctggagatagaagacgtagactcattcattgcattcgatgtgatccgacggtttaccaaaccgggcgaagttccgccttctatcgcggcggcgtttgagatcgtggatgactctcagggacatcagcatgatagcgagtggataaagtgcggtaacttcctcatccggagacgggctgccatggctggaggcgtggatgctgactga

SEQ ID NO: 45398 - DNA, 651 bp, Mesorhizobium sp. SOD10
atgctgactgagttcgaggaggtcgaggcccgatacggcggggacaagggtgccgaccttcggaaagcttgccgatacctcctccgtcatcaattcgtctattcgggcgaccggggtgtggcgaccgtctatgatgtaattatggatagtcgcttcagaaaagtgatcgacaatttctttgattgcattggctaccgcgtccaccgcgagcaagacgaacagtgggcggggattgtgcttgatgatgaggagatgtcgtcaacaccaaaaatgagggctgacgagactatcgtgcttctggtggcagcggctcattggcaggacgaagcgaaccagggcaacgttgaagagcgtgcgacggtcttgaccacatttaacgccctctacgagaaatacagggaaatggccgaaaggggcacaaagatgcttgtgtcccagtcgaggttccaagacgttcttgaggatcttgcttcgcgcaacctgatctggctcggagagttcgatcgtgtccttcaggatcgggaggtggtggtccggccgataatcaagctcgtttccggatccgacgcgttgaggcgcattgaggagcaggttgcgctggaagactatgaaccccgccagctcggtcccgtcgaggaaaaattgcaatga

SEQ ID NO: 45399 - DNA, 3465 bp, Mesorhizobium sp. SOD10
atgatggaactcgtgcatctcacgctggtgaattggcattcgttcactgtcgaagatattccggttagcggccacgtcggtgtccttggtgaaaacgcgtcgggcaaatcaacaatcctggacatgatccaggtggtgctcaccggcgccagcggacgctacatgaacctcaatccagtcgctggtgagagtcgtcgcagaagcggtccgaggcgcacagtacaggggtactgcctcggtgcccgtggagagggcgattttcggcgcgaagcctgccttacctatgtggccattagttttcgagacgccgatggagtgaagcccgacttgacggtaggcctcgccatggaggcaaggaagacacagccagccgaaaccatactcggccgtttcgtcgtccgcggcaaaatattgacaacagccaatttcttacgtgagcgggaaggaaggcaagaattcgcgcaatgggaggaagtaaggcaatcgctggaaagggaatgcggtaacggtttcgtaaaccatcgcgacagcgccacggaccacatccgggaatatatgcgtgacttggttccacgatcggcgccgacttccggaaacgccgccgcgcttgcaaaggcgatcgtgaacggtatgacgcttaatcagggcctgtccgcaacagacttcgtcaggaactatatcctcgaggagtctccgatgaaggtcggcgagctacgagagtcgttgaagacttaccgacaagtcaaccagactatcaagaacatgcgggagcgtgcgaagcggctgaaagtggtcaaggcgcgagcggaagattttagaaacttcctcaatgaacacgtcgaggaggactggatcagtcgcaaggcgaggtacctcgcggcctcggcggcgatgcgggcactcgaagaagaggtcaaggaagccgaggcatctcttctggccgagagcgaggaaattaacgacctgaccacttcgatcaacgaagcgaaccaggatgtgcaccgcatcatcaagcagatcgaagcgatcaaagccaaggtgggcattgacgatcttaacaagatggccgaaagccactccttttccgccgcagattgcctcaaacggatctctgaacgagtgaagcatatgcagcggatcgccgccgcggccgaagcactcggaaagggtgaatcaagctcccgcgaattggtcgctcacgcgtccgcggcggccgaggcggtcaagcgtgggaacacggaagccacggcagtgatcgaacaagcgttcctggcgtcgctccccgtcaccgccgagagaattggcagggcgcgcagtgagacggaagccgctttgcacaccaagaacaaggaggtcgacaagctgtctcggtctatcgaggccgccgcttccgattcacgggattctcacctcggcgaccatacccgcgagttgatgaggctccttcgcatggccgggatggctccgagagcgctttgcgacatcattgaccttatcgacaaggattggggacaagcggctgaaggtcttcttggtcgagatagggaagcgatcttcgtcgatcgcgaccacatccacacggcaacgacgatcctgagagaaaacaggcgggatctacgccaggcttccctggtcagcctaaacaagctcgagcgatacaaagatccggtcgagtcaggttggttcccttcgctcttcaggtccgatgaccaagacgcagtcgccttcctgcagcgcagatatggcaatgtgcggctagcccgcaccatggaagagtttaaccaacccggccgcgccctcatggctgacggcctttacgatgatgggctgttacgggggacccgcctggaggaagccttccgccttaagatcggtaaggcggcgcaggagcaacttttcctggagcagaaaaggcggttggaggttctgcgggaggaaatcgaaaccctgtcccagcgcaggcgcatcctttccgaggttgaccgctccgttgcccttgtgacttcgcctgcggacggcgagacggtggcaggcctgcttgaacgagcgcaacagcaggagaggctggcaggagaggctcgatccaggctggaggcggtcgatcaaggcgacctgaaacgcctatatgagcttgaagagaagaagaaggtccaacaggcctatgtcgacgccagaaatgtcgagctcaactcaatccagaagaggcagggagcttaccagaaacaagctgaaaccgcgagaaagacgctcacgggccttaccaaccaagagggttcgcgccatttgcggaatctcgcccgccgcatgttccaatatagctggcgcttgacggccgctgtgccagctaaccgcagataccgggagaggatcgcgggtaaacaaatcccaagtgacccatccgcccattacgaagcactggccgggatccatcgtgcgatcgggcagcgcgcggaggatcgctccaagcaggcaaaagatagaatgatggaggccgacaggaatgtgcgcgccgccatgaggagctattttgacgtagctcccataagctcggaggtgggagcagaaagcgagatcctgaaggacatcctgccctgggtggaggccacgctacgcgatatcgaagagaacgagctcacgcggcatgaagcactggcagctgaagcttccgagcgagtctcatctatctttcgcggcgagttcgtcaactctctccactcacgcatctccaaactgaagagagatatcgactcgctgaaccatagtctccgcaatcacacattccacggcgagcgatattcgttcagcaggacgcaagtggctcagtacgcgccgatcttgaaagcggtcgagatctacgtgacttccgaggatgcgctggatcttctgttcaagggtgagatacccgaaggctccccccacaaacccgtgctcgacgaggtgaagcgcatccttgaggatcccgataccgagttcgacagttttgaggactatcggagctttttcgttttcgaaattcacatggagaacctcgataccggacacaagacacgctgggaaactcgccgtggcacgggttccggagccgagcaacaagtcccgctttacgttgccatcggtgcctcgctggcctccgtttatgggaccgccgaaggaagatcgggatcgcaacttggaatggcacttgccgtcttcgatgaagcctttgccaagctggacggcaagaaccagcggcaaatgatgagcttctatgagagcctaggcctgcaggtgatcgtggctgcgccacccgagcggcggccctcactgctcggctatatgcatgccattgttgaggtcgacaacattggcaatgggcaatctgagacgacagtagtccaagtcaaggaaaaagctcgcaaggagctgcagcggatcaaccccgaactcatggatgatgaagcgctgcgtaggatggcagccgagtga

SEQ ID NO: 45400 - DNA, 1182 bp, Mesorhizobium sp. SOD10
gtgaaattcaccgatccgattgcacttctttcttatctgctggataggcacgaagacggtcgggcaggcgcacgtgcttatccggacagcggcgccttttcaaatatcggagaggctgaccgtttccggaagaagctggaagaggcaagccgggcgggtgcaatcgagcttcgaatggagatggggcgccggcgagccggcgaaatcaagttcgtgcgcatcgccgacgtggcgaggctctactgtttcgtcgaacgaaaaccttccagcgagcgctcggcgtcagcgctcgaggatctatttcgtcgagctgagctggctgtcccgttcgctgagcatgcgcgggacgctgctgaagcctggtccagaaatcggcggtgggcgggaattgctcccggagacataggttcgctagagcgtgcgctactcctcgcgcaagcgatatacagacggcaacacttaggactcgactatcgcactttctccagaagggccgtttccgatagcaaagcattggaacggctggaggcagccgtcgcaaaggtccttcgaggtgttggcgcgaacatcccggagggcgccacgccccgcgaagcactcggtgcacttgggctggaaaaggtgcctcctcccctcctcctttcaggaccgatcacttttggagcgtcccagcctgacgtatccttccttggcgtccccgcagaagcaatcaacaccgtcggcttcagccgcaccccggaatacgtcctcgtagtagagaactacacgagcttcgtcaggcacgtgactgaggcagatccggaccgccgaggactggtcatctacggcggcggctatccgtcgacgggagttcagaaggcattaggcttgatcgccggtcgctttcccgacgacgtacccttttaccactggtccgacatcgatcccgatggcatctggatcttcctgacagttgagagagcattcggccgcagactactcccgcacctcatgaccgtcgacttggccgaaaagcacggtagtaagccagatcaaaaggcaagcagagtagccagggctgaaggatcggtcctctttgatttgatcgcgtaccttgcaaagccagatgcaaaacacttagagcaggaagaactcgatcctattattccacgcctacaccagagcgagtggcgagcgtcgtga

SEQ ID NO: 45401 - DNA, 1527 bp, Mesorhizobium sp. ORS3324
atggcactttttcgttatcttaatgatgacgcgtttctgatcttttcacgcaaattccgattcctctatgaggcggcgttattagatgcctacgagcgcttcttctctcgtggagcatccttccctacgcctcaggaagtcgtccacgcaatctacgatctcatcaaacgaaagcctgagcttgttgccgagggcgacgatgttggtgaaggccttcccgacttagtgtcaaagcgccgtcggcggctgaagtttgcaggcgaggcgaatgaggctgcggaaacagcgttgcgggtcgcaagtgttgcctaccagaagctgatccagaccggttggctcgaagaggaagaatatgggctacgagtgaccgtagatatgcccatgggggcaagcttggtcatgcagctcctgtccagtctgaagtccgacgtgagccagcgctttggtggcgtcgttgtcaacgtcaaacaaagtctggagctggcggcaagactccagccagggtcttcaggaaaggacgccgtggatgctgcatatgccgtggtgcaggcgagagaacacgccaccgcctttctcaagacgctcagggcgatcctctcggacctgaggcggatccgccggactattatggaatcgcggagcatgcgcgagagggtagacgcttactttcaggaattcatcggtgaattggttctaaaggacttccaagccatccacactttcaatcatccctttagattcaaggaccacatccttgacctggctcgcgatatctctctccaccccgaaatcatgaagatgatcgcttcgggctatgtcgagagcggaatggccgatacccacgaggatgggcttagaacagcagagaccgaccttctatcgattcaggaagtctttgatggcatcggcgagatgttcgaccggatcgccatctttcgccggcagctcgaacagcgactccgcaacacggtcaaatatgcggaacaagggagcagtggcatttcgagccgggccgcatcgctcatacaccggcttcacaatgtaatggaccagcgccctaccctttctgagttcgcttgggtacccctcccggtcgagccgatgcgaacgccgtggtcggaaaggcacctcgcgcagccgcggcaaccacgtaaggcgctggagtcaatggcggtcccacccaaagtcctggatccgttgctggcgctgcgtaagaaactcaagaagcagtacatggaaagaatcgttccagacgagaaacaactactgcaatggctaaatgataaagttccgctggcggtgacgaaagaggcacgtttcctggagatagaagacgtagactcattcattgcattcgatgtgatccgacggtttaccaaaccgggcgaagttccgccttctatcgcggcggcgtttgagatcgtggatgactctcagggacatcagcatgatagcgagtggataaagtgcggtaacttcctcatccggagacgggctgccatggctggaggcgtggatgctgactga

SEQ ID NO: 45402 - DNA, 651 bp, Mesorhizobium sp. ORS3324
atgctgactgagttcgaggaggtcgaggcccgatacggcggggacaagggtgccgaccttcggaaagcttgccgatacctcctccgtcatcaattcgtctattcgggcgatcggggtgtggcgaccgtctatgatgtaattatggatagtcgcttcagaaaagtgatcgacaatttctttgattgcattggctaccgcgtccaccgcgagcaagacgaacagtgggcggggattgtgcttgatgatgaggagatgtcgtcaacaccaaaaatgagggctgacgagactatcgtgcttctggtggcagcggctcattggcaggacgaagcgaaccagggcaacgttgaagagcgtgcgacggtcttgaccacatttaacgccctctacgagaaatacagggaaatggccgaaaggggcacaaagatgcttgtgtcccagtcgaggttccaagacgttcttgaggatcttgcttcgcgcaacctgatctggctcggagagttcgatcgtgtccttcaggatcgggaggtggtggtccggccgataatcaagcttgtttccggatccgacgcgttgaggcgcattgaggagcaggttgcgctggaagactatgaaccccgccagctcggtcccgtcgaggaaaaattgcaatga

SEQ ID NO: 45403 - DNA, 3465 bp, Mesorhizobium sp. ORS3324
atgatggaactcgtgcatctcacgctggtgaattggcattcgttcactgtcgaagatattccggttagcggccacgtcggtgtccttggtgaaaacgcgtcgggcaaatcaacaatcctggacatgatccaggtggtgctcaccggcgccagcggacgctacatgaacctcaatccagtcgctggtgagagtcgtcgcagaagcggtccgaggcgcacagtacaggggtactgcctcggtgcccgtggagagggcgattttcggcgcgaagcctgccttacctatgtggccattagttttcgagacgccgatggagtgaagcccgacttgacggtaggcctcgccatggaggcaaggaagacacagccagccgaaaccatactcggccgtttcgtcgtccgcggcaaaatattgacaacagccaatttcttacgtgagcgggaaggaaggcaagaattcgcgcaatgggaggaagtaaggcaatcgctggaaagggaatgcggtaacggtttcgtaaaccatcgcgacagcgccacggaccacatccgggaatatatgcgtgacttggttccacgatcggcgccgacttccggaaacgccgccgcgcttgcaaaggcgattgtgaacggtatgacgcttaatcagggcctgtccgcaacagacttcgtcaggaactatatcctcgaggagtctccgatgaaggtcggtgagctacgagagtcgttgaagacttaccgacaagtcaaccagactatcaagaacatgcgggagcgtgcgaagcggctgaaagtggtcaaggcgcgagcggaagattttagaaacttcctcaatgaacacgtcgaggaggactggatcagtcgcaaggcgaggtacctcgcggcctcggcggcgatgcgggcactcgaagaagaggtcaaggaagccgaggcatctcttctggccgagagggaggaaattaacgacctgaccacttcgatcaacgaagcgaaccaggatgtgcaccgcatcatcaagcagatcgaagcgatcaaagccaaggtgggcattgacgatcttaacaagatggccgaaagccactccttttccgccgcagattgcctcaaacggatctctgaacgagtgaagcatatgcagcggatcgccgccgcggccgaagtactcggaaagggtgaatcaagctcccgcgaattggccgctcacgcgtccgcggcggccgaggcggtcaagcgtgggaacacggaagccacggcagtgatcgaacaagcgttcctggcgtcgctccccgtcaccgccgagagaattggcagggcgcgcagtgagacggaagccgctttgcataccaagaacgaggaggtcgacaagctgtctcggtctatcgaggccgccgcttccggttcacgggattctcacctcggcgaccatacccgcgagttgatgaggctccttcgcatggccgggatggctccgagagcgctttgcgacatcattgaccttatcgacaaggattggggacaagcggctgaaggtcttcttggtcgagatagggaagcgatcttcgtcgatcgcgaccacatccacacggcaacgacgatcctgagagaaaacaggcgggatctacgccaggcttccctggtcagcctaaacaagctcgagcgatacaaagatccggtcgagtcaggttggttcccttcgctcttcaggtccgatgaccaagacgcagtcgccttcctgcagcgcagatatggcaatgtgcggctagcccgcaccatggaagagtttaaccaacccggccgcgccctcatggctgacggcctttacgatgatgggctgttacgggggacccgcctggaggaagccttccgccttaagatcggtaaggcggcgcaggagcaacttttcctggagcagaaaaggcggttggaggttctgcgggaggaaatcgaaaccctgtcccagcgcaggcgcatcctttccgaggttgaccgctccgttgcccttgtgacttcgcctgcggacggcgagacggtggcaggcctgcttgaacgagcgcaacagcaggagaggctggcaggagaggctcgatccaggctggaggcggtcgatcaaggcgacctgaaacgcctatatgagcttgaagagaagaagaaggtccaacaggcctatgtcgacgccagaaatgtcgagctcaactcaatccagaagaggcagggagcttaccagaaacaagctgaaaccgcgagaaagacgctcacgggccttaccaaccaagagggttcgcgccatttgcggaatctcgcccgccgcatgttccaatatagctggcgcttgacggccgctgtgccagctaaccgcagataccgggagaggatcgcgggtaaacaaatcccaagtgatccatccgcccattacgaagcactggccgggatccatcgtgcgattgggcagcgcgcggaggatcgctccaagcaggcaaaagatagaatgatggaggccgacaggaatgtgcgcgccgccatgaggagctattttgacgtagctcccataagctcggaggtgggagcagaaagcgacatcctgaagaacatcctgccctgggtggaggccacgctacgcgatatcgaagagaacgagctcacgcggcatgaagcactggcagctgaagcttccgagcgagtctcatctatctttcgcggcgagttcgtcaactctctccactcacgcatctccaaactgaagagagatatcgactcgctgaaccatagtctccgcaatcacacattccacggcgagcgatattcgttcagcaggacgcaagtggctcagtacgcgccgatcttgaaagcggtcgagatctacgtgacttccgaggatgcgctggatcttctgttcaagggtgagatacccgaaggctccccccacaaacccgtgctcgacgaggtgaagcgcatccttgaggatcccgataccgacttcgacagttttgaggactatcggagctttttcgttttcgaaattcacatggagaacctcgataccggacacaagacacgctgggaaactcgccgtggcactggttccggagccgagcaacaagtcccgctttacgttgccatcggtgcctcgctggcctccgtttatgggaccgccgaaggaagatcgggatcgcaacttggaatggcacttgccgtcttcgatgaagcctttgccaagctggacggcaagaaccagcggcaaatgatgagcttctatgagagcctaggcctgcaggtgatcgtggctgcgccacccgagcggcggccctcactgctcggctatatgcatgccattgttgaggtcgacaacattggcaatgggcaatcggagacgacagtagtccaagtcaaggaaaaagctcgcaaggagctgcaacggatcaaccccgaactcatggatgatgaagcgctgcgtaggatggcagccgagtga

SEQ ID NO: 45404 - DNA, 1182 bp, Mesorhizobium sp. ORS3324
gtgaaattcaccgatccgattgcacttctttcttatctgctggataggcacgaagacggtcgggcaggcgcacgtgcttatccggacagcggcgccttttcaaatatcggagaggctgaccgtttccggaagaagctggaagaagcaagccgggcgggtgcaatcgagcttcgaatggagatggggcgccggcgagccggcgaaatcaagttcgtgcgcatcgccgacgtggcgaggctctactgtttcgtcgaacgaaaaccttccagcgagcgctcggcgtcagcgctcgaggatctatttcgtcgagctgagctggctgtcccgttcgctgagcatgcgcgggaagctgctgaagcctggtccagaaatcggcggtgggcgggaattgctcccggcgacataggttcgctcgagcgtgcgctactcctcgcgcaagcgatatacagacggcaacacttaggactcgactatcgcactttctccagaagggccgtttccgatagcaaagcattggaacggctggaggcagccgtcgcaaaggtccttcgaggtgttggcgcgaatatcccggagggcgccacgccccgcgaagcactcggtgcacttgggctggaaaaggtgcctcctcccctcctcctttcaggaccgatcacttttggagcgtcccagcctgacgtatccttccttggcgtccccgcagaagcaatcaacaccgtcggcttcagccgcaccccggaatacgtcctcgtagtagagaactacacgagcttcgtcaggcacgtgactgaggcagatccggaccgccgaggactggtcatctacggcggcggctatccgtcgacgggagttcagaaggcattaggcttgatcgccggtcgctttcccgacgacatacccttttaccactggtccgacatcgatcccgatggcatctggatcttcctgacagttgagagagcattcggccgcagactactcccgcacctcatgaccgtcgacttggccgaaaagcacggtagtaagccagatcaaaaggcaagcagagtagccagggctgaaggatcggtcctctttgatttgatcgcgtaccttgcaaagcctgatgcaaaacacttagagcaggaagaactcgatcctattattccacgcctacaccagagcgagtggcaagcctcgtga

SEQ ID NO: 45405 - DNA, 1527 bp, Mesorhizobium sp. ORS3359
atggcactttttcgttatcttaatgatgacgcgtttctgatcttttcacgcaaattccgattcctctatgaggcggcgttattagatgcctacgagcgcttcttctctcgtggagcatccttccctacgcctcaggaagtcgtccacgcaatctacgatctcatcaaacgaaagcctgagcttcttgccgagggcgacgatgttggtgaaggccttcccgacttagtgtcaaagcgccgtcggcggctgaagtttgcaggcgaggcgaatgaggctgcggaaacagcgttgcgggtcgcaagtgttgcctaccagaagctgatccagaccggttggctcgaagaggaagaatatgggctacgagtgaccgtagatatgcccatgggggcaagcttggtcatgcagctcctgtccagtctgaagtccgacgtgagccagcgctttggtggcgtcgttgtcaacgtcaaacaaagtctggagctggcggcaagactccagccagggtcttcaggaaaggacgccgtggatgctgcatatgccgtggtgcaggcgagagaacacgccaccgcctttctcaagacgctcagggcgatcctctcggacctgaggcggatccgccggactattatggaatcgcggagcatgcgcgagagggtagacgcttactttcaggaattcatcggtgaattggttctaaaggacttccaagccatccacactttcaatcatccctttagattcaaggaccacatccttgacctggctcgcgatatctctctccaccccgaaatcatgaagatgatcgcttcgggctatgtcgagagcggaatggccgatacccacgaggatgggcttagaacagcagagaccgaccttctatcgattcaggaagtctttgatggcatcggcgagatgttcgaccggatcgccatctttcgccggcagctcgaacagcgactccgcaacacggtcaaatatgcggaacaagggagcagtggcatttcgagccgggccgcatcgctcatacaccggcttcacaaggtaatggaccagcgccctaccctttctgagttcgcttgggtacccctcccggtcgagccgatgcgaacgccgtggtcggaaaggcacctcgcgcagccgcggcaaccacgtaaggcgctggagttaatggcggtcccacccaaagtcctggatccgttgctggcgctgcgtaagaaactcaagaagcagtacatggaaagaatcgttccagacgagaaacaactactgcaatggctaaatgataaagttccgctggcggtgacgaaagaggcacgtttcctggagatagaagacgtagactcattcattgcattcgatgtgatccgacggtttaccaaaccgggcgaagttccgccttctatcgcggcggcgtttgagatcgtggatgactctcagggacatcagcatgatagcgagtggataaagtgcggtaacttcctcatccggagacgggttgccatggctggaggcgtggatgctgactga

SEQ ID NO: 45406 - DNA, 651 bp, Mesorhizobium sp. ORS3359; identical to SEQ ID NO: 45402

SEQ ID NO: 45407 - DNA, 3465 bp, Mesorhizobium sp. ORS3359
atgatggaactcgtgcatctcacgctggtgaattggcattcgttcactgtcgaagatattccggttagcggccacgtcggtgtccttggtgaaaacgcgtcgggcaaatcaacaatcctggacatgatccaggtggtgctcaccggcgccagcggacgctacatgaacctcaatccagtcgctggtgagagtcgtcgcagaagcggtccgaggcgcacagtacaggggtactgcctcggtgcccgtggagagggcgattttcggcgcgaagcctgccttacctatgtggccattagttttcgagacgccgatggagtgaagcccgacttgacggtaggcctcgccatggaggcaaggaagacacagccagccgaaaccatactcggccgtttcgtcgtccgcggcaaaatattgacaacagccaatttcttacgtgagcgggaaggaaggcaagaattcgcgcaatgggaggaagtaaggcaatcgctggaaagggaatgcggtaacggtttcgtaaaccatcgcgacagcgccagggaccacatccgggaatatatgcgtgacttggttccacgatcggcgccgacttccggaaacgccgccgcgcttgcaaaggcgattgtgaacggtatgacgcttaatcagggcctgtccgcaacagacttcgtcaggaactatatcctcgaggagtctccgatgaaggtcggtgagctacgagagtcgttgaagacttaccgacaagtcaaccagactatcaagaacatgcgggagcgtgcgaagcggctgaaagtggtcaaggcgcgagcggaagattttagaaacttcctcaatgaacacgtcgaggaggactggatcagtcgcaaggcgaggtacctcgcggcctcggcggcgatgcgggcactcgaagaagaggtcaaggaagccgaggcatctcttctggccgagagggaggaaattaacgacctgaccacttcgatcaacgaagcgaaccaggatgtgcaccgcatcatcaagcagatcgaagcgatcaaagccaaggtgggcattgacgatcttaacaagatggccgaaagccactccttttccgccgcagattgcctcaaacggatctctgaacgagtgaagcatatgcagcggatcgccgccgcggccgaagtactcggaaagggtgaatcaagctcccgcgaattggccgctcacgcgtccgcggcggccgaggcggtcaagcgtgggaacacggaagccacggcagtgatcgaacaagcgttcctggcgtcgctccccgtcaccgccgagagaattggcagggcgcgcagtgagacggaagccgctttgcataccaagaacgaggaggtcgacaagctgtctcggtctatcgaggccgccgcttccggttcacgggattctcacctcggcgaccatacccgcgagttgatgaggctccttcgcatggccgggatggctccgagagcgctttgcgacatcattgaccttatcgacaaggattggggacaagcggctgaaggtcttcttggtcgagatagggaagcgatcttcgtcgatcgcgaccacatccacacggcaacgacgatcctgagagaaaacaggcgggatctacgccaggcttccctggtcagcctaaacaagctcgagcgatacaaagatccggtcgagtcaggttggttcccttcgctcttcaggtccgatgaccaagacgcagtcgccttcatgcagcgcagatatggcaatgtgcggctagcccgcaccatggaagagtttaaccaacccggccgcgccctcatggctgacggcctttacgatgatgggctgttacgggggacccgcctggaggaagccttccgccttaagatcggtaaggcggcgcaggagcaacttttcctggagcagaaaaggcggttggaggttctgcgggaggaaatcgaaaccctgtcccagcgcaggcgcatcctttccgaggttgaccgcagcgttgcccttgtgacttcgcctgcggacggcgagacggtggcaggcctgcttgaacgagcgcaacagcaggagaggctggcaggagaggctcgatccaggctggaggcggtcgatcaaggcgacctgaaacgcctatatgagcttgaagagaagaagaaggtccaacaggcctatgtcgacgccagaaatgtcgagctcaactcaatccagaagaggcagggagcttaccagaaacaagctgaaaccgcgagaaagacgctcacgggccttaccaaccaagagggttcgcgccatttgcggaatctcgcccgccgcatgttccaatatagctggcgcttgacggccgctgtgccagctaaccgcagataccgggagaggatcgcgggtaaacaaatcccaagtgatccatccgcccattacgaagcactggccgggatccatcgtgcgattgggcagcgcgcggaggatcgctccaagcaggcaaaagatagaatgatggaggccgacaggaatgtgcgcgccgccatgaggagctattttgacgtagctcccataagctcggaggtgggagcagaaagcgacatcctgaagaacatcctgccctgggtggaggccacgctacgcgatatcgaagagaacgagctcacgcggcatgaagcactggcagctgaagcttccgagcgagtctcatctatctttcgcggcgagttcgtcaactctctccactcacgcatctccaaactgaagagagatatcgactcgctgaaccatagtctccgcaatcacacattccacggcgagcgatattcgttcagcaggacgcaagtggctcagtacgcgccgatcttgaaagcggtcgagatctacgtgacttccgaggatgcgctggatcttctgttcaagggtgagatacccgaaggctccccccacaaacccgtgctcgacgaggtgaagcgcatccttgaggatcccgataccgacttcgacagttttgaggactatcggagctttttcgttttcgaaattcacatggagaacctcgataccggacacaagacacgctgggaaactcgccgtggcactggttccggagccgagcaacaagtcccgctttacgttgccatcggtgcctcgctggcctccgtttatgggaccgccgaaggaagatcgggatcgcaacttggaatggcacttgccgtcttcgatgaagcctttgccaagctggacggcaagaaccagcggcaaatgatgagcttctatgagagcctaggcctgcaggtgatcgtggctgcgccacccgagcggcggccctcactgctcggctatatgcatgccattgttgaggtcgacaacattggcaatgggcaatcggagacgacagtagtccaagtcaaggaaaaagctcgcaaggagctgcaacggatcaaccccgaactcatggatgatgaagcgctgcgtaggatggcagccgagtga

SEQ ID NO: 45408 - DNA, 1182 bp, Mesorhizobium sp. ORS3359
gtgaaattcaccgatccgattgcacttctttcttatctgctggataggcacgaagacggtcgggcaggcgcacgtgcttatccggacagcggcgccttttcaaatatcggagaggctgaccgtttccggaagaagctggaagaggcaagccgggcgggtgcaatcgagcttcgaatggagatggggcgccggcgagccggcgaaatcaagttcgtgcgcatcgccgacgtggcgaggctctactgtttcgtcgaacgaaaaccttccagcgagcgctcggcgtcagcgctcgaggatctatttcgtcgagctgagctggctgtcccgttcgctgagcatgcgcgggaagctgctgaagcctggtccagaaatcggcggtgggcgggaattgctcccggcgacataggttcgctcgagcgtgcgctactcctcgcgcaagcgatatacagacggcaacacttaggactcgactatcgcactttctccagaagggccgtttccgatagcaaagcattggaacggctggaggcagccgtcgcaaaggtccttcgaggtgttggcgcgaacatcccggagggcgccacgccccgcgaagcactcggtgcacttgggctggaaaaggtgcctcctcccctcctcctttcaggaccgatcacttttggagcgtcccagcctgacgtatccttccttggcgtccccgcagaagcaatcaacaccgtcggcttcagccgcaccccggaatacgtcctcgtagtagagaactacacgagcttcgtcaggcacgtgactgaggcagatccggaccgccgaggactggtcatctacggcggcggctatccgtcgacgggagttcagaaggcattaggcttgatcgccggtcgctttcccgacgacatacccttttaccactggtccgacatcgatcccgatggcatctggatcttcctgacagttgagagagcattcggccgcagactactcccgcacctcatgaccgtcgacttggccgaaaagcacggtagtaagccagatcaaaaggcaagcagagtagccagggctgaaggatcggtcctctttgatttgatcgcgtaccttgcaaagcctgatgcaaaacacttagagcaggaagaactcgatcctattattccacgcctacaccagagcgagtggcaagcctcgtga

SEQ ID NO: 45409 - DNA, 1512 bp, Rhodococcus ruber
atggtcgaacccgatcccggagggagcgtcgtgtccaccgccgacctgcaccgtctggcgcgtctgcgccaggagcacccggcgtgggcgctgctgcggtcggacaatgcggccgcggtgctggcgctgctgggccggcacttcgaccgcggcacgcgacggttgccggccccggagctgttcgcccgcctcgatgcggacctgcaggaactgcgcgacgagggcttcgagctgccgcgcaccggtcaggcctactgtgcggactgggtgcgcgcgggcttcctgctgcgccgcgcgagcgccgacgcccgggaggagaccctcgagccgacggaggcgacgttcgccgcgctcacgttcgtcgcgggcctgacgaccgctaccagctcggtcaccgagtcgcggctgaccaccctgtcgagccagctccaggcgctggcgcgggactcggatccacgcagcgagagtcgcctggcggcgttgcgggccgagcgcgacgagctggaccggcagatcgccgccgtcgaatccggcgactttcccgtactggacgggaaccgggcggtggaacggtccgcggagatcctggcgctggccggggagatcccgggcgatttcgcgcgggtgcgcgccgagctggaggcgctcaaccgggagctgcgggcccggatcctcgacgaggagggcgaccgcggcgacactctcggcgaggtgttccgcggggtcgatctgatcggcagttccgacgccggccgcagcttcgccggcttctacgacatgatcatcgacccggagcggtcgtcgcagctcgacgactggatcgaggcggtgctgcaacgcccgttcgcgcagcagctcaccaccgagcaacgcggccggttccgcaccctgctcaccgagatggaggacgcgggcggcgaggtgcacgcgacgatgacgtcgttgtcgcgttcgctgcgccacttcgtgcagtcccgccactacgaggagcaccggcgtctgcagcggctgttgcgctcggcccaacagcaggccctgcaggtggcgcagcgccgcaaaccgtacgacctgctggacctcgagctggtgcgggtcggcatgggcatcgattcggtggcggcgctgcagctgcacaacccggccgacgacctggtggccgagccggtggtgacccagccggtcggcgaggtggatctcgcggagctgcgccgcatcgtccgtgaatcggagatcgacatggacgagctggccggcaacgtcgccgccacgctgcgttcccgcggcagcgccacgatcggcgacgtgttgcgcgatcatcccgccacccagggcttggccagcgcggtgggtctgctggtgctcgccgcggagcacggtcaccgcgtcgacggcaccgaggagatcgcgtggacgtccccgtcgggcgcgacccgcgtcgcgacggtgcgccggcacctgttcgacccgaccgacaccgagttcaccgcccgcatcaccgaggacgcgtcatga

SEQ ID NO: 45410 - DNA, 606 bp, Rhodococcus ruber
atgaccgaatcgaccacccgcacggggctgtatccgggcgacaccggcgaactcgacctcgacacccgccgcgcgctggtgcagctgctcaagggcccgctcgtcaccgccgacaagcacccggaggtgtggcggacggtgatccgcgacgagcgggtgctgcggtcccggctcgcggacgtgttcctcgatctcgtcgtcgacgaggacgatcagctcgcgttcacccgccccgccgacacgggggatcacaaggccccgacggtgctgcgcaccgagcgcctgacgttcatggacaccgtgatgctgctggcgttgcggcaccggctgctgcgcgcccagccgggcgagcgggtgatcgtcgacttcgacgaggtggccgggcagctggagatgtaccgcgcggcgacgagcaccgatccggccggcttccgtaaacgggtcaacgcgtcgtgggagaagttgaagaagtacacgctgctggcatcgacgtccacggagggccggatggaggtctcgccggtgttgcggcagttgttcgacgccgatcaggtcgccgccgtcgaggccgagttccggcgcatcgtcgaggaggacgcgccgtga

SEQ ID NO: 45411 - DNA, 3300 bp, Rhodococcus ruber
gtgagcgccgcacccgtccaccccggccagttccggctcgcgcgggtgcaggtggtcaactggggcactttgcacgggcatcacgacattcccgtggcccgcaagggttttctcatcaccggggcgtccggctcgggcaagtcgacgctcatcgacgcgatctcgacggtgctcatgccgggcggcagcgtgcggttcaacgcggccgcgcaggagtcggcggccgggtcgggccgcaacttcgtcagctacatccgtggggcgtggcggcgcgaggccgacgccgacaccgacgcgctcaccgcctcgtatctgcgcaccggcgccacgtggagtgcggtggcactgacgtacgacgccgccgacggcacggccccggtgaccctggtcaagctcatgcacctgcgtcggggcgccaacgccaacaacgagatctcgcacctgcacctgatcctcgacaccgacctggagctgaccgacctcgaaccgttcgtcgcgcggggcatcgacacccggggcatccgcaagcgctggcccgatgcggttgtgaaccccagctacgcgccgttcgcccgcgcgttccggtccaagctcggcatctcgtcggaggccgcgcagcggctgctgcaccgcacgctgtccgcgaagagcctgaacagcctcgaccagctgctgcgcgactacatgctcgacgagccggccacgttcgcgatggccgagcgggccaccacccagttccgcgagctgcgcgaggcgcatcgcgtcgtcgtcgacgctcgtcgtcaggtcgagacgctcgagccgctcgtcgcgctggccgacgcccgtcgcaccgggctgcaggcccagcgcgacctgcaggacgagaccgatcacctcgacgcggtgcacgcccggatgacggtggacctgctcagcgacaggctcgacgagacgcgggcgcagaccggtctgctgcaggccgccgcggacaagaccgccgacgaggccgaccgcgccggcgaacgcaccctcgatctgcgggtgcgcgccgagagcgccggcgacggccggctcgcaaccctccgcgtgcacaaggagaccgccgagaccgcactcgaacgaatcacccagcagcgcagacggttcgacgtcgccctcgcccactgggaggcggagacaccgggcaccgcggacgacttcgcgcatctgcaggcccagctggagcgggaactgcgcgagctcgacgccaccgccgacacgcgcaaggcggaactgtacgaggtggccggtgcgctcgccgaacgccggaagacgatccgcgagctgatcgccgaccgggaggtcctggcccggcgccgctccaacctcgatcccgacctgctgcgcgcccgggaactggtgtgctcggcggccggcctcggcgaggacgccctgcacttcgcgggcgagctgatcgcggtgcgcgccgagcacgccgagtggacgggtccgatcgagcgggtcctgggcggattcgggcgcaccctgctggtgcccgacgagctgtatccgcgggtggccgccgccgtcgacgcacaccacctcggcgcccgcctcgtgtaccggcgggtccgcaccggcgtcggcgcgccggacgcacccaccaccgccgacggctcgctcgtccgcaagctcgaggtgcgccccggcccgctcgccgcgtggctgcaccaccacctggcggaccgcttcgactacgcgtgcgtcgacaccgccgacgacctgcgccgcgtcccgcggggcgtgacccgggccgggcaggtcaagcacggcggcgaccggcacgagaaggacgaccggcggcgcatcgacgaccgcagccgctgggtcctcggcttcgacaacgaggccaagctcgccgacctgcgccggcgtatcggcgacgccgagaccgacgtcgacacgctgcaacggcggcaggaggcgctcgagcgcgccgagtccgcgatccagcagcgccggcaggccgccgcggtgatccgcgagtccgcgtgggccgacgtcgacgtcgcggcggcgggcagcgcggtggacgcgatcgaggagcggctgcgcgagtggatgcagggcaacaccgaatacgccacgctcaccgcggatctggcccgcgccgagagcgaggaacgcgccgcccggcaggcgcacaccgcggcgctggccaagctcgaacagcaccgggacgagctgacccgggtgcaggcgcggctcgacgacgcgcaggcccacgccggcacggcggtgcccgacccgatcttcgcgcgcatccgggcccggttcgccgcggccgtccgccgcgtcactgtcgacaacatcgaccgggccctgagcacggtgggtcgcgcgatcaacgagcagatgcggtccgcgcagcgcgacaccgcggacgccgagcgccgcatcaccgccatcctcaccggctaccttgccgagtgggaggcgcggcgcgccgagatgcgctccgaggccgagtacgtcgacgacgccctcgccgtgctcgctcggctgcgcagcgacggcctgcccgcctacgaggacgagttcttccggctgctgcgcgagcagtcgcaccgcaacatcggggagctggcccgcgcgatccgcaaggcgccgggcgagatccgctcccgcatcgagccggtgaacgaatcgctgcgccgctcgccgttcgacaccgaccggatcctgcgcatcgacgtcaaggaccggcgctcccccgccgcgtcggagttcctggcggagctgctgcagatcacgagcggcgcgtggaaggaggaggaccgggccgcggcggagcgacggttcgaacagatggcggcggtgctcgaacggctcgactccggcgagcccgccgatctgcggtggaagcgcctcgtgctcgacacccgcctgcatgtcggattcatcggggtggaggtcgacccggagggcaacgacgccaactatcacgactcgagctccggcctgtcgggtgggcaggcgcagaagctggtgttcttctgcctcgcggccgcgctgcgctatcagctggccgccgccggcgaggagttgccgcgctacggcaccgtgatcctcgacgaggcgttcgaccgcgccgaccccgcgtacacgcggcgggcgctggacgtgttcacccagttcgggttccacatggtgctcgccaccccgctcaagctgctgcagacgctcgacgactacatcgacggcgtggccgcggtgagcatccgcgacaagcgctactcgcagatcgcactgttgccgatccgcggcgccggcacgtga

SEQ ID NO: 45412 - DNA, 1137 bp, Rhodococcus ruber
gtgagcgcattgtgcgtgccgccgtccgcggtcgccggcaaggcccaggccgcgtaccgcagccgccgcgctcgatggatcaccgatcccgctgcggccgagtcggattcgctgtcgattgtgctgcatccgccgtccgagcggcgggtggcgcaggatcccgatgccgtcgtggcgtgggtgcgggcctggcacggctaccggggcgccggccaggtcgagtgggagacgcggcgctggccgagcttcggcacgcaggaagtgccggtgcgcctgatgctttcgggcgcgaccgagatcgccgccgcggccgcacgcgcgcccgagtggcgcaccctcaccgaacggcgggcgcgactgctcgacggactcggccccggcaccgcgacgctcgcgaccgcgatcgccgccacgcatgcccgctggctcgagctggacgagccggacttcgcgcggctcgtcgcggcggtccgctggctggccgagcatccgtcgtcggggctgttcatccgccagctgccggtgcccggcgtcgacaccaaatgggtgtcgcggcatcgcggtctggtcgagacgctgctcgacggtgtgcgcggcgaccgtgatctgggagtgcggtcgctgccgcggatgtgcggggtggccgtgtgtgaccggacgctgctgcccacggcaccgcggatcttcgcgacgtcgctcgacgagctggcggcactgccggtgacaccggcccgcaccctgatcctcgagaacaaggagggtctgcacgcgctgccggagctgccggcgacggtggcggtgcacggcgggggctacgcggtgcacgaactggcggacgtgccgtggctcgccgcctccgacgtcgtgtactggggcgacctggacacgcacggcttcgcgatcctcgaccggctccgcggccacctcccgcacgtgcgcagcctgctcatggaccgcggcaccgtcgagcggtggcgcgacctcgccgtgcccgaggcgtcccccgctccgcacgtgcccgcgcacctgaccgggccggaacgcgacgccctcgacgcggtgcgcacggaagggcttcggctcgagcaggagcggatcccgtggccgtacgtcgtcgcgcatctcgcggcactgtag

SEQ ID NO: 45413 - DNA, 1626 bp, Bifidobacterium longum subsp. infantis; identical to SEQ ID NO: 41874

SEQ ID NO: 45414 - DNA, 663 bp, Bifidobacterium longum subsp. infantis; identical to SEQ ID NO: 41875

SEQ ID NO: 45415 - DNA, 3552 bp, Bifidobacterium longum subsp. infantis
atgcaggcgacagacgtgcagatgatcgcggaccggtggatgctggaatcccgccgactcatcaactggggctcctatgagggctaccacgaattccgcccctccacggaccacaagctgccggtgaccctgctcgccggcgccagcgaatccggcaaatccacgctggtcgacgcgcagatctccctgctgtacccaaccggcacgccgttcaacaaggcctcgaactccggccgctccgaacgcagcgactacacctacctgcgcggcatggtcggcgtgggcagcaccgaaaccggcgacgagccgctctacctgcgcggccgcgacgagaacggcgcaccgcaacccgtgtggggcgccatcgtggacacctatcgcaaccagaccaccggccaggtgctctcctgcgccaaattcctctacctgatgcccggcgacggccgcggtgacgtgcgccgccagtacgtggtctggggcaagcccgtggaccccaggcgcatggaccaataccgtgacgccccgttcacgccggcccagctcaaagccacctaccccgactgcctcacattccccagcgccgaagcgttccacacacacatctggagcgcaatgggcctgagcgaggccgcctgccgactgctgcacaagatccagtccgccgacgcgccctcccggctcgacgacatcttcaaacaaggcgtgctcggcgtgcccgaagccctgggcctggcccgcaccacggtcgaggactacgaacgttacgacgggaacttccacgccatggacgagaaaacccgccgcatggacacgctgcgcggcatccaacaggcctacggcgaatacgccgccgcacgcggcaaggcccgcgccttcgaaccggtcaagccggccgtcgacggcacggtgccggccgtgctgcgcgactgggcattggcccgcatgcgtggcgaagtcgccgtccaactgcccgccgaccgcgccgaacaacagaacagcgaggcggaagccaagctgctgcgccgccgaaccgaagacctgcgcacccgcctcgacatgatccgaggccagatgcagggtctggacggcggcaacctgacccgactcgaactcgaactcgaccaggcccgccgcaccctcgaagacgtgcaagccaaccgaacacgaatcgaacaaacgttcgcatccatcggcgagacgctgcccggcaacgaacaggcctggaacgagcgccgcatcaacgccgtgaacttcaaacgcgaatacaacaaacgagacggcgaatgcgaggaagccctcaccgccgccatcaacgcgcgggccggcgcacgcggcgacctcgaacgactgcaacgcgacttcgaccggcaacgctcccagcgcacccgcatctcccagcagatggacgaaacccgcgccatgctctgccgcgccaccggactcacccccgccgaactgccgtacgtggccgaacttatggacgtgaacgaacacgaggaagactggcgtctcgccatgaacgtcgcctacgcgcccatcgcccagaccatcctcgtcgacaagcgccacgaacagggcttcgccgccaaagtcagcaccatcgacccgcgcaccatgccccgacacacctggcagttcgtggacaccgcacgccactacgacgacaccggcgcgcacgcgaacatactcaccggagaacaggacggcgactggctgtccggcaaactgcgctaccgcgacgactcgcccttcgccgactggctgcgctcgcagacccaggccgaacgattcgacgccctatgcgtcaccgccatcgacgacaccgaccgcaccaaccgtcaggtgcaggccgacggtcagatcaaatccggcgcacgcggccagcacggcaccaaagaccgcgcccaggtcatcggattcgtcaacgaaacctacctcaacgcgctcgcagcgcaggtcgacgccgcccgcaacgcgctcagccaagccgacaccgactacacggccgccaaaacacagtccgataacctccaccgcgaactcgaactggccaaccagctcgcctacacgtcatgggaacgcatcgacatcaccggcgcgcaacggaccatcacggacacgcaggacgccatcgcatccatcaaaaacgatcccaaactcgccgaactcgccaaacagcgcgacgaactgaacgccgaactcgaccgtgtggaacgccagcgcatcgaatccgaccaggccgcggcccgcgccggcagcgccgtcgaagcggcgctcatctggctgcgcgaccatgccgacaccggcacgacggacgccgccggtgtcatcgccgacagcggcgatgacgataacgccaccaccggcccactgccggacgaagtcacggcggtgctcaccgaatcctacgacaaccgattcgccggattggcggacgccgccatgcgcgcacacatgatcatcggcgcgggcgtggccggaacgagggcgccgggggagagtttccccgaacgcaccatcgccggcatcggcaaggacatgacctcccgcatcgatctgctgaacggccaggccgacgccgcgcgtaccggcgtcgaatcgaaaatgagcacctacatcgcgctctacgcggccgacgacgactcgctgaccgccagcgtggaggactaccggtactatctcgacgaactcgccagcctcacccagctggccgcggtcgccgccaccgacgccgaataccggcgctgcctcgaacagctgctcaggagcttcctgaccatcaaacgcgccatcgacacggatgccagcgacatccacgaccagcttgaccgcatcaacgccatgctcaaaggccaacagttcggtcccaagcacggcagcctgtccctgcacgcggacgtgcgccgtcccgagcgcgccttctggacgcagctcatccgcgtcatcggcaccctgaacgattggaaatccgccgacgtcaacgattccgacgcctcgcgcaaggccttcgcggcctgtgcgccgatggtcgggctgctgcgcgccgaactcgcgcaggtcaaggacgcgaacggcgtgaaaagctacggcgcccgcaatctcgacccgcgctgccgctcgtccttctacgccatcgtgcatcatgccgacggtccggacgaacgcatcacctccaccggtggtcgctcgggcggcgccttgcaggagctcacctcattcgtatacggcgcggcgctcatctacctgctcggcggcggcctgaccagcgaaccctcgtacaccacgctgttcctcgacgaggcgctcatcaaggccgacggccgttacacgcagcgcgccctcgcggtgctgccgcgcctcggattccaggtcatcgtctccgccccggaaagcaagaccggcgaaatcctcgaggtctccaccaaggcctacgtgacctacaaggaccccgacaccggcctcacctccctgcgcgaggccgtgctgcaccagaatgacatggatgatgaatcatcgtcggatatattgaaggatgacggggttgccgaatga

SEQ ID NO: 45416 - DNA, 1626 bp, Bifidobacterium longum subsp. infantis; identical to SEQ ID NO: 41874

SEQ ID NO: 45417 - DNA, 663 bp, Bifidobacterium longum subsp. infantis; identical to SEQ ID NO: 41875

SEQ ID NO: 45418 - DNA, 3552 bp, Bifidobacterium longum subsp. infantis; identical to SEQ ID NO: 45415

SEQ ID NO: 45419 - DNA, 1626 bp, Bifidobacterium longum subsp. infantis; identical to SEQ ID NO: 41874

SEQ ID NO: 45420 - DNA, 663 bp, Bifidobacterium longum subsp. infantis; identical to SEQ ID NO: 41875

SEQ ID NO: 45421 - DNA, 3552 bp, Bifidobacterium longum subsp. infantis; identical to SEQ ID NO: 45415

SEQ ID NO: 45422 - DNA, 1626 bp, Bifidobacterium longum subsp. infantis; identical to SEQ ID NO: 41874

SEQ ID NO: 45423 - DNA, 663 bp, Bifidobacterium longum subsp. infantis; identical to SEQ ID NO: 41875

SEQ ID NO: 45424 - DNA, 3552 bp, Bifidobacterium longum subsp. infantis; identical to SEQ ID NO: 45415

SEQ ID NO: 45425 - DNA, 1626 bp, Bifidobacterium longum subsp. infantis; identical to SEQ ID NO: 41874

SEQ ID NO: 45426 - DNA, 663 bp, Bifidobacterium longum subsp. infantis; identical to SEQ ID NO: 41875

SEQ ID NO: 45427 - DNA, 3552 bp, Bifidobacterium longum subsp. infantis; identical to SEQ ID NO: 45415

SEQ ID NO: 45428 - DNA, 1626 bp, Bifidobacterium longum subsp. infantis; identical to SEQ ID NO: 41874

SEQ ID NO: 45429 - DNA, 663 bp, Bifidobacterium longum subsp. infantis; identical to SEQ ID NO: 41875

SEQ ID NO: 45430 - DNA, 3552 bp, Bifidobacterium longum subsp. infantis; identical to SEQ ID NO: 45415

SEQ ID NO: 45431 - DNA, 1626 bp, Bifidobacterium longum subsp. infantis; identical to SEQ ID NO: 41874

SEQ ID NO: 45432 - DNA, 663 bp, Bifidobacterium longum subsp. infantis; identical to SEQ ID NO: 41875

SEQ ID NO: 45433 - DNA, 3552 bp, Bifidobacterium longum subsp. infantis; identical to SEQ ID NO: 45415

SEQ ID NO: 45434 - DNA, 1626 bp, Bifidobacterium longum subsp. infantis; identical to SEQ ID NO: 41874

SEQ ID NO: 45435 - DNA, 663 bp, Bifidobacterium longum subsp. infantis; identical to SEQ ID NO: 41875

SEQ ID NO: 45436 - DNA, 3552 bp, Bifidobacterium longum subsp. infantis; identical to SEQ ID NO: 45415

SEQ ID NO: 45437 - DNA, 1470 bp, Xanthomonas citri pv. citri; identical to SEQ ID NO: 41638

SEQ ID NO: 45438 - DNA, 702 bp, Xanthomonas citri pv. citri; identical to SEQ ID NO: 43556

SEQ ID NO: 45439 - DNA, 4023 bp, Xanthomonas citri pv. citri; identical to SEQ ID NO: 41640

SEQ ID NO: 45440 - DNA, 1470 bp, Xanthomonas citri pv. citri
atgaagcaccaggcccgtatcgccggctatcggcaactgcgcgagcagccggtatggaaactgcttgccgccgaccacgcacccgaactgatcggcctgctgcagacggtgctgatggatggcgaacgccgcctgccttcggcggtgttgcacgcgcgtttgcagcgccagctcgacgccttgcgcgccgacgagctctcgcgtgaactgccgcgcaccgcacaggcgtatcttgcgcattggttggcacagggctggttggaacgccgcctgccggaaggcgcagccgaagaagaatacgaactctcgcgtgccgcgacccaggccatccgcttcatcgtcggcctgcgcgaaagcagcagcagcgccaccgaaagccgcctgtcgctggtgatccagcaactggtgcagttggccggacagaccgaagccgatccagagctccggctggccgcgctgcgcgacgaacgtgcgcgcatcgatgccgagatcgaacgcgtggcctccggccgcgtggcggcgctggacggcaagcgcgcgctggaacgtgcacgcgacctgatccatctctccgacgagctggccgaagatttccatcgcgtgcgcgacgacttcgagcagctcaaccgccaattccgcgagcgcatcatcgacgacgaaggcgcgcgcggcgacgtgctcgaacaactgttcgacggcgtggacgtgattgcagacagcgaagccgggcgcaccttcgaggcgttctggagcctgctcaacgacacccagcaaagcagccaactcgaccaggcgctggatgcgctgcttgcccgtgggtttgcccgcaagctcgatcgccgcgaacgcgccttcttgcgcgggctgaccggcacgctgctggagcgcggtggcgaggtgcacacggtgatgcagcatttcgcgcgcagcctgcgcggtttcgtgcaaagccgtgggtatctggaacagcgccggctcaatcaattgctcaagcaggcgcagggcgaagccttgcaattgcgcgacagcctgcacgccaccaccgccaccggctatacgcagccactcagcagcagccgcctgcgctcgttgtcgcaatggcggctgcacgatccacggctcacccaggtcgatggacgcgtgcaggccgccgacgcggccgagatctcgctggacagcgtgggcgatctggtcgcgcaatcggagatcgatgtgcgcagcctgcgcaacgacctgcatgagctgctcggccaacgcccgcggctgaccatcggcgacgccttgcaacaacgcccggccgtgcagggcctgggcagcgtgatcggatacctgtcgctgggcacgcgccacggcatggtgatcgaaggacagatggaaacggtgcaatgggaaggcagcgacggcgccgtgcggcgcgcacgcattcccttggtgtggtttacccgggagaaacgcaatgaactggtctga

SEQ ID NO: 45441 - DNA, 702 bp, Xanthomonas citri pv. citri; identical to SEQ ID NO: 43556

SEQ ID NO: 45442 - DNA, 4023 bp, Xanthomonas citri pv. citri
atgaattcccagtccaatctgtcgccggcgcagccgggtgcctccttgtttgccgagacgctcgccgagcaacgtgcgcagcagttccgcatgcggcgcttgcaggtgcacaactggggcaccttcaatgggctgaccgaagtgccaatcgcgcagaagggcttcctgttcgttgggcgttcgggctcgggcaagtccaccttgctggatgcgatgtcggcattgttgacgccgccgagcatcgtcgacttcaacgctgccgcgcgcgaagccgaacgcagtgggcgcgatcggagtctggtgtcgtatgtacgcggtgcgtgggccgatcagcaggacagcgcgtccggcgaaatcgccacgcaatacctgcgcaagggcgccacctggaccgcattggtgttggagtacgcgaacgcgcatggccagacggtgagcctgatccggttgttctggatcgccggcagcggtaacgcggcggccgatgtgcggcgtcactacatggtcgcgccacgccgtttcgacgtggcgaccgagctggatggcttcgatctcgacctgcgcaagctcaaggcgcgattgggcgatgaagttgcgcatttcgacggcttcgccggctatgccgaacgcttccggcatgcgctgggcatcggcaacgagatggcgctgcggctgttgcacaagacccagtcggccaagaacctgggcgatctcaatgcattcctgcgcggtttcatgctggacgagccgcggaccttcgaagcggccgaccggctggtggaagattttgccgagctcgatggcgcgcaccatgcggtggtcaccgcccggcgccaggtggaaaccctgacccctgcgcgcgagcaccacgcggcgctgatggcgctgcgccacagcgtcggcgagttgcgcgagttgcagctgggcgtggacagctaccgcgagcagcagcggctggccttgctggaggagcggctgcaggagctggacaaccaggaccgtggactggccggcgaagaaggccagcgccgcgaatcgctggataaccacgaacaaaaactggtcggcctggagcgcgagcagcgcgccgccgggggcgagcaggtcgaagaactggaacgcgaacgcgcacgcgtcgagcgcgagcgcgacgaacgcctgcgccgccgtgcacagatcgaacaggcctgccgccagctcggtaccgccctggcggccggcgccagcggctttgccgcgcagattgcgcatgcgcagaccgtgctggataacggcaagcacgacgccagcgcgctggatgacgccatcgccgagcgcatgggtgcgcggcgcgacgacgagcgccgctttgccgaaatccgcaccgaactggaggccctgaaacgcgcgccatcgagcatgccggcaccgatgcaggccttgcgcgcgcggctgtgcgaagacaccggcattgccgaggccgcgctgccgttcgttggcgagctggtgcaggtacgcgaggaccagacggcctggcgcggcgcgatcgagcgtgtgttgcacggctttgcgcaatcgctgctggtggacgagcggcattacgcgcaggtcagcgaatgggtcaaccgcacccatatcggtacgcgcctggtgtacttccgtgtgcgccgcaacgacgagctgcattcgcggcgggtcgatcccggcgcgctgcccggcaagctgcaattgcgcgagcacgcctttaccgaatggctgcgcaacgagctgacccgccgtttcgactacgcctgcgtggacaacgccgcagcgctgcgcaacgccgaccgcgcaatcacccgcgagggccaggtcaagcatcctggcgatcgctatgagaaggacgaccgccacgcggtcaacgaccgcaagcgttggctgctcggtcacgacaaccgcgacaagctcaaggtgttcgaacgcgaagcgcagacgctggctcagcgcatcgccagctgcgatgccgatgtggcagcgctgcgcaagcagcgtgagcaggaccaggaacgccaactggccgcgcacaccctggtggagcgcgactgggacgagatcgacgtcggccccaagctgcagcgcctgagcgatatcgacgaacagttggtgcagctgcgcgaaggcaacagcggcctgcgtgcgctcggccaggccatcgacaccgcacgcaccctgcgcgaacaggccaagcgcacctacgaagatgtgcggctggagcgcgcgcaactggcgcgcgagcgcgtgcggctcgaacagcagcaggcggcctgcgcgggccgcgcaggttccgccacgctcacgcccacccagttgcagggcttgcgggaacggcttgccgcattgacgccgctgtcgctggacaatctggaagcgcatttccgcgtggtcgaacgtggcctggccgagcagctggccgacagccagggccgcgacagccggctcagcgcgcagttgctggagtgcttccgcaagtattgccagcaatggcccgaagacagcggcgatttcaccgtgagccttgccagcgccgacgatttcctagcgcgtctggaccggctggaaagcgatggcctgccgcgtcacgagcatcgtttcttcgacctgttgcagacccagagcaagaacaacctgctggccttgcagcgccacaccgccgaagcccacaagggcatcaagcagcgcatggacgaggtcaacgccagtctggagcaggtgccgttcaatcgcgacaccgtgctgaccatcgaggtcggcgaccgccgcctggccgaggtgcaggaattccagcagcagttgcgcgcggtgctgtcgcatcaacagaccgaagaccgtgccctggccgaagcgcagttttccaccttgcgtgcgctggtggcacgcctgggcgcgcaggaaccggaggcacgccgctggcgcgaacaggtgctggatgtgcgcctgcatgtggagttcatcggtgcggaactggacgcacagacgcgcgcgcaggtggagatctaccgcagcggcgccggcaagtccggcggtcagcgccagaaactggcaaccacgtgcctggcggccgcgctgcgttaccagctcggcggcgaagacggcgaactgccgcgctactgcgcggtagtgctggacgaagccttcgacaaggccgacaacgaattcaccgcactggcgatgaatatcttcgagaacttcggcttccagatggtggtggccacgccgttgaagtcggtgatgaccttggagcccttcatcggtggtgcgtgctttgtcgaaatcagcggccgtcataactccggcgtgttgctgatcgaatacgacgagcaggcacagcgattgaagctgccggagcgctcgcgcggcgatgagccggcagttgccgatgccactgacgctgcgccgtcgatcgaggctgcggccgagtcagcaggagtgcagggcgctgcaagcgcagatggcatggcaaccaacggcgtcccaatgcacacggcatcgcctgcgacggaggagaccccgcccgcagcgcaggaaacgcagactggtcagcgcaagccggcagtcgcgacgacgagcaagcagaacaagaccgccaagaccgcatcttccacgcgcgctgcggcacagcctcaagcaaaacgcccgaagaaatcgccttcgcgcactcctgctctggctggcaagccggcatcggacaaacgcccagcgggcgtgccggcggtgtcgtcaggagtcgcatccaggtccaacgtgggcaagaccactcggtcttcaaaaacgccgggcaagccgattgcggccacaagcgcatccaacgccacatccaggaaggtcgccgccgcatctgcggcattgaaaactgccgcagccaagccacgtgcaacagccgcatcgactggtcagccagcgcgcggcgccggcaagacaacctcgacgcgcgcggtggctaaaccgtcaccggccacaacgcgcggcgccaaggcaggcgccccgcggtcgcgcggcaagcgctga

SEQ ID NO: 45443 - DNA, 1470 bp, Xanthomonas citri pv. citri; identical to SEQ ID NO: 41638

SEQ ID NO: 45444 - DNA, 702 bp, Xanthomonas citri pv. citri; identical to SEQ ID NO: 43556

SEQ ID NO: 45445 - DNA, 4023 bp, Xanthomonas citri pv. citri; identical to SEQ ID NO: 41640

SEQ ID NO: 45446 - DNA, 1470 bp, Xanthomonas citri pv. citri; identical to SEQ ID NO: 41638

SEQ ID NO: 45447 - DNA, 702 bp, Xanthomonas citri pv. citri; identical to SEQ ID NO: 43556

SEQ ID NO: 45448 - DNA, 4023 bp, Xanthomonas citri pv. citri; identical to SEQ ID NO: 41640

SEQ ID NO: 45449 - DNA, 1470 bp, Xanthomonas citri pv. citri
atgaagcaccaggcccgtatcgccggctatcggcaactgcgcgagcagccggtatggaaactgcttgccgccgaccacgcacccgaactgatcggcctgctgcagacggtgctgatggatggcgaacgccgcctgccttcggcggtgttgcacgcgcgtttgcagcgccagctcgacgccttgcgcgccgacgagctctcgcgtgaactgccgcgcaccgcacaggcgtatcttgcgcattggttggcacagggctggttggaacgccgcctgccggaaggcgcagccgaagaagaatacgaactctcgcgtgccgcgacccaggccatccgcttcatcgtcggcctgcgcgaaagcagcagcagcgccaccgaaagccgcctgtcgctggtgatccagcaactggtgcagttggccggacagaccgaagccgatccagagctccggctggccgcgctgcgcgacgaacgtgcgcgcatcgatgccgagatcgaacgcgtggcctccggccgcgtggcggcgctggacggcaagcgcgcgctggaacgtgcacgcgacctgatccatctctccgacgagctggccgaagatttccatcgcgtgcgcgacgacttcgagcagctcaaccgccaattccgcgagcgcatcatcgacgacgaaggcgcgcgcggcgacgtgctcgaacaactgttcgacggcgtggacgtgattgcagacagcgaagccgggcgcaccttcgaggcgttctggagcctgctcaacgacacccagcaaagcagccaactcgaccaggcgctggatgcgctgcttgcccgtgggtttgcccgcaagctcgatcgccgcgaacgcgccttcttgcgcgggctgaccggcacgctgctggagcgcggtggcgaggtgcacacggtgatgcagcatttcgcgcgcagcctgcgcggtttcgtgcaaagccgtgggtatctggaacagcgccggctcaatcaattgctcaagcaggcgcagggcgaagccttgcaattgcgcgacagcctgcacgccaccaccgccaccggctatacgcagccgctcagcagcagccgcctgcgctcgttgtcgcaatggcggctgcacgatccacggctcacccaggtcgatggacgcgtgcaggccgccgacgcggccgagatctcgctggacagcgtgggcgatctggtcgcgcaatcggagatcaatgtgcgcagcctgcgcaacgacctgcatgagctgctcggccaacgcccgcggctgaccatcggcgacgccttgcaacaacgcccggccgtgcagggcctgggcagcgtgatcggatacctgtcgctgggcacgcgccacggcatggtgatcgaaggacagatggaaacggtgcaatgggaaggcagcgacggcgccgtgcggcgcgcacgcattcccttggtgtggtttacccgggagaaacgcaatgaactggtctga

SEQ ID NO: 45450 - DNA, 702 bp, Xanthomonas citri pv. citri; identical to SEQ ID NO: 43556

SEQ ID NO: 45451 - DNA, 4023 bp, Xanthomonas citri pv. citri; identical to SEQ ID NO: 41640

SEQ ID NO: 45452 - DNA, 1470 bp, Xanthomonas citri pv. citri; identical to SEQ ID NO: 41638

SEQ ID NO: 45453 - DNA, 702 bp, Xanthomonas citri pv. citri; identical to SEQ ID NO: 43556

SEQ ID NO: 45454 - DNA, 4023 bp, Xanthomonas citri pv. citri
atgaattcccagtccaatctgtcgccggcgcagccgggtgcctccttgtttgccgagacgctcgccgagcaacgtgcgcagcagttccgcatgcggcgcttgcaggtgcacaactggggcaccttcaatgggctgaccgaagtgccaatcgcgcagaagggcttcctgttcgttgggcgttcgggctcgggcaagtccaccttgctggatgcgatgtcggcattgttgacgccgccgagcatcgtcgacttcaacgctgccgcgcgcgaagccgaacgcagtgggcgcgatcggagtctggtgtcgtatgtacgcggtgcgtgggccgatcagcaggacagcgcgtccggcgaaatcgccacgcaatacctgcgcaagggcgccacctggaccgcattggtgttggagtacgcgaacgcgcatggccagacggtgagcctgatccggttgttctggatcgccggcagcggtaacgcggcggccgatgtgcggcgtcactacatggtcgcgccacgccgtttcgacgtggcgaccgagctggatggcttcgatctcgacctgcgcaagctcaaggcgcgattgggcgatgaagttgcgcatttcgacggcttcgccggctatgccgaacgcttccggcatgcgctgggcatcggcaacgagatggcgctgcggctgttgcacaagacccagtcggccaagaacctgggcgatctcaatgcattcctgcgcggtttcatgctggacgagccgcggaccttcgaagcggccgaccggctggtggaagattttgccgagctcgatggcgcgcaccatgcggtggtcaccgcccggcgccaggtggaaaccctgacccctgcgcgcgagcaccacgcggcgctgatggcgctgcgccacagcgtcggcgagttgcgcgagttgcagctgggcgtggacagctaccgcgagcagcagcggctggccttgctggaggagcggctgcaggagctggacaaccaggaccgtggactggccggcgaagaaggccagcgccgcgaatcgctggataaccacgaacaaaaactggtcggcctggagcgcgagcagcgcgccgccgggggcgagcaggtcgaagaactggaacgcgaacgcgcacgcgtcgagcgcgagcgcgacgaacgcctgcgccgccgtgcacagatcgaacaggcctgccgccagctcggtaccgccctggcggccggcgccagcggctttgccgcgcagattgcgcatgcgcagaccgtgctggataacggcaagcacgacgccagcgcgctggatgacgccatcgccgagcgcatgggtgcgcggcgcgacgacgagcgccgctttgccgaaatccgcaccgaactggaggccctgaaacgcgcgccatcgagcatgccggcaccgatgcaggccttgcgcgcgcggctgtgcgaagacaccggcattgccgaggccgcgctgccgttcgttggcgagctggtgcaggtacgcgaggaccagaccgcctggcgcggcgcgatcgagcgtgtgttgcacggctttgcgcaatcgctgctggtggacgagcggcattacgcgcaggtcagcgaatgggtcaaccgcacccatatcggtacgcgcctggtgtacttccgtgtgcgccgcaacgacgagctgcattcgcggcgggtcgatcccggcgcgctgcccggcaagctgcaattgcgcgagcacgcctttaccgaatggctgcgcaacgagctgacccgccgtttcgactacgcctgcgtggacaacgccgcagcgctgcgcaacgccgaccgcgcaatcacccgcgagggccaggtcaagcatcctggcgatcgctatgagaaggacgaccgccacgcggtcaacgaccgcaagcgttggctgctcggtcacgacaaccgcgacaagctcaaggtgttcgaacgcgaagcgcagacgctggctcagcgcatcgccagctgcgatgccgatgtggcagcgctgcgcaagcagcgtgagcaggaccaggaacgccaactggccgcgcacaccctggtggagcgcgactgggacgagatcgacgtcggccccaagctgcagcgcctgagcgatatcgacgaacagttggtgcagctgcgcgaaggcaacagcggcctgcgtgcgctcggccaggccatcgacaccgcacgcaccctgcgcgaacaggccaagcgcacctacgaagatgtgcggctggagcgcgcgcaactggcgcgcgagcgcgtgcggctcgaacagcagcaggcggcctgcgcgggccgcgcaggttccgccacgctcacgcccacccagttgcagggcttgcgggaacggcttgccgcattgacgccgctgtcgctggacaatctggaagcgcatttccgcgtggtcgaacgtggcctggccgagcagctggccgacagccagggccgcgacagccggctcagcgcgcagttgctggagtgcttccgcaagtattgccagcaatggcccgaagacagcggcgatttcaccgtgagccttgccagcgccgacgatttcctagcgcgtctggaccggctggaaagcgatggcctgccgcgtcacgagcatcgtttcttcgacctgttgcagacccagagcaagaacaacctgctggccttgcagcgccacaccgccgaagcccacaagggcatcaagcagcgcatggacgaggtcaacgccagtctggagcaggtgccgttcaatcgcgacaccgtgctgaccatcgaggtcggcgaccgccgcctggccgaggtgcaggaattccagcagcagttgcgcgcggtgctgtcgcatcaacagaccgaagaccgtgccctggccgaagcgcagttttccaccttgcgtgcgctggtggcacgcctgggcgcgcaggaaccggaggcacgccgctggcgcgaacaggtgctggatgtgcgcctgcatgtggagttcatcggtgtggaactggacgcacagacgcgcgcgcaggtggagatctaccgcagcggcgccggcaagtccggcggtcagcgccagaaactggcaaccacgtgcctggcggccgcgctgcgttaccagctcggcggcgaagacggcgaactgccgcgctactgcgcggtagtgctggacgaagccttcgacaaggccgacaacgaattcaccgcactggcgatgaatatcttcgagaacttcggcttccagatggtggtggccacgccgttgaagtcggtgatgaccttggagcccttcatcggtggtgcgtgctttgtcgaaatcagcggccgtcataactccggcgtgttgctgatcgaatacgacgagcaggcacagcgattgaagctgccggagcgctcgcgcggcgatgagccggcagttgccgatgccactgacgctgcgccgtcgatcgaggctgcggccgagtcagcaggagtgcagggcgctgcaagcgcagatggcatggcaaccaacggcgtcccaatgcacacggcatcgcctgcgacggaggagaccccgcccgcagcgcaggaaacgcagactggtcagcgcaagccggcagtcgcgacgacgagcaagcagaacaagaccgccaagaccgcatcttccacgcgcgctgcggcacagcctcaagcaaaacgcccgaagaaatcgccttcgcgcactcctgctctggctggcaagccggcatcggacaaacgcccagcgggcgtgccggcggtgtcgtcaggagtcgcatccaggtccaacgtgggcaagaccactcggtcttcaaaaacgccgggcaagccgattgcggccacaagcgcatccaacgccacatccaggaaggtcgccgccgcatctgcggcattgaaaactgccgcagccaagccacgtgcaacagccgcatcgactggtcagccagcgcgcggcgccggcaagacaacctcgacgcgcgcggtggctaaaccgtcaccggccacaacgcgcggcgccaaggcaggcgccccgcggtcgcgcggcaagcgctga

SEQ ID NO: 45455 - DNA, 1470 bp, Xanthomonas citri pv. citri; identical to SEQ ID NO: 41638

SEQ ID NO: 45456 - DNA, 702 bp, Xanthomonas citri pv. citri; identical to SEQ ID NO: 43556

SEQ ID NO: 45457 - DNA, 4023 bp, Xanthomonas citri pv. citri; identical to SEQ ID NO: 45454

SEQ ID NO: 45458 - DNA, 1470 bp, Xanthomonas citri pv. citri; identical to SEQ ID NO: 41638

SEQ ID NO: 45459 - DNA, 702 bp, Xanthomonas citri pv. citri
atgaactggtctgaggacactggcctatacaccgacgaggacaccggggcgccggccatcgacgaccgcatgccgatggcgcaaacatccagtgccgagccgcgcggcgagctgtttttgggtgacaccggcacgctgccgttcgatgcgcggcgtgcgctgtgccagttgctggcagggcccagcatcgatgcgcaacgtcacggcgcgctgtggccggcgttgttgcgcaacgaggtggcgatccgccaggtgctgtgcgaactgtttctggagttggtgctcgaccgcgagggcggggtggcctttacccgtcaggccgacaccgcagagctggaatcgcccacgctgctgcgcagtgcgccgctgacgtttatcgagtcggtgttgctgctgttcctgcgccagcaactggccgaggccgacacgcgcggcgagcgtgcagtggtggacgaggcgcagttggtggaagccttgtcggtgtacgaaaagaacgtatccaccgatcgggcgggcttcgcgcggcgggtgatgacggcgatcggcaagatgcgcgacaaccagttgctgtcgcgcttgcgcggcagcgaggagcgctatgaagtgtcgccggtgttgaagctgttattttcggcagaagatgtgcaggccttggtggtggcgtatcgggagctccgtgagggcgaggttgcgctggattga

SEQ ID NO: 45460 - DNA, 4023 bp, Xanthomonas citri pv. citri
atgaattcccagtccaatctgtcgccggcgcagccgggtgcctccttgtttgccgagacgctcgccgagcaacgtgcgcagcagttccgcatgcggcgcttgcaggtgcacaactggggcaccttcaatgggctgaccgaagtgccaatcgcgcagaagggcttcctgttcgttgggcgttcgggctcgggcaagtccaccttgctggatgcgatgtcggcattgttgacgccgccgagcatcgtcgacttcaacgctgccgcgcgcgaagccgaacgcagtgggcgcgatcggagtctggtgtcgtatgtacgcggtgcgtgggccgatcagcaggacagcgcgtccggcgaaatcgccacgcaatacctgcgcaagggcgccacctggaccgcattggtgttggagtacgcgaacgcgcatggccagacggtgagcctgatccggttgttctggatcgccggcagcggtaacgcggcggccgatgtgcggcgtcactacatggtcgcgccacgccgtttcgacgtggcgaccgagctggatggcttcgatctcgacctgcgcaagctcaaggcgcgattgggcgatgaagttgcgcatttcgacggcttcgccggctatgccgaacgcttccggcatgcgctgggcatcggcaacgagatggcgctgcggctgttgcacaagacccagtcggccaagaacctgggcgatctcaatgcattcctgcgcggtttcatgctggacgagccgcggaccttcgaagcggccgaccggctggtggaagattttgccgagctcgatggcgcgcaccatgcggtggtcaccgcccggcgccaggtggaaaccctgacccctgcgcgcgagcaccacgcggcgctgatggcgctgcgccacagcgtcggcgagttgcgcgagttgcagctgggcgtggacagctaccgcgagcagcagcggctggccttgctggaggagcggctgcaggagctggacaaccaggaccgtggactggccggcgaagaaggccagcgccgcgaatcgctggataaccacgaacaaaaactggtcggcctggagcgcgagcagcgcgccgccgggggcgagcaggtcgaagaactggaacgcgaacgcgcacgcgtcgagcgcgagcgcgacgaacgcctgcgccgccgtgcacagatcgaacaggcctgccgccagctcggtaccgccctggcggccggcgccagcggctttgccgcgcagattgcgcatgcgcagaccgtgctggataacggcaagcacgacgccagcgcgctggatgacgccatcgccgagcgcatgggtgcgcggcgcgacgacgagcgccgctttgccgaaatccgcaccgaactggaggccctgaaacgcgcgccatcgagcatgccggcaccgatgcaggccttgcgcgcgcggctgtgcgaagacaccggcattgccgaggccgcgctgccgttcgttggcgagctggtgcaggtacgcgaggaccagacggcctggcgcggcgcgatcgagcgtgtgttgcacggctttgcgcaatcgctgctggtggacgagcggcattacgcgcaggtcagcgaatgggtcaaccgcacccatatcggtacgcgcctggtgtacttccgtgtgcgccgcaacgacgagctgcattcgcggcgggtcgatcccggcgcgctgcccggcaagctgcaattgcgcgagcacgcctttaccgaatggctgcgcaacgagctgacccgccgtttcgactacgcctgcgtggacaacgccgcatcgctgcgcaacgccgaccgcgcaatcacccgcgagggccaggtcaagcatcctggcgatcgctatgagaaggacgaccgccacgcggtcaacgaccgcaagcgttggctgctcggtcacgacaaccgcgacaagctcaaggtgttcgaacgcgaagcgcagacgctggctcagcgcatcgccagctgcgatgccgatgtggcagcgctgcgcaagcagcgtgagcaggaccaggaacgccaactggccgcgcacaccctggtggagcgcgactgggacgagatcgacgtcggccccaagctgcagcgcctgagcgatatcgacgaacagttggtgcagctgcgcgaaggcaacagcggcctgcgtgcgctcggccaggccatcgacaccgcacgcaccctgcgcgaacaggccaagcgcacctacgaagatgtgcggctggagcgcgcgcaactggcgcgcgagcgcgtgcggctcgaacagcagcaggcggcctgcgcgggccgcgcaggttccgccacgctcacgcccacccagttgcagggcttgcgggaacggcttgccgcattgacgccgctgtcgctggacaatctggaagcgcatttccgcgtggtcgaacgtggcctggccgagcagctggccgacagccagggccgcgacagccggctcagcgcgcagttgctggagtgcttccgcaagtattgccagcaatggcccgaagacagcggcgatttcaccgtgagccttgccagcgccgacgatttcctagcgcgtctggaccggctggaaagcgatggcctgccgcgtcacgagcatcgtttcttcgacctgttgcagacccagagcaagaacaacctgctggccttgcagcgccacaccgccgaagcccacaagggcatcaagcagcgcatggacgaggtcaacgccagtctggagcaggtgccgttcaatcgcgacaccgtgctgaccatcgaggtcggcgaccgccgcctggccgaggtgcaggaattccagcagcagttgcgcgcggtgctgtcgcatcaacagaccgaagaccgtgccctggccgaagcgcagttttccaccttgcgtgcgctggtggcacgcctgggcgcgcaggaaccggaggcacgccgctggcgcgaacaggtgctggatgtgcgcctgcatgtggagttcatcggtgtggaactggacgcacagacgcgcgcgcaggtggagatctaccgcagcggcgccggcaagtccggcggtcagcgccagaaactggcaaccacgtgcctggcggccgcgctgcgttaccagctcggcggcgaagacggcgaactgccgcgctactgcgcggtagtgctggacgaagccttcgacaaggccgacaacgaattcaccgcactggcgatgaatatcttcgagaacttcggcttccagatggtggtggccacgccgttgaagtcggtgatgaccttggagcccttcatcggtggtgcgtgctttgtcgaaatcagcggccgtcataactccggcgtgttgctgatcgaatacgacgagcaggcacagcgattgaagctgccggagcgctcgcgcggcgatgagccggcagttgccgatgccactgacgctgcgccgtcgatcgaggctgcggccgagtcagcaggagtgcagggcgctgcaagcgcagatggcatggcaaccaacggcgtcccaatgcacacggcatcgcctgcgacggaggagaccccgcccgcagcgcaggaaacgcagactggtcagcgcaagccggcagtcgcgacgacgagcaagcagaacaagaccgccaagaccgcatcttccacgcgcgctgcggcacagcctcaagcaaaacgcccgaagaaatcgccttcgcgcactcctgctctggctggcaagccggcatcggacaaacgcccagcgggcgtgccggcggtgtcgtcaggagtcgcatccaggtccaacgtgggcaagaccactcggtcttcaaaaacgccgggcaagccgattgcggccacaagcgcatccaacgccacatccaggaaggtcgccgccgcatctgcggcattgaaaactgccgcagccaagccacgtgcaacagccgcatcgactggtcagccagcgcgcggcgccggcaagacaacctcgacgcgcgcggtggctaaaccgtcaccggccacaacgcgcggcgccaaggcaggcgccccgcggtcgcgcggcaagcgctga

SEQ ID NO: 45461 - DNA, 1470 bp, Xanthomonas citri pv. citri; identical to SEQ ID NO: 41638

SEQ ID NO: 45462 - DNA, 702 bp, Xanthomonas citri pv. citri; identical to SEQ ID NO: 43556

SEQ ID NO: 45463 - DNA, 4023 bp, Xanthomonas citri pv. citri
atgaattcccagtccaatctgtcgccggcgcagccgggtgcctccttgtttgccgagacgctcgccgagcaacgtgcgcagcagttccgcatgcggcgcttgcaggtgcacaactggggcaccttcaatgggctgaccgaagtgccaatcgcgcagaagggcttcctgttcgttgggcgttcgggctcgggcaagtccaccttgctggatgcgatgtcggcattgttgacgccgccgagcatcgtcgacttcaacgctgccgcgcgcgaagccgaacgcagtgggcgcgatcggagtctggtgtcgtatgtacgcggtgcgtgggccgatcagcaggacagcgcgtccggcgaaatcgccacgcaatacctgcgcaagggcgccacctggaccgcattggtgttggagtacgcgaacgcgcatggccagacggtgagcctgatccggttgttctggatcgccggcagcggtaacgcggcggccgatgtgcggcgtcactacatggtcgcgccacgccgtttcgacgtggcgaccgagctggatggcttcgatctcgacctgcgcaagctcaaggcgcgattgggcgatgaagttgcgcatttcgacggcttcgccggctatgccgaacgcttccggcatgcgctgggcatcggcaacgagatggcgctgcggctgttgcacaagacccagtcggccaagaacctgggcgatctcaatgcattcctgcgcggtttcatgctggacgagccgcggaccttcgaagcggccgaccggctggtggaagattttgccgagctcgatggcgcgcaccatgcggtggtcaccgcccggcgccaggtggaaaccctgacccctgcgcgcgagcaccacgcggcgctgatggcgctgcgccacagcgtcggcgagttgcgcgagttgcagctgggcgtggacagctaccgcgagcagcagcggctggccttgctggaggagcggctgcaggagctggacaaccaggaccgtggactggccggcgaagaaggccagcgccgcgaatcgctggataaccacgaacaaaaactggtcggcctggagcgcgagcagcgcgccgccgggggcgagcaggtcgaagaactggaacgcgaacgcgcacgcgtcgagcgcgagcgcgacgaacgcctgcgccgccgtgcacagatcgaacaggcctgccgccagctcggtaccgccctggcggccggcgccagcggctttgccgcgcagattgcgcatgcgcagaccgtgctggataacggcaagcacgacgccagcgcgctggatgacgccatcgccgagcgcatgggtgcgcggcgcgacgacgagcgccgctttgccgaaatccgcaccgaactggaggccctgaaacgcgcgccatcgagcatgccggcaccgatgcaggccttgcgcgcgcggctgtgcgaagacaccggcattgccgaggccgcgctgccgttcgttggcgagctggtgcaggtacgcgaggaccagacggcctggcgcggcgcgatcgagcgtgtgttgcacggctttgcgcaatcgctgctggtggacgagcggcattacgcgcaggtcagcgaatgggtcaaccgcacccatatcggtacgcgcctggtgtacttccgtgtgcgccgcaacgacgagctgcattcgcggcgggtcgatcccggcgcgctgcccggcaagctgcaattgcgcgagcacgcctttaccgaatggctgcgcaacgagctgacccgccgtttcgactacgcctgcgtggacaacgccgcagcgctgcgcaacgccgaccgcgcaatcacccgcgagggccaggtcaagcatcctggcgatcgctatgagaaggacgaccgccacgcggtcaacgaccgcaagcgttggctgctcggtcacgacaaccgcgacaagctcaaggtgttcgaacgcgaagcgcagacgctggctcagcgcatcgccagctgcgatgccgatgtggcagcgctgcgcaagcagcgtgagcaggaccaggaacgccaactggccgcgcacaccctggtggagcgcgactgggacgagatcgacgtcggccccaagctgcagcgcctgagcgatatcgacgaacagttggtgcagctgcgcgaaggcaacagcggcctgcgtgcgctcggccaggccatcgacaccgcacgcaccctgcgcgaacaggccaagcgcacctacgaagatgtgcggctggagcgcgcgcaactggcgcgcgagcgcgtgcggctcgaacagcagcaggcggcctgcgcgggccgcgcaggttccgccacgctcacgcccacccagttgcagggcttgcgggaacggcttgccgcattgacgccgctgtcgctggacaatctggaagcgcatttccgcgtggtcgaacgtggcctggccgagcagctggccgacagccagggccgcgacagccggctcagcgcgcagttgctggagtgcttccgcaagtattgccagcaatggcccgaagacagcggcgatttcaccgtgagccttgccagcgccgacgatttcctagcgcgtctggaccggctggaaagcgatgccctgccgcgtcacgagcatcgtttcttcgacctgttgcagacccagagcaagaacaacctgctggccttgcagcgccacaccgccgaagcccacaagggcatcaagcagcgcatggacgaggtcaacgccagtctggagcaggtgccgttcaatcgcgacaccgtgctgaccatcgaggtcggcgaccgccgcctggccgaggtgcaggaattccagcagcagttgcgcgcggtgctgtcgcatcaacagaccgaagaccgtgccctggccgaagcgcagttttccaccttgcgtgcgctggtggcacgcctgggcgcgcaggaaccggaggcacgccgctggcgcgaacaggtgctggatgtgcgcctgcatgtggagttcatcggtgtggaactggacgcacagacgcgcgcgcaggtggagatctaccgcagcggcgccggcaagtccggcggtcagcgccagaaactggcaaccacgtgcctggcggccgcgctgcgttaccagctcggcggcgaagacggcgaactgccgcgctactgcgcggtagtgctggacgaagccttcgacaaggccgacaacgaattcaccgcactggcgatgaatatcttcgagaacttcggcttccagatggtggtggccacgccgttgaagtcggtgatgaccttggagcccttcatcggtggtgcgtgctttgtcgaaatcagcggccgtcataactccggcgtgttgctgatcgaatacgacgagcaggcacagcgattgaagctgccggagcgctcgcgcggcgatgagccggcagttgccgatgccactgacgctgcgccgtcgatcgaggctgcggccgagtcagcaggagtgcagggcgctgcaagcgcagatggcatggcaaccaacggcgtcccaatgcacacggcatcgcctgcgacggaggagaccccgcccgcagcgcaggaaacgcagactggtcagcgcaagccggcagtcgcgacgacgagcaagcagaacaagaccgccaagaccgcatcttccacgcgcgctgcggcacagcctcaagcaaaacgcccgaagaaatcgccttcgcgcactcctgctctggctggcaagccggcatcggacaaacgcccagcgggcgtgccggcggtgtcgtcaggagtcgcatccaggtccaacgtgggcaagaccactcggtcttcaaaaacgccgggcaagccgattgcggccacaagcgcatccaacgccacatccaggaaggtcgccgccgcatctgcggcattgaaaactgccgcagccaagccacgtgcaacagccgcatcgactggtcagccagcgcgcggcgccggcaagacaacctcgacgcgcgcggtggctaaaccgtcaccggccacaacgcgcggcgccaaggcaggcgccccgcggtcgcgcggcaagcgctga

SEQ ID NO: 45464 - DNA, 1470 bp, Xanthomonas citri pv. citri; identical to SEQ ID NO: 41638

SEQ ID NO: 45465 - DNA, 702 bp, Xanthomonas citri pv. citri; identical to SEQ ID NO: 43556

SEQ ID NO: 45466 - DNA, 4023 bp, Xanthomonas citri pv. citri; identical to SEQ ID NO: 45454

SEQ ID NO: 45467 - DNA, 1452 bp, Geoalkalibacter subterraneus
atgtctctcgattacaccactcttgaccttctgcgcaaaaaccatcccgcctggcgactgctgcgttcagatcatgcccctctggtggcgagctttctgcaccgggtttttatcgcgcccaacgtgcgcaccatggcgcaggccgatctggccgaagcgcttgaggacgagcttttcgctctgcgcgaccggtatggagaagaggcgtttccgcgttcggccgccgcctatctcaacgactgggcagataacgagaagggctggctgcgtaaattctatcctgccggctcagatgaacctcatttcgacctgactccggcgacggaaaaagccatcgcctggctggagagcctgaccgagcgcgctttcgtggggaccgagtcgcggctgctgaccctgtttgagctgctgcggcagatgagtgaaggcagccagaccgatcccgaaacgcgcatcgcggagttgcacaagcgccggaacgaaatcgacgccgaaattgcccgcatcctcgatggcgatatcccgctgttggatgcaaccgccttgaaggatcgctttcagcagtttctgcagctcgcccgcgaactgctcaccgactttcgagaggtggagcacaatttccgcactctcgatcggcgggtgcgcgagcgcatcgccctgtgggagggcgccaaaggtacgctgctcgaagagatcatgggcgagcgcgatgccatcgccgattccgaccagggcaaaagctttcgtgccttctgggattttctcatgtcccagcgtcgccaggaagagttgagtcatctgctcgaacaggttctcgaacttgagcccattgccgagatgcaccctgatgcgcgcctgcggcgggtgcattacgactggctggaagccggcgaacatactcagcgtaccgttgcgcgcctgtcacagcagctgcggcgttttctcgacgaccaagcctggctggagaatcgccgcatcatggatatcctgcacgacattgaggggcgcgccttggcggtgagagagactccaccccctcgcgatttcatggagctggcggagagcgctccacgcgttgatctgccttttgaacgccccctttacagcccgccggtcaaaccggtgattgccgatgtggagctggaaagcggtgaaacggacattgatacggcggccctttatgctcaggttgtggtggatcgcgccgagctgctgcgcaacctgcgccaggctctgcaggagcgctcccaggttactctcggcgaggtcgttgcccgccatcccctgcgccatggcctggcggagctgctgacctatctgcatctggccggcgactggcccgaagctgtggttgacgaggagcagcaggatctgatcgaatggcgcaccgaagagggaacggtccgtcgcgcccgtctgccgcgcatagtctttttgaggaagaacggatga

SEQ ID NO: 45468 - DNA, 3366 bp, Geoalkalibacter subterraneus
atgagtgaaaccctggagcttgaattcattggcgacgacaaactggccggattccgactgcagcgcctggaggtcctgaactgggggaccttcgactccaaggtgtggacgctgaacctcgatggcaggaattcgctgctgacgggcgatatcggttcggggaaatcgaccctggtggatgccgtcaccactctgctggtgccgagtcagcgcatctcctacaacaaggccgccggggccgatgcccgagagcgctccctgcgctcctatgtgctgggctactacaagtcggagcgtcaggataccctcggcagcgttaagccggtggccctgcgtaaccacaacagtttttcggtcattctgggcgtattccacaacgccggttacaacaaaacggtgaccctggcccaggtgttctggatgaaggatgttcaggggcagccggcccgtttttatgtcgcctgtgagcgcgatctttccatctctgccgatttttcccgcttcgggaccgatatcgcgcagctgcgcaaacgtctgcggggcgacaaagcggagttgtttgacagcttccccccttacggagcctggttccggcggcgtttcggcatcgacaacgagcaggctcttgatctgttcctgcagaccgtttcccttaaatcggtgggcaatctcacggatttcgtccgcaatcatatgcttgagcccttcgatgtggcgccgcgcatcagcgcgttgatcggccatttcgacgacctcaaccgggcccacgaagctgttcttaaagccaagcgccaggtggagatgctcgagcccctggtggcggactgcgaacggcacggcgagatggtgcagtcccgggacaacctgcgcgcctgccgggaggggctgcgcccctggtttgccggcctcaagatggcactgctggacaaacgcctcgaatccctggatgaagagcttcagcgtcaccagactcgcattgcccgtctggaagtacagcgtcacgagcagcaggtgcgggaacgtgagttgcgccgtaccattgccgagcagggtggcgatcgcattgagacccttgccgaagaaatccgccgcaaacagggtgagttgcaacgctgtcggcataaagccgaacgctatgctgaattgatgcagggactggaactggtcccggccgacaacgaagaggattttctggttcgtcgtcgccagtgtgccgacctgcgtgagcagaccctggagaatgaagcacggattcagaatgacctcaatgaagctggagtctccttcgcccagctgcgcagcgagcacgaaaagctgcaggaggagatccgcggtctgaaggcgcgccgcagcaacattgacgaaaagcaggtcgcggtgcgtcgcgccctgtgccgggcccttgatcttgccgaagacgatatgccttttgccggcgagttgctgcaggtccgtgaagatgagcgtgactgggagggagccgtcgagcgcctgctgcgtaattttggactgtctctgctggtgcccgaccagcactatgcgcgcgtggccgaatgggtcgatgcgacccacctgcgtgggcggctggtttactttcgggtacgcgaaagggcgcctgcggagctgccgtccctgcatccccattctctcgcccgcaagattctggtcaagcctgattcagccttttacgactggctcgagcgcgaggtggcccatcgcttcgatctggcctgctgcaacgaccaggagcagttccggcgcgagacaaaagccatcacccgcgccggccagatcaaggcaccgggggagcgccacgaaaaagacgaccggcaccggatcgacgaccgcagccgctatgtgctgggctggagcaacgccgccaaaattgccgccctggaagaaaaagcccgtcttctggaaatggaactgacagaaacgggcggacatatctcctctctgcagaaggagcagaatgttctcaaagaacgcctcgggctgttatccaagctcgatgaatatcctgattttggcgagctggactggcgtcctctggcgctcgagatctcccgcctggaagatgaaaaagccgaccttgaagctgcctctgacgttctgaaaaccctcgccgaccagctgcaggaggtggaaaaggcgctggctgaaacggatcagcacctcaaggatcgctacgacaaacgctccaggaccgaacaaaagcgcagcgatgcccaggaactgcgacgccaggccgaagccgtgcatcaggatgcgactccggatcagaatgcgcagttcgatcaccttgccgtattgcgcgatgaggcgctgggcgatcagcagctcacggtggaatcctgcgacaaccgcgagcgcgatatgcgcgattggctgcaggcgcgcatcgatgccgaagacaagaagctgggacgcctgcgggataaaatcatcgacgccatgcgccagtttcagaccgattatcccctggaaacccaggaggtggatgtggcagtggaagccgccggcgactatcgcgccatgctcgatcagttgcaggccgatgatctgccccgtttcgaggcgcgtttcaaggagctgctcaacgaaaataccatccgcgaggtggccaattttcaatcgcagctctcccgggagcgtgaaaccatcaaggagcgcatcgcccgtatcaacgaatcgctgattcagatcgattacaaccccggtcgctatatcgtgctggagacccaggccgctcccgatgtggatatccgcgattttcaggccgaattgcgcgcctgtacggaaggggcgctgaccggctccaacgacgcccagtattccgagaacaaatttctgcaggtgcggcgcatcatcgagcgcttccgcggacgtgaggggcagaccgagcaggatcggcgctggaccgccaaggtcaccgacgtgcgcaactggttcgtgtttgccgccagcgagcgctggcgcgaagacgacaacgagtatgaacattacgccgattcagggggcaagtcgggcgggcagaaggaaaagctcgcctacactgtgctggcggcaagccttgcttaccagttcggcctcgaatggggtgcggtgcgctcgcgctctttccgcttcgtggtgattgatgaggccttcgggcgcggttccgatgagtcggctcagtacggactcaaacttttcgctcagctcaacctgcagctgctcatcgtcacgccgttgcagaagatccacatcatcgagcccttcgtcgccggcgtcggttttgtgcataacgaaaacggccgcacctccgtgctgcgcaatctgagtatcgaagaataccgggccgagaagcagaggcagcaggcatga

SEQ ID NO: 45469 - DNA, 1176 bp, Geoalkalibacter subterraneus
atgagctggacgacccccgccgatgtgcgtgcccaggtgagaaggctctgggaccgcggcctgctgccggcgcagctggtgggcggagaggagcttttcccgcggcgaatcactctcaaggggcccgggtccaaagagctggcggaacgttttgacgaagtgcgcaactggattgcgcgccttgacggcgaggcgaagcattatcggctggtatggcgtaacgtcaatcaccgcattcttggtgccaatgccgtcccggcggaaatctgggtagattccctggacgacgctctgagcctgactggaagacagaaggacgcgcagcgtcttgcggccatcgtggaagaaacccggaaatctctgccgcagctgatcccctggctgatcaagcgaccgctgcgggcgctggaactggccgatgactggacccgcctgctggcggttgcccattggctgcgggagcatccccgccctgggatttatctgcgccagatcgatcttgcgggtgtccacaccaagctgatcgaaagacatcgcggcgttttgtccgaattgctcgatctggttctgcccgcagacgccattgatccttctcacagcggtgtcgcggggttctgtcgccgctacggctttcgggataaacctctacgggtgcgttttcgtgtgcttgattccagcctccgtctccttccgggccaggaggagcaggacatcaccctgacacagcggtcattctcgtctcttgagttgccggtctcgaaagtttttatcaccgaaaacgagatcaacttcctggcttttacggaggttcccgaggcgctggtgattttcggcgccggatacggtttcgaaaacctcgcctccgccccctggctgaatgagaaagagatccactattggggcgatatcgatacccacggctttgctattcttaatcagttgcgcaggtttttcccccacgctcgatccttcctcatggaccgccggacctttctgggccatcgacggctctgggggcaggagatgaagcctgaaacggcaaacctcgataagttaaacaaagaagaagccgccctctacgatcagttgcgcgacaatcattggggagagcggattcggctggaacaggagagggtcgggttcgattatctgtgtggtgccctggactgtctgtga

SEQ ID NO: 45470 - DNA, 1470 bp, Xanthomonas fuscans subsp. fuscans
atgaagcaccaggcccgtatcgccggctatcggcaactgcgcgagcagccggtatggaaactgcttgccgccgaccacgcacccgaactgatcggcctgctgcagacggtgctgatggacggcgaacgccgcctgccttcggccgtgttgcacgagcgtttgcagcgccagctcgacgccttgcgcgccgacgagctctcgcgcgaactgccgcgcaccgcacaggcgtatctggcgcattggttggcacagggctggctggaacgccgcctgcccgaaggcgcagccgaagaagaatacgaactctcgcgtgccgcgacccaggccatccgcttcatcgtcggcctgcgcgaaagcagcagcagcgccaccgaaagccgcctgtcgctggtgatccagcaactggtgcagttggccggacagaccgaagccgatccagagctccggctggccgcgctgcgcgacgaacgtgcgcgcatcgatgccgagatcgaacgcgtggcttccggccgcgtggcggcgctggacggcaaacgcgcgctggaacgtgcacgcgacctgatccatctctccgacgagctggccgaagatttccatcgcgtgcgcgacgatttcgagcagctcaaccgccaattccgcgagcgcatcatcgacgacgaaggcgcgcgcggcgatgtgctcgaacaactgttcgacggcgtggatgtgattgcagacagcgaagccgggcgcactttcgaggcgttctggagtctgctcaacgacacccagcaaagcagccagctcgaccaggcgctggatgcgctgcttgcccgtgggtttgcgcgcaagctcgatcgtcgcgatcgcgcctttttgcgtgggctgaccggcacgctgctggagcgcggtggcgaggtgcacacggtgatgcagcatttcgcgcgcagcctgcgcggtttcgtgcaaagccgtgggtatctggaacagcgccggctcaatcaattgctcaagcaggcgcagggcgaagccttgcaattgcgcgacagcctgcacgccaccaccgccaccggctatacgcaggcgctcagcagcagccgcctgcgctcgttgtcgcaatggcggctgcacgatccacggctcacccaggtcgatggacgcgtgcaggccgccgacgcggccgagatctcgctggacagcgtgggcgatctggtggcgcaatcggagatcgatgtgcgcagcctgcgcaacgacctgcatgagctgctcggccaacgcccgcggctgacgatcggcgacgccttgcaacaacgcccggccgtgcagggcctgggcagcgtgatcggatacctgtcgctgggcacgcgccacggcatggtgatcgaaggacagatggaaacggtgcaatgggaaggcagcgacggcgccgtgcggcgcgcgcgcattcccttggtgtggtttacccgggagaaacgcaatgaactggtctga

SEQ ID NO: 45471 - DNA, 702 bp, Xanthomonas fuscans subsp. fuscans; identical to SEQ ID NO: 45048

SEQ ID NO: 45472 - DNA, 4023 bp, Xanthomonas fuscans subsp. fuscans; identical to SEQ ID NO: 45049

SEQ ID NO: 45473 - DNA, 1488 bp, Corynebacterium glutamicum
atgaccgttgtatcgcacgcgcttgggtttaagcgatttaggcaggaatccctagagctgtctttgttgcgcagtgacaactttccggtggtgcttgccgtggtggcgcagtattttccgcagggggctatcgctaagccagcctcagagctgtatcagctgctcagcgatgattttcgagtgctgcgggaagaaggatttgagctgccgaaaagcccgtcggattatgtcagcgattgggtgaagtcccggtggtttgtgcgtcgtcctggtagttcgcagactggtgaaaccgtagagccgagtgaagagctgttggcagtgctggattcggtacagcggtgggataacccgcatcgaagcatttcggcgtctcgaattgaatcgttgacgcaagcgcttcagactttggcgttggaatcagatcccagcacggcgaaacgtttggctgagttagagcgtgaacgcgacaggatcgaacgccagattgaagcggttcacgctggtgaatttgaggtcctcaccactgtgcagataggtgatcgggtagcggatatcttggatctggcggcttctattcccgcagattttgccagggttcggcatgagctgagcgatttgaatcggaagctgcgcaggcagttgcttgatcctgaagactcccgtggtgatgttctagaagagatcttcaggggagttgatctgattggggattccgatgcggggcgcagcttcaatagtttctttgatgttttgttggatcgcgagcgttcaagtctgattgatcgatggatcagagaagttctaggacgcgatgaggctattgatctggatgcaaaattacggacagggctgtaccgaattttccgggatatggaggatgccagcttcgaggtcaacggggaaatgacaggactggctcgaagtttgcgtcactatgtcactaccgaggagttcgcagagagccgacgcatgattcagttgcttcgcgatacccgcagtgccgcagctaaggccgccgaggctggtgaagtgacctcgctcaatcatatggacactccactcgtgcgcatcggtatggatgtgcgctccattgctggattgaagttgaaaaatccaggtgaagaacgcgtcgaggatctgccggagccagttgaagagcaagaactagacacggaagtcttgctggaacagattcgagcaagcgagattgactttgaagaattggaagaagcagttggtttagttcttgccgagcaatcgcatgccacgatcaccgaggtactggaacatttcccagcaacgcaaggtctcgccagcattgttggcttgttgtacctagcgatgcgtgatggtgttcccacaggtcacgcgcaaatagtggagtgggaaagtgaatctgtcctgcatcggcgacggattacgggatggcaatttatcaggggtttaaacagtgaagatttggcagaaagcgagatgaataaatga

SEQ ID NO: 45474 - DNA, 639 bp, Corynebacterium glutamicum; identical to SEQ ID NO: 42725

SEQ ID NO: 45475 - DNA, 3336 bp, Corynebacterium glutamicum
gtgaccagcgaacaagctttagatcctatccacccaggtcagttccgtctttctcggattcagttgatcaactggggaaccttccacggaacggtggacattcctgtgaccagggaaggaatcttagttaccggtggttcgggatccggaaaatccacgctgattgatgcgatcacggcggtattgcttccgcaaggaaagctgaggtttaactctgccgcacaagctaatactccgcggaataagggacgcagtttggttacctatatccgtggcgcttggcgtgcgcaggaggatccgctgcaggatcagattgtttctacctaccttcgccctcgtgctacttattcactggttggattgacttattccaacggtgaaggcgtcgagcacaccttggtggctattttctatctgaaatcgggacacaatttaacctccgatatctcttcatattatggtgtgtttcccgttgatcaagacatcaatgcgctgctggatttcctgaaagagggcatcgataaacgccagatcagagccgctttcaaggacgccacctttagtgagcagcattctgtattctccggcaggtttagaagccgtttggggatctccagtgaggaagctttgctgttgttgcaccgcgcacagtcggcgaaagatcttcaaagtctggacgatctgtttcgggattacatgctggtggaaccggatacgttcagcattgccaaaactgccgtggaacaattccaagaccttgaaggtgcttatgagcaggtcgaagatattaaacggcagatccacaccctggatcctttggtgcagctgaagaatcggcgagagaaagcgcaacagtccaaagatcatgccaatgcactgaagaaggcgctgccgactgtcgggaatcgcattaagaaggaagaacaagaaacgctggttcgacaatttactgtcgagcaaacgcaggcgaagtcgaaggtggagtccgccaaaattgagacagatcgtgcccgcgaaatggaaaccctcgcgcacgataacatcaaacaaattgtgggggcgcagcatggaattttgagtgcgaagagggagggggccgtcgataagcgaagaacaattagcgctgcgcgtgctggcctggacgcattggttaaggggctgggcggtacggcgccggaatcggcggaggagcttttggagctcaacaacgctgcgcggctgaccgtggatgagtatccggcggcgagggaagcgcttgaatctgcaggtcagaggaatgttgaggaccgaacccgtgcggttgatgagttcaaagcggcggatcaagagctgtcttctttgagtaaaggcagcagtaatattgagtaccgtttgctgcaggtgcgggaaaatttgtgtcaggatttgggcgtgagcccgcgggatatgccctttgccggtgagctgattgatccgaataattcggaatgggaacccgttgtgcagcgtctgttgggcagttttgctgcggaaatgttggttcctcatgggttgttgccacgggttcgggattgggtaaatgccaaacatttggcagcgctgctgaaattcaacggcgtggtgacaacgggggagtacaaaacctcgcgatttccggcggattccctgatccgaaaagttgatgttgtggagtcgccgtttcgagattgggtaaatcaagaattaggcaagcgttttaatattcggtgcgtgcgcactcctgaggaattgtcggcgctggggccacgcgatcagggcgtgactattttgggtgtgcgaaaatttgcgcagcagacaggcgatccgacgacgcgttgggaaaaagatgatcgccgaaagctgggggatcggtccacataccgtttgggttccaccaatgatgccaaggtggaaacgctcagagaggccgtgaaagccggcaaagcagttgtgcaggcagctgataatcgcattgctgcaaaccgtgctgagctgcgggaacttgaacggcagtatcaggcttcgcaagaaattttgaaagtgtcgtgggctcagattgatgtggaatcagccgacgcggcgattgctgagctggaccgattgctggaagagctgaacagcactccagaggccaccgagctttccgcgcggcatgaggcggcgaagcagacgcttgcgagggtttctgacttgcttgtcgcagctcagagcgaggaaaccgtggcgtcgatgaacctgaaacgcgccgaaactgaattgaaacggctcgaaagcctgccggttgcggaggtttctgaagaaatcgcgcgggaagtggagaaactatttcttgccaacacccgccgggttcacgccgccaacgtggatgagcagaccattgcgctgcgcgaggatctggacaaacaaatcgatgccaatgaggcagaacttcgacgttgtgaaaaccaaattgttggcattttgcgcagctatattgaaacgtggcctgcgaaccgcgctgatttacaagccgaacctgagtttgttggtgaggccatcaaccgtctcggcgagcttcgcagcgatcgtttggcagaattcacggctaaattcctagggctcatgaacgagatgtctacccgaaacctcggccaaatctcgcggcgtctacgtgatgcgcgccgggaaatcgaggagcgcatcgagccgatcaacgcctccttggcgcagtcggaattcaacgaaggtcgcttcctgcacatcgacatccgtgatcaaagtggtccgattgtgagggaattccagcagaaacttgatgccgctaccagcggtgacctgggaaccagtaccgagaaacaagccttcgctcgctacgcgctgatcgctgaaatcatttccaaactcgcctcccacgactccgccgacgcccgctggcgcaacaccgttctggacacccgccgccacgttcgcttcatcggcctcgagcgcgattccgacggcgcaaccgtcaacacctacgtcgactccgcttcactttcaggcggacaagcccagaagctggtgtttttctgcctcgccgctgccttgcgctaccagctagccgaacccggcgcccactatcccacctacgccaccgtcattctggacgaagccttcgaccgcgccgaccccgccttcacccgccaaaccatgaatgttttccacagcttcggcttccacatggtgctcgcgaccccgctgaaactcatccaaactctcggcgattatgtcggctccaccatcgtggtcagctacaccgaaaaaccaaacgcccagggcgcaattcagggcaattccagtttctctaggatcgagaaataa

SEQ ID NO: 45476 - DNA, 1107 bp, Corynebacterium glutamicum
atgccattgcttatcgacgacgccctccaccgcagcaaaaaatacttccacgcgcacttaagcgagctgctcctcggcgaatttgcaggcctcagcctgcccctgcacccaccgacggcagctaaagccgccgccgacattgatgccacgagggaatttatccgccaatgggagggacgcgatgatgtggaatatgccattcgaaactggtctcctgtgggcttaggtaaaactgaagtacccgttaggctgacgttgaacacgattgaggaattagttgtgtttgcacaggtagaggatgaatggtcttcacttcacgagaggttttcacagctgtctggttttacatcggaggtggtggcgaaacatgtgtcgctgtggcgttcgctgtctaacgaggatctctccaaggcggagttagttgtggaatggtttttggagaaccccaactctggcctgctgaaacgcgcagtcgcggttgaaggcgtgcacactaaatggcttgaaaaccaccgcgtactcattgaaacgttagtggccgacaaacgtggtgaacctggtcgtgccgatcttggacttggtgacgccgaagctcgcgtccggctccgcttccattccgtagatgctcccgctgggctcacagacattgaagtaccgctttccaacctgtgcgaattacaagaaccgcaagtaattctgatggtggaaaacctcgattcatttctcgctttactcacttggccgggcgtaacaattgcttggggtgcgggctaccgtgcagtagacattgttcgaggaccctacttttctaatggtcggttgctgtactggggtgaccttgacctggacggtttcaaaattctcgacggcgtccgcagccacgttccccacaccgaatccgtgctgatgaaccctgaaaccgtctcccggtggcgataccttggcgttgccgaccgagaattcaaggcagaaagctttgacaaccttcacgattttgaatctgacgcacttgacctactcattacagacggtgagctccgcattgaacaagaacgcatccgcctcgatgttgctgttgaagaaatcgagaaagtaattcgtgggtga

SEQ ID NO: 45477 - DNA, 1461 bp, Pseudomonas stutzeri; identical to SEQ ID NO: 44187

SEQ ID NO: 45478 - DNA, 708 bp, Pseudomonas stutzeri; identical to SEQ ID NO: 44188

SEQ ID NO: 45479 - DNA, 3375 bp, Pseudomonas stutzeri
atgatctcggaaccccaaaccgcgtccttgttcgcccgggagcaattccggatgactcgcctgcaggtttacaactggggcactttttctgacctgcatgacataccgatcagcgaacgaggctttctgtttgtcggtcgatcaggggctgggaaatcgacgcttctcgacgctttttcggcgttgctggtgccacctcgctggattgacttcaacgctgccgcgcgggaggctgaccgcagtggccgtgaccgaaacctcgtcacctacgtacgtggggcatgggccgaacagaaggatggagagtcgggtgagatcgccacccgctacttgcgctcggggacaacgtggtctgccctggcactgacctaccagaacgcattgggccagtctgtggtgctggttcaggtgttctggcttcgcggcaatgcgaatggaagcaccgacgtcaaacgccactaccttgtcctggagcgggcctttgacctgcgcgagctggaggacttcggtcaatccaacttcgacatccgaaagctcaagcagtctttccccgaggcgttcgctcgcgacgagtttcgtccctattgcgaacgattctgccgcctgctcggtatcgagagcgaaatggcgttgcgtttgctgcacaaaacccagtcggccaagaatctcggcgacctcaataccttcctgcgcgacttcatgctcgacaagcccgagaccttcgaggtggcggatcgcttggtcagcgaatttggtgaactcaatgctgcccaccaggcggtagtgacagctcgcgagcaggttcaaacgctcgcgccagcgcgggagcagtatcagcgcagagattcgttgatgctgcaacgcaatgggctggatgagcttcggctgggcgttgatggctaccgcgaaacccgccgcattgaactcctcaagcagcatgtcgagtccctggaggtgcaagccagcggctcggaaggtgaagtaagtcgacgtcagagcatcctggataaccacaccacaaccttgcgcaatctggagcgacagcaccgtgaagcaggcggtgatcagatcgagcaatgggaagcagagaaatctggtctggagggccagcgcacggatcgcctgcgcaaacgcggccaggctgaagatgcgtgcaagaagcttggctggagcctcccggattcgcctcaggccttcgctgaactgttgggcaacgcgcggcaggaagtcgaaaactgggagcagcgcagcaacgagaaccgcgaagaacagttccgcttggcaggtcaaaagaaagacgctgagacggcattttcgcaagcggtgaaggaggtgcaggcactccagcgccagccatcgagcattcctgccgatatgctcgaaatgcgccgagacatcgccgcagctattgggatatcagaatcggctctgcccttcgtcggcgaactcattgaggtgaagtctgacgaggccgagtggcaaggtgccatcgagcgcgtactgcacggatttgcgctctcactcttggtggacgaacgccagtattcggcgctggccaattacatcaacaacacccatcttgggcagcgtctggtgtactaccgaactggccgctcggagacctggcaggcgaagcccatcggcgctaactcgctcgtcctgaagctgaacgtcaaggagggtacgtatgccgattggctgcaggccgagctacggcaacgattcgattacgcgtgcgtcgactccattcagtcgttcaggagcgctgatcgagccatcacccgtgagggccaggtcaagcacagcaaaacccggcacgagaaggacgaccggagaagtgtcggcgaccgacgaaactgggtgctcgggttcgataaccgcgagaagcttgggctctttcaagcacaggcccaggagctggctgagacgattacgcgcctcaggggagaaatcgaaaccctcgccgaccaagacaagaatcgtgcgacccgagcgatgcagtgccaaaccttggtgaatctccagtggcaggaaattgatgtagtaccgttgcttgaccgcatttccaccatcgaacaacagattcgcgaagcgcgggagggcaatacagccctactgcaaatcagtgagcggatcgacaggcaaaagaacttggttgatcaagcagacaaggacctccgagaagccaaggtcgcgcatgactcagttctcaagcagatcaacgacagcacgcagaagcttgaatcgctccttcaagatgcttccagagttccattgactccccaccagatcaaggggctcgacgaacgattcaccaagcagtcagacgcgatcaggctcgaaagcctcgacaaggtagcaaccgctgttgagagagggctcaacacagaaatcggtgagatcaaagatgagatcggcgattgcgagaaggaaattgaagcacgctttgccgatttcaaacggcagtggccaatggatgctgtggacatggacacgagcctcgccagcgcagcggactttttcgccaagttggttcgactggaaacggatggcctgcccgcctatgagcagcgattcttcgaactgctgcagaaccaaagccaccagaatctggcggcactgtccacctacctgaacgatgcgcgcaaagccatcctagagcggatggatctggtcaacgacagtcttggccaggtgccgttcaaccaaagcgccaatcaacgtacctatctccacatcgacgccagtgaccggcagcttgtcgacgtcaaggagttcaagcaggagatccagcaggcacttagccatgcgtggacggaggatcgcgagtttgccgaggcgcggttcctggccctgcggcgacttgttgatcgactcgccagtcaggaccccgagcagaaacgctggcgcgagactgtgctcgacgttcgacagcatgttgagtttatcggacgggagattgatgaaagcggcgtggaggtcgaaatttaccgcagcggtgctggcaaatcaggcggtcaacggcagaagctggccaccacgtgcttggccgcagccctgcggtatcagctgggagggaacgaccacggcgtgccgatgtatgcgcccgtcgtgcttgatgaagccttcgacaaggccgacaacgagttcaccgctttggcgatgaacatctttaccaatttcggatttcaaatggtggtcgctacgccgctgaagtccgtcatgaccctcgaaccattcatcggtggcgcctgcttcgtagatatcagcgaccggcgggtgtcaggcgtcctgttgatcgagtacgacggtgaccgccagcggttgaagctgccggagcacgctcgagaggaggctagcgttgaagcttcctga

SEQ ID NO: 45480 - DNA, 1164 bp, Pseudomonas stutzeri
ttgaagcttcctgaagatgtttggcagtttcttgcccgtcgctttcagagcaaacaccgcgagtggttgatcggtgatgctggcgagagccaatggccgctggaagttccgctcggcataccgacggaacaggctgcgctaaggcaagtcgacggcgttcgcgcttgggtgagtgcatggcaaggctggcaaggagtcggcaccctgtcctggtgtgagcgccggtggaaagcgcttggcgtccagcgactgcctgagaaactggcgttacgaggccctgaagatgttgccctgtggattggggaatccgcacggtgggtgcgtgcccagtctcgctatcagacgctcactgctcgctggccggtactggcgcagcagttgccgagatattttgatgtcctcgctgactacggcgatgccgattttagtcggctggcagagatgctggattggatcagtctcaatccgaaatcgaatctctacccacgacaaattccggttgccggggccgacagcaagtggctggattctagaaagggcctcatctctgacttggttgcgacgctccagggtgacccgacaggagagcgcgacttttttagacgctgcggtttgagggcacagccgcagttaatgcgcatgcgcgttctagacccagagctgagagcccgtttgggcggtcttggcgatatctctgctccttgtgaggaggtggcaagcattggcatacgaccaaagaatgtcttcgttgttgagaaccttcaaaccggacttgcctttgatgacctgccaggggcggttgtgatcatgcgattgggttacgcggttgacgttttgggacagcttccatggctacaacaggcgcaatgtatctactggggtgacattgatacgcatggcttttccattcttaatcgagccagaacatacatccctagcctgaagactgtgctcatggatgagtcaacgctgatgagtcatcgtgatttatgggtcgaagagaaagaccagcactcttccacagaactcccactactcaaaagtaccgaacaaaagctctatcagtcgatcaagggaaatgcctggggtcaacaagtccgcctcgaacaggagcggatacgctgggatgtggcgtggaatgccatacaggccagtattcgatga

SEQ ID NO: 45481 - DNA, 1353 bp, Pseudomonas stutzeri
atggaggatgctctgcaagcgctgtccgaaatgctggctgcttatgccagccaggagctttacgaaatcgacccggatgcaacgcatctccaagcaggtcgtgaacttcgtgaatggatcaagcggcgtctggtcgtagaacgagagggccgtatctatgcaaccgacgcgttggagtccgccatccagttcgtcgattcgctggatagtcggatcatgacttccacggcatctcgcctttcggtggttcagcgcgagatcgaaaacttggaaacgggtctgaaccccagcccaactggccgtattgccagcctgcgccgccgaatccaggatttggagcacgagctagcgcaggtagaagctggccacgtcgtcgtgctggatgaagcgcaggcgatagagggcatacgcgaggtatataacctggccaccagcctgcgcgcagactttcgacgagttgaagactcttggcgcgaggcggatcgcgcccttcgacactccatcatcagcgagcagtctcaccgtggagaaatcgtcgatcggttgttggacgggcaagatgctctactcaacactccggaggggcgtgtcttcgaaagtttccagcagcaactgaggcagtccgctgagctggaaaccatgcgtgagcgcttgcgcaccatccttcgtcatccagctgttccaaaggcgctgaatcgtccccagcaacgtgagctgcgctggctggcgttacgcctggttcgggagtcgcaggctgtgctccaagcgcgcgcccgaagcgagcgcgatgttcgtggcttcatgaagacggggctggccgccgagcatcatcgcgtcggacagttactcaacgacttcttcaatctagcgctcagcgtcgactggcaacgccagtcagaacgccgtaagcctgcatgtttaccaccagttggcgtagccattaccggtgtcccagcaatcgagcgtctccgcttcaagactctggatgacgatgatacgggcgagctggatctgagtttgaagcctgcggggttggagcagattgatgatgacttctgggatgccttcgacgggctggatcgtgaagcgttgattcatgacaccctggctgtgctggtggagcagggtcgccccgtgagtctcgtggagcttgcgtctttgcttccacctgttcacgacctggaaacctttgcgctctggctggcgatggcgcgcgaggcaggtatcgaggtgctgacagaggagcgtcagctcgtggagctagttgacgaggatgagcaacgctggcgcttcaatctgccttatgtcggactcgaccacgaggcactcaaggacatcgattgggggttgtga

SEQ ID NO: 45482 - DNA, 663 bp, Pseudomonas stutzeri
ttggatgatgaacagcctctcatgagcgccgctgttcaggtcgatgagcgccggacgccgcaacgggtacgtgaggccgtacaggaaatgctcaagtacggactgctggaagaaagtcacaagcccaacctgtatcgctcggcgctttccaatatcgaggcggtcgacagaattctggaacccctcgaccttgccatgggggtcgacgaggttcgggggctggtgtttgttaccgttcgccagggcgaggtagccgagcaggatgactggtcgcacccccttgtgcgtcggcaaaggctgaatctggagcagtccctgctgatagccattctgcgacagcatttcattgcgtacgaacaggagagcggtacgggcgccagtcaggcactggtagcggttgatgagctgattccccaattgcaggtttacctgggcgaactgggcagcgaggcgaaggagcgcaaccgcatcatcacactgctggatcagctcaaggggcatggtctggtgtcggctctggacgctcatgatcgcgtcatcatccgccccatcattacccacttggccaacccggagaacctgcaggcactcgtggcttggctgcgcgaacaggtggagggcgcggctacgccggctgccggtgctgaggaggacgaggcgtga

SEQ ID NO: 45483 - DNA, 2940 bp, Pseudomonas stutzeri
ctgggcgctgtactctggttcgagggcaccagctcctcggcgtccgatctgaaaaaactgtggctgttaagcgagtcccccgagcagacgctggagcattggctcagccaacatcacgcaggcggcatgcgggcgttgcgtcagatggagaaggatgggacgggtatctggccgtatcccagcaaaaaagccttcctggccaggctcagggattacttcgaagtcggtgaaaacgccttcaccttgctcaaccgcgctgccggcctgaaacagctcaatagcattgatgagatctttcgcgagttggtgctcgatgaccgctccgctttcgggcgggctgccgaggtcgctactagtttcgatgatctaacggacattcaccgggaactggaaaccgctagaaagcagcagcgctcattacaaccggttgccgatggctgggagcgttacaaggccttacaagaacagctgcaggataaacaggtgctcgaaggcattcttccggtctggtttgccgagcaggggtatcgcctatggttggctgaaaccaataggctagagaaggagcacaagcaggctgagctggatcgagaacactgcgagcgtcgacttgatgcccagaagggtgtggttgatcagcagcgtcagcgctacttgcgagtaggtggcgctggaatagatcaattgcgcgagcgtatcgctgagtggggcaaggtatgcggtaggcgtagtctgcaggccgagcaataccgacgcttggccaagggtcttggactatcggaggagctatcggccgcctctctaaaggagaaccaggagcagatcactgaacgcctggaaatcctgacccagcagcttgatggcgcgcgcgaacaggtgttcaaagccggcctcgcccagcaggagctgaatggtcggttacagaccttgcagcaggagcgtgctgaggttgagagacggcccggctcgaatctgccagggctatttcatgcctttcggagtgatctggcacaggagcttggactcgatgagtcgaccctcccttttgttgccgagctagttcaggtcaagcccgaggagctggcctggcggggcgctatcgagcgggccatcggcagccaccgactgcgcattctggtgccgcagggctcatcccaggccgcattgcgctgggtgaaccagcggcacaaccgtttgcatgtgcgcctgttggaagtgagagagcctgcttcgcgaccggtgttctttgatgatggttttactcgcaaactgaccttcaaggagcatccgtaccgagaagccgtaaaggcactactggcagacaatgaccgccactgcgtcgaaagcccggagcaattgcgtcatacacctcacgccatgacggcccaggggctgatgtcgggcaaagaacgcttcttcgacaagcaggatcagaagcgcctggatgaagactggctgaccggcttcgataaccgcgaccgcctggctttcttggccgagcagattcacgaggtcaatgaacagctcgcgcctgccaagctggccttggatgccgcgcaggacgatgtccgtcagctggagactcaagcttcgctgctgaaacgcgttgaagaactgcagttcgaggatattgatctgccgggcgcggagagtcagctggaatcgctgcgtacgcaactggccaccctgacgcgccccgattctgaccttgccctggtcaaggtcgaactggatgaagccgagaccctgctggagtctctggaccaacagctccgccaactgatcgagcagtgcgttcagttaaaaatacagtttgaccaggccgcatccgctacccgtaaggcatataacggcgcggaaaaagggctgaacgatacgcagcgtgaactagcgaaagagcacttccctactctggccccggaagacctcggcgacattatcgagttggagcgcaagcatacgcgtgagcttcaacagcagctcaaatcgctcggcgaaaaattgggtcatgagcaaacagagctagccaaacgaatgtccgacgccttgaaggtcgataccggcgcgcttgcagaggtcgggcgagaactggtggacgtaccaaggtatctggagcgtctgcgtgtgctgactgaggaagccctgcccgagaaactcaagcgctttctggaatacctcaatcgttcctcggatgatggcgtcacccagttgctcagctatatcgaccatgaagtctcgatgattgaggagcgcctggatgacctgaacagtacgatgcagcgtgtcgactttcagcccggacgctatctgcgcttggtcgcgaaaaaggtcattcatgaaagccttcgcaccttgcaacaggctcagcgtcaactgaactcggcgcgtttcatcgatgatgaaggcgagagccactacaaggcattgcaggcgctcgttggcctgctcaaagatgcctgcgagcacagcaggaaccagggcgccaaggcgcttctggatccgcgcttccgcctggagttcgcggtctcggtgatcgatcgcgaaagcaagagtgtcatcgaaacccgaacaggttctcagggcggcagtggtggcgagaaggagatcatcgcttcttatgtgctgaccgcctccctgagctatgcgctatgtcccgatggcagcagccggccgttgttcggcaccattgtgctcgacgaggcgttctcgcgtagttcccatgcggttgccggtcggatcatcgcggcgctgagggagttcggcctgcacgctgtcttcatcacgcccaacaaggaaatgcgcctgttacgccaccatacgcgttcggcaatcgtcgttcatcggcgcggcgtggaatccagtttggtttcactgagctgggaagctttggatgagcatcatcaacagcgcatcaaggccatgcatgaagtcgcccactga

SEQ ID NO: 45484 - DNA, 1158 bp, Pseudomonas stutzeri
atgaagtcgcccactgacatcggtcgcagcttggccaggcaatggcatcgctccagtgttcggttggagcgcttgctcaatcccggcagctggccgcaatgcttcaacatcggtaagccttcggcacgagtcttcgctgaaaacatccatgcggtgctccagcatgtggaaaactggcggagcgtgaaagtgggtaaggtcggttgggaactcgtcagctaccgagaagggctggccccaatttccttgccgatgcgctggcacttgcgcagtccctccgaatggattgccgcgacaaatgatccaacggtcagccaggaatacgctcaactcgagtatctggtcgagcaggtagacagtgcctttcatgcgctgctcgtggctcaacgcagcctgtggttgacgaagccgtctgaagaagtcgtcgccacggcgcaactcgccacccggttgtcgccaggctgtgcccgaggccgtccactgcgcctgcttgccgagcacggcgtagacaccaagttttttgagcgcaacgccagtttgctgaccaggctcctcgacgagcgcttcgaaggcgcggcgtctgagcaaggcctgacgacgtttctggatgcctttgaagaaagcagtcattgggttctggtcgttccccttcagcctgagctgctgcccttcaagcggatcaggctcaccactgcggaactggccgaaactccactgcccggttcacgattgctattggtggaaaatgagcaatgcattcacttgctgcccgaagccttaccggacacactggctgtactgggctcagggctcgatttgcagtggttggcgtcttcgcacttggccgggaaacagatcgcttactggggagatatggatacctggggcttgctgatgctggcgcgagcgagactccatcaaccagcggtcgaagcactgttgatggagcaggagctgtttgaacagcactcgccggtgagcgcagttgtcgagccgaccaaagctctggattcggccccacctggtttgctggctgacgaagcggatttctatcggtatctgcaggtgcaagaacgaggacgtcttgagcaggagtacctgccaaaggcacaagttgagcgcgctattgagcagtgggctaggaagatccctgtatag

SEQ ID NO: 45485 - DNA, 1500 bp, Bacillus pumilus
atgcagtatattaacaagcctaccggcgcaaggaattctatactaacaagggaatgtgtgacgagtatgaaattgttcgacattattccggatcgactgtttacgctgcttgtgggctctaataagcaaatctatgctgaggctctgttgctgctgtacgatcaggcacagacagagcgcttcggcattcgttataacgtcatgcgggatttgctgcaggaaatgctggatacccggcgcgaattgggtgaggatattgctgtattggatacagaagacgaggagagcgagcgcagtgatgatttgagacagattaacatggaagacatgacgagggctcaagcgaatacaatgttgcggcgactggaagagcgaaagtggatagatgtagagacgagagctcaattcgagcggttcattgtattgccgcactatgccagtcggctgattggtgtgttaaaagagttgtgcgctgcgaggacggttgagtaccagcgcttcgcatttttggtctaccaatcgctgaccggagaaggagctcgactgcaaccttgttctgccgttatgagtgcggctgaagtaagtggacagtttcgacaggagcttgtggcgctttacaacaatatgaagcacttgatggaacaggttgttcagaagacgtcaatacaagatgtgctggatcatcattttgaccattataaaacgcaaattattgacaagagttatcatcggttgaagacatccgatcatgttgctcgctatcgaatgcaaattctaaatacggtacagcaatggctgctagatcgacagcaattagaagaggctgcactcgatggggtgaagagcggattgtatacttcggtcgacgaggctgggcaggctgtgaagcaggcactctttttcattgacgaaacgttcaacgggttggatgaattgttttatcaaattgatgtgcggcacaatcaatacttgcgttcctcttatgatcgtgctcgctatttgagtcagcagaatgaaggcatagatcagcagcttgcacgtttaatcgaacggctgagcaaagacttatcaatggatggcacagagtcgttgttcgcgctgcgccagacccgcgctctttctgaacaatccttactgcccccgcgacgcaagcgggcacctcatcaacctgatgtgcatgtagttgtggaaatgcctgatcatctactggaggaattgcgaaccaaaaacctagaacgaatgcgcaaggcgattacccgaaagaaggtcgatgattatgtaacgaatcgtttgggtggacggtcagagatggagatggccgaactcgcacccgagaatgcggagcagttcattatgctgggctatatttatttgtatggatcagacgggggctcgaacttcctggttcggcgaagtgatggccgtaatattctaacgattggcggatatcgcttcgataaccatacaattgtcaagaagaaaggggggccgaaaagatga

SEQ ID NO: 45486 - DNA, 609 bp, Bacillus pumilus
atgatgtttgacgaattgagtgaatctgagcaagccaaggttcgtcatgtattgaatcggttattcgaggtcaatctgctggttagagacaaggatcgtgaagcttatgccatcatacggcgtcatagtcaggcacttgaagcctactttcaatttctcggttgggaactaacagttgatgaacgtcatgaatgcgtctttctccaccttccggatggaaggctccgcaggcgtatggacagagaacagactctttggctacttgtgctgcgtcttctgtatgaggagaagcgacaaggcttgtcgttagctgattatccgatggtgacgttgcatgaaattcgtagtaagtttgagacgttccggattgaatgggtgggacgaacagcactggacaagcttattcgattgtgtgcacagtttcaattgctcgaagcgatggatgaggatcatcgtgcggacgatgcccggttcaaactgtaccatacttggatgtatgttgttcaggctgatgagatcgctcaacttacggaaagactggaacgctatgatgccgcagaggaaggaggattgctggatgaaatggatgacacggctccggttgattaa

SEQ ID NO: 45487 - DNA, 3513 bp, Bacillus pumilus
atgaaatggatgacacggctccggttgattaactggcactacttcaaggatgtaactatggaatttggccgacagacattaattacaggacaaaatgccgccggtaaatcgacgattatcgacgcccttcaggtgctgtttgtagttgatcagcgacttatccgcttcaacgctgcggctcacgatgaggcgaagcgaagttttgagaattacctgatgggcaagattggcagcgatgagcgttcgtacgttcgggacggggattttacgacctacattattgctgagttccgagacgaggacaagaaggaatcatttgttattggtgcagctattgacgtgtaccgcgatcgttcgtatgaggaagagtattttatattggctgcatgcaagttggatcagcttgactttataaatccggaagggcagttgctgaatcgggaagggtttaaacgacggtatggacccggtgttgggactggtcttggagaagttgatcagcaccttggtgtgaggcaaagttcaaggggacgggttctatttgagcgtaataagtctaactatcagaaggcattgttggcaagattgggtcaactgcaggatcgatttttccatatattcaccaaagcactatcgtttaagccgattcggaatattcggacgtttgtttacgactacattctggacaaacgcgagttgcaactggacttgatgaagcagaatttcgagattcatgagcgctataggcaggaacttgaattgctgcagaagcgaaaaatgcagttgcagggcattcgagatagctatcaggagtatgcccggcttaaagaaacaataaaagagcaggactatgttattagaaaattaaaagtgttgtatgaaacagagaatttggagcaacaggagcgtttaaaacatcaagcagaggaaaaatcgaatcgcttattggaaagtattggattagcagaggttaagttgaacgaggcgcgtgaacaatctcagcttgcttaccagcgttggcagaatcatgcagatgaaaaacgcaagcgggaactggagaaggagactcgggagcttgagacgaaacgtgtagatatggagaatttattatccatttactgtgccaaacttgatcgggagagacaattgctggggaacttctccacttggacggatggagaatattggtcatgggaaataggagagcaggagcggattggtcaatatacggagcatcttgcgggattgctggcgattgtagataaaggtaacgcagaagaattagatgaagaaatatgggaatccagactcgatgaaattggtgaagcccggtctggttggtatgatcggctcttacttggagaagatcgtttactggaaacactggatgcggcggaggaacaggcaaccgaactggagaatattatctgtgatctagaacagaagaggcggagctattctgagccggtcagacagttgaaggcgttgttggaggagcatttaagtggacgttctgcggtttggattttttgtgaggaagcagagctggttgacgaaggctggcgagatgcacttgaaggttatctgaatacgcaacgatttgatctactggtagaaccggaatgcttcgccgaggcccttggtatctatgagcgagagaaatggacgcggaagctcgaaggtgtaggccttgttgatactgaaaaagaaaggaaatatctaggcacagcagaggagggctcgctggcttatgagcttattgctgagcatcctgtagttcgggcccgtgtggagcatttgctaggcagggtgatgaaagccaaggatgagcaggagttgcgacgacatcgtacagccgttacgagtagctgcatggtatacagtaatctcgtggccagacagattccgaaaaagcactatgaaattccttatattggagcaaaggcaatcgcacaccaattagaaattcgcaagttggagcttcaggaggttagggaaactgttttaaggctaagggaattggcgactgctttccgtgagtggatggatcgactccgggacaaggatgctgtgtataatagcttatcgtctcacctcacattgccgcgagaactggaagcttgcaggtatcgtcaggaacaagtgcagctagaatgggaaggactcaatcttgctgaagctgaacgccttaaggctgagtatgagcattggcgtgaggtggagaagcaatggacggaaaaatggggaggcctcttggaggataaaggaacggttgaagccgaatgtaagcagcttgctggaatcttgcttgttcagcagaataaagtgcgagatgctgaagtaatccttgagcaatggctaggtgagcatggtgttgagagtgagcagcgggccaagcagcgttatgaggaagcggaacgatcaacaacagtcagtacatttcaaaagttgcaaaattgggaacgtagctctaagggaatacagaccaagcgtgatgaccaattcaatgatgtagccaaactaaggcaaaagtacaatgttgatcatgctttcagtggtgatgcgaacgattccgagaatgatgcctatgatcgtttgctcgatacaattgaacatcttaacatcccagaatatcagcaaaaggttacagaagcgcttgctgagtccgaggaggagtttaagtctcactttgtatttaagctgcgggaagcaattgagatggcgcggcgtgaattccaacaattaaactatgccctgcggaacttccccttttctgacgataagtatcatttcgaggtttcgccgagcgaacggtacaagaaattttatgaggcagtgatggacccacttttgatggagaagggatctctgtttgacctgccagaaaatgatcgaactgcagtgctacatgaattgttcgaaatgctggtgcgtggagaggccgggcagatggaagagtatgccgattaccggcaatacctggactttgacatcattgtttcgtcgagcagtggggggcgttaccgattctcgcaggtacttaaagagaaatccggcggtgagacacagactcctttttatattgcgatcctagcttcctttcatcatttatattcaaataaaagctctcgtctggttgtctttgatgaagcgttcaacaaaatggacgaacagcgtattcaatcgagtttgcggctaattaagcaaatgggactgcaattggtagccgctgttccagacgagaaaatgcagcatatggcacctgaagtgacgactacgctgtttgtcagcaagcatgactatcaatgctttgttgatatgattgaccgttgggcaccagatgaagcagagacgagcccagcatttcataatattgagacaattgaaaagtcagttaacccaacggaagaacaaatctccgatacggactcattatcatcaaagttaggcgaaagtacagagagtcctacatttgatagtgaacgacacggaaggcaaggcaccttgttttga

SEQ ID NO: 45488 - DNA, 1272 bp, Bacillus pumilus
ttgtgtatggaagcaaacgaaataagctttaagcagaaatttggcaaggacttgctgaccttgcttctgagcaaatatgaacaaagccaatcatttgttacaggtattcctggaaaaatgcggccccaactcacgattgggaaaagtccttttgctcgtgattacaacgatgagatggactttcgaaagcgtcattggatgaacgaaaggctagttgagttagagcaggaagatgtagttcaacttacaatggctaaatatcgttcggacgaaatagagaaagtatatttgcaatggcaagctatagaggaggcttaccgaatttccggtcgtactcctttgcgcaccaaaatgaagcaactgcgggcttctcttattccgttgacttctcatccgtggggttgggttcaaaagtggcgacaggaaatggacgattcattagcgcaaggcaaggctgttcgcctcgatccagatgatgtgcaaggaacggttgatctagttcacacgttgaacgagttgccactgcttggtgatcgtgcagtgccaattcgcatctttagccagtggttatttcgagatacgaagcatctggaacgtcagacgcttaaacggctgatttctctggcaaagcaagcttccggtgagcagagagagacagaagaggaatggttggattggcttggtcttactcgtaatcctcagagtgtctttttatgtggctcacttgtctttcgaacccgcgaaggcaagcaggttgacactagcgcatttccgggcggtcttgggatttccggtgagacgatagatatgataacggatttctttatgcctgctcgtcaaattcttaccattgagaatttgacgagctatcatcattatctagagcagccttcggttcgtgctgatgaggttcttgttatctacacaggagggtacccaaatcgtgtcttgcaaagctttctccgaaagctgagtcaggtcgtaaatgaagcgtcaaatccaccagaactgttccactggggtgatatcgaccttgggggaatccgaattttcaagtggattcaatccaattttttctccgagcttcgaccttatcggatgggagtggatacgttactccagtacgaatcacaagcagcgccggtcagtgaagattatgctaatcagctacttcatgcgttgagtgaaccacaatatgcggattggcttccggtactggaaaccatgatagagcggaggattcgtcttgagcaggaatgtatcatagactga

SEQ ID NO: 45489 - DNA, 1479 bp, Comamonadaceae bacterium A1
atgaccatggaacacgccacccttgcaatgttgcgcgagcgccacccggcttggcgcttgctggcttccgctcatgcgccgctgctggcgagctttttgcaccgggtgtttgtggcacccaacgtgcgggtgatgaacgaggccgacttggccgaggcgctggaggacgagttgtacgccttgcgcgagcagatcggtgccgacgcctaccccaaggcggccagcgagtacctgaacgactgggccgcgcccgacaagggttggctgcgcaagttttacaagccgggcaccgacgaggcgcagttcgagctcacgcccgcgaccgaaaaggccgttgcctggctgctgtcgctcatcgagcggccgtttgtgggcaccgagtcgcgcttgctcacgctgtttgcgctgctggagcagatcagcgacggcaccgaggccgacccagtcaagcgcctggacgagctgcgcaagaagcgcgatgcgctcgacgccgagatcgcccgcgtgcaggcgggcgagctgcccctgctcgacgacacggcggtgaaggaccgcttccagcagttccagcaactggcgcgcgagctgctggccgactttcgcgaggtggagcacaacttccgcctgctcgaccgcaaggtgcgcgaaaaaatcgcgctctgggacggcagcaaaggggccttgctggaccagatcatgggcgagcgcgatgccatcagcgattcggaccagggccgcagttttcgtggcttttgggactttctcttgtccagccggcgccaggaggagctggccgagcggctggatcgggcgctggcgctgcctgcggtggcggcgctcaagcccgagccgcgcatgcgccgcgtgcaccacgattggctggaggcgggcgaacacacgcagcgcacggtggcgcagttgtcgcagcaaatgcgccgctttttggacgaccgcgcctttttggaaaaccgccgcatcctggacttgctgcgcggcatcgagagccgggcgctgggcttgcgccaggccctgcctgcgggcacggtgatgcacatcgacgccatgggcgcagagatcgagctgccgctggagcggcccttgcacacgccgagcgccaagccgctgctggcccaactggcgctcgaggtgggcgcagacgagatcgacaccgcgcgcttgtttgaccagatcgtggtggacaaggcgcgcctgcgctcggcggtgcaaggcgccctgcgccgccagccgcagatcacgctgcgcgagctgttgcacgccgagccgctgcgccaaggcctggccgagctggtggcctacttggagctggcccatgccgatcccggcagcgacgccctgggtggcctgcgcgccgtggtggacgaagccgtgcaagagccgatccgttggcaggcccacaacgcagcgggcgaaaccgtgacgcgccaggcgcgcttgccgcgtgtgatcttcacgcgctga

SEQ ID NO: 45490 - DNA, 705 bp, Comamonadaceae bacterium A1
atgaacgacccactcgatcacgatttggccctggccgccgcgcccagcgcagcgcccgcagcgcctgaactgtcgcaactgttgctgcatttgctcaagggcgtgctctaccgcgaagaagatgagcgcctgtgggccagcctgctgcgcttgcaggcgcgggtgcgggagcaggccgcggtgctgttgctggacttggtgcaagacgaggccgagggccacgccttcctcaagagccgcccagacccggacgaagccgagggcgcgccgcgcctgcccaggctggtggcgcgccggcccttgtcttacccggtcagcctgatgctggccctgctcagaaagcgcatggccgagttcgacgccggtgcgggcgacacgcggctggtgctctcgcgcgacgagatcgccgagttggtgcgcgtgttcctgcccgatggcacgaacgaggcgcgcttgatcgaccaagtggacgcgaccctgagcaaagtggtggagctgggctttttgcgccgcctcaagcccacggccggcagcggccagaccgcgcggcaggagcgcagccactacgaagtgcggcgcatcctaaaagcctttgtcgatgcgcagtggctggccgagtttgaggcgcggctggagggctatcgcacggccttgtcgggctcaggcagcgagcccggtgcagcacgggaggcgaccgatgcttga

SEQ ID NO: 45491 - DNA, 3417 bp, Comamonadaceae bacterium A1
atgcttgaagcgcccacaattggcctggacttcgtggccgacgacagccgggtgggcttcaggctgcaacggctggaggtgctcaattggggcaccttcgaccagcgtgtctggcgctacgagctcgatggccgcaacggcctgctcacgggcgacatcggttcgggcaaatcgaccttggtcgatgccatcaccacgctgctggtgccggcgcagcgcgtggcctacaacaaggccgccggggccgatgcccgcgagcgcagcttgcgctcctacgtgctgggccactacaagagcgagcgcaacgaggtcaccgggagcagcaggccggtggcgctgcgcgatgcgtcgagctactcggtcatcctggcggtgtttcgcaacgagggctatgaccaggccgtgacgctggcccaggtgttctggctgaaagacccgcagggccagcccgcgcgcctgttcgtggcggccgagcgggcgctggccattgccgacgacttcagcggctttggcagcgacatcgccggcttgcgcaagaagctgcgcggcgcgggctgcgagctgttcgagggcttcccgccttacggggcctggtttcgccgccgcttcggcatcgagcacgagcaggcgctggagctgttccatcagacggtgtcgatgaagtcggtgggcaacctcaccgatttcgtgcgcagccacatgctggagcccttcgatgtggccagccgcatcgaggccctgatccgccacttcgacgacctggaccgcgcgcaccaggccgtgctcaaggccaagcgccaagtcgagttgctggcgccgctggttgccgatggccagcgccacaaggccctgctggccgaaatccagggctggcgcgaggggcgcgaggcgctgcggccctactttgcccggctcaagggcgagctgctggagcaccgtctggccttgctggcgcaggatgccgcccggctcgaagcccagatcgagcgcctggacgcgcagcgcgaggccgagcgcctggaagtgggccaactggagcgcgccttgcgcgacaacggcggcgaccggctggaggaactggcggcgcagattcgccgcctggagcaggacaaggtgcagcggcaaaagcggtctgaccgcttgcacgagctgctggcccgcatcgacgaggcagcacccggcgatgaagccggttttctggcgcagcagcagggcattgcccagcgtgccgaaggcttgcgcgagcaaatcgccgacctcgacaaccgcgaacgcgagcaggacttcgcgtttcgcaagggccgtgaggagcacgccgccttgtccgacgagatcgagagcctggagcggcgcaagagcaacatcgacgccgcccaggttcgcatccgcgaggcgctgtgcgcggcgctggcgatcgacgaaggcgaactgccctttgcgggcgagctcatgcaggtgcgcgacgacgagcgcgattgggaaggcgctgccgagcgcttgctgcgcggctttggcctggcgctgctggtgcccgaggcccactacccggcgctggcgcaatgggtggagcgccagcatctgggtgcgcggctggtgtattttcatgtgcggcagcggaaggccgcgcagggcgcggccagcccgcagccgcaatcgctgctgcgcaagctcctcatcaagccggattcgccgcacgccgagtggctggagcaggagctgcgcaaccgctttgacgtgtcctgctgcgactccgatgagcagttccggcgcgaggcccgcgccatcacgcgcgccggccagatcaaagacccaacgggccgccacgagaaggacgaccgccgccgcatcgacgaccgcagccgctacgtgctgggctggagcaacgccgacaagctgcgcgccttgcgcgaccagcgccagcgcctggagcagcaactcgccacgctggggcagggcatcgccgcactgcagcaggcgcgcaaagaactgcgaggccggctggatgcactcagcaagctggaggagttcacgcgctttgccgacatcgactggatgagcctggcgcgcgaaatggccgcgctcaccgaggagcgggcgcggctcgaagccgcatccaacaccctgcaagagttggggcgccagttgcaggcggtgcaaggccggctgactgataccgaaaacaagcgcgccgaggcgctggacaagcgcggggagggcagagccaagcgtgcggcggcgcaagagctgcgcgatcaggcccgcgctgccagccaagccatgccgctcgaggcgcagcagatcgagcgcctggacggctggcgcgcgcaagcgctgggtgcgcatcaactgtcggtagagtcctgcgacaaccgcgagcaggagctgcgcaagtggctgcaagaccgcatcgacgccgaagacaagcgcctggcgcgcctgagcgagcgcatcatcaacgccatgcgcggtgtcaaagaggaattcaaggccgaaaccagcgagatggacgtggcccttgcggcgctgccggagtacgagcgcatgctcagcggccttaagggtgacgacctgccgcgcttcgaggcgcgcttcaaggaactgctcaacgtcaacaccatcaacgagattgcccacttcaacgcccaactggcacgcgagcgcgagaccatcaaggagcgcgtcaacctcatcaaccagtcgctgcaggcgatcgactacaaccccggccgcaccatcaagctgctggcgcagcccagcccggatgccgaaatccgcgacttccagcaagacttgcgcgcctgcaccgaaggcgcgctgaccgccgctgccgacgagcagtattcggaagccaagtttttgcaggtcaaggccatcatcgaccgcttccgtggccgggaggggctggcggacgccgaccggcgctggaccgccaaggtcagcgatgtgcgcaacggctttttgttttcggccagcgagcgctggcgcgccgacggggccgagcacgagcactactcggactcgggcggcaagtcgggcggccagaaagaaaaattggcctacaccgtgctggccgcgagcctggcctaccagtttgggctggagtggggggcggtgcgttcgcgctcgtttcgcttcgtggtcatcgacgaggctttcgggcgcggctcggacgaatcggcgcagtacggcttgcgcctgttccagcagctcaacctgcagttgttgatcgtcacgccgctgcaaaaaatccacatcatcgagccctacgtggccagcgtgggcttcgtacacaacgagggcgggcgcgattccaggctgcgctgcctgtcgatcgaggagtaccgggcgcacaaagcggccgagaccgcgcccggcttgggcgacgccagcgcggccattggcggcgcgcccgcatga

SEQ ID NO: 45492 - DNA, 1209 bp, Comamonadaceae bacterium A1
atgagctggaccctgccggccgacctgcgcgcccaggtccagcgcctgtgggagcgcggcgatttgctgcgcgcggcggtggacgcgggtgccgtggcgtggcccctgcgcctgagcctgaaagccccgagcgcggccgatttgtccgagcgcttcgaggcggtgcgcgactgggtgcgcgccatctccgacacggagcaggtgcgcatcgaatggcgcgattggaaccatcgggtacagggcgcgcagcggctgccggcggcgctgtggctcgactccctgccagcggccttggccttcatcggcaaggcgcgccaggcccagcgcttccaggcgctgtggcagcagacggccgctgcgcaaccggcgctgctggcgtggttgcgcaagcgcccgctgcaggcgctggacttggccgagcgctgggagcgcctgctggccgtggtggcttggctgcaggcgcacccgcgcccgggcgtttatctgcgccaggtggacgcaccgggggtgcacagcaagttcatcgaggcgcaccggggcgtgttggccgagctgctggagctggccttgccgcccgattgcatcaacacccaagccagcggcggggcgcaatttgcccgccgcttcggcttcctagacaagccgctgcgcattcgttttcgcttgctcgacccggccctgccgagcctgctcggcctgcccaactgcgcgagcctgcccggcttgaccgacagcgcgctgctgcccgacctcacgctcgatgcggccagttttgcccgcctcgcgctgcccgtcgagcgcgtgttcatcaccgagaacgagaccaacttcctcgctttcccgccagtggcgcgcgccctggtggtctttggtgagggctacggctgggaggcgctggcgcgcgccgagtggctgcagcgctgcccgctgcactactggggcgacatcgacacccacggttttgccatcttggaccaactccggggccacttcccgcgcgccgcgtccttgctcatggaccgccagacgctgctggcacaccgcgcgcactggggcgaggagcccgatcccgtgcgccacgacttgccgcgcctgacgcccgaggaggccgccgtgtatgatgaactgcgcttcgagcgcctgcaacccaggctgcggctggagcaggagcgagtgggttttgggtgcttgatcgggcggctgcgctga

SEQ ID NO: 45493 - DNA, 1473 bp, Comamonadaceae bacterium B1
atggaccaccacaccctgagcgccctgcgcgagcgccaccccgcttggcggctgctggcgtcggcgcacgcgccgctggtggcgggttttttgcaccgggtgttcgtgctgcccaacgtgcgcctgatgaacgccgccgatctggccgaggcgctggaagacgagctttacgccttgcgtgagcagctggggcccgaggcctaccccaagggcgcgctggattacttgaacgactgggccgcgcccgacaagggctggctgcgcaagttctacaagccgggcaccgacgaggcgcagtttgacctcacgccggccaccgaaaaagccatcgcttggctggggcagctgagcgagcgcgcctttgtcggcaccgaatcgcgcttgctcaccctgtttgcgctgctcgagcagatcagcgccggcaccgaagccgacccggtcaagcgcgtggacgatctgcgcgccaagcgcgacgcgctcgatgccgaaatcgcccgggtgcaggcgggcgagctgccgctgctggacgacaccgcggtcaaagaccgcttccagcagttccagcaggtggcgcgcgagctgctggccgattttcgcgaggtggagcacaactttcgccagcttgaccgcaaggtgcgcgaaaaaatcgcgctctgggagggcagcaagggggcgctgctggagcagatcatgggcgagcgcgacgccatcgccgattccgaccaaggccgcagcctgcgcgccttttgggatttcctcatgtccagccagcgccaagagcagctgtccgagcggctcgatcaggtgctggcgctgcccgccgtggccgcgctcaagcccgagccgcgcacgcggcgcgtgcaccacgactggctggaggccggcgaacacacgcagcgcacggtggcgcagctgtcgcagcagctgcggcgctttctggacgaccgcgcctttctggaaaaccgccgcatcctcgacctgctgcacggcatcgagagcaaggcgctggcgctgcgcagcgccgcccccacgggcacgctgatgcacctcgacgccatgggggcgggcgtggagctgccgttcgagcgcccgctgttcacgcccagcgtcaagccgcgcttggccgatgtggcgctggagggctttgaggccgagatcgacaccgcgcgcctgttcgagcagttcgtggtggacaaggcgcgcctgcgctcggccatcgtgcaggcgctgcgccaccagccgcaagtcacgctgcgcgatgtgctgcaaaccgcgccgctgcagcgcggcttggccgagctggtggcttacctcgagctggtgcatgcgccgcccgacggcagcgcgctcgatgggctgcgggccctcgtcgatgaaagcgtgaccgaacccatcgcttggcaggcccacaacgccgctggccaaagcgtcacccgcgcagcacgcctgccgcgcgtgatctttacgcgctaa

SEQ ID NO: 45494 - DNA, 759 bp, Comamonadaceae bacterium B1
atgacccctccaccgcaagcccacgaccgccgcaccttgccgcccatgcacaccgagccgcccgacaccgcagcaaccctggacgcacccgaatcgccacccggcgcgccgcctaccgcgcccgagctgtcgcagctcatggtgcacctgctcaaaggcgtgctctaccgcgacgacgacgagcgcctctgggccagcctgctgcgcttgcaagcccgggtgcgcgagcaggccgccgtgctgttgctcgatctgctgctcgacgaagccgagggctacgccttcctcaaagggcgtgccgacccagacgaatccgaagacgcgccgcgcctgccccggctggtggcgcgccgcccgctctcgtatccggtcagcctgatgctggcgctgctgcgcaagcgcatggccgagttcgacgccagcgccggcgacacccggctggtgctgacgcgcgacgagatcgccgagctgatgcgcgtgttcctgcccgacggcagcaacgaagcccggctgatcgatcaggtggactcgaccctcaccaaagtgctcgatctgggttttgtgcgccggctcaagcccgctgccgccagcgcacccgaccgcggccactacgaggtgcggcgcatcctcaaagcctttgtcgatgcgcagtggctggccgagttcgacgcccgcctcgagggttatcgcaccgcgctggccacgccgtcggcggctgcggctggcaaggccgcccaaccggggggcagcgatgcttga

SEQ ID NO: 45495 - DNA, 3429 bp, Comamonadaceae bacterium B1
atgcttgataccgccacaccggggctggactttgtcgccgacgacagccgggtgggctttaggctgcagcggctcgaggtgctcaactggggcaccttcgaccagcgcgtctggcgctacgaactgggcgggcgcaacggcttgctcacgggcgacatcggctccggcaaatccaccctagtcgatgccatcaccaccttgctggtgccggggcagcgcgtggcctacaacaaggccgccggcgccgaggcgcgcgagcgctccttgcgctcctacgtgctgggccactacaagagcgagcgcaacgagctcaccggcagcgcgcgcccggtggcgctgcgcgatgcctcgagcttttccgtggtgctgggcgtgtttcgcaacgagggctacgaccaagccgtgacgctggcccaagtgttctggctcaaagacccccaaggccagcccgtgcgcctgtacgtggccgccgaacgcgcgctggccatagcggccgatttcagcggctttggcagcgacatcggcgccctgcgcaagcgcctgcgcgccagcggctgcgagctgcacgacagctttccaccctacggcgcttggttcaggcgccgcttcggcatcgagcacgagcaggcgctggagctgtttcaccagaccgtgtcgatgaagtcggtgggcaacctgaccgacttcgtgcgcagccacatgctcgagcccttcgactccgggcagcgcatcgaggagctgatccgccatttcgacgacctcgatcaggcgcaccaagccgtgctcaaagccaagcggcaggtggagctgctcacgcccttggttgcagacggcgagcgccaccaagcgctgctggccgagattgcgggctggcgcgatggccgcgatcaactgcggccctattttgcccggctcaagggcgagctgctgcagcgccgcctcgagctgctggggcaggacgccgcccgcatcgacgcccagatcgagcgcctcgaggcccagcgcgaggccgagcgcgtggatgtggcccggctggagcgcgcgctgcgcgacaacggcggcgaccgcctcgaggaactggcggccgagatccggcgcctggaggccgacaaagcgctgcgccaaaccaaggccgaccgcttccacgccctgctggcgcgcatcgacgaggccgcgccggccgacgaagccgccttcatggccctgcagcagcgcattgcccagcgcgccgagggcttgcgcgatgccgacgccgagctcaaaaaccgcgagagcgagcgcgactacgagttccgcaagggccgcgaagcgcacaccgacttgtcgagcgagatcgacagcctgcagcggcgcaagagcaacatcgacgccgcccaagtgcgcatccgcgacgcgctgtgtgcggcgctggccatcgacgaaggcgagctgcccttcgccggcgagctcatccaagtgcgcgacgacgagcgcgattgggagggtgctgccgagcggctgctgcgcggctttggcttggcgctgctggtgcccgacgcgcactacaaggccgtgtccgactgggtggagcgccagcatctgggcgcgcggctggtctattttcacgtgcgcgcgcgcaagccggtgccgggtgcggcgctgcagccgcagtcgctggtgcgcaagctcgtgctcaagcccgattcgccgcactacgaatggctggagcacgaactgcgccagcgtttcgacgtcgcttgctgcgacagcggcgagcagtttcgccgcgaagcgcgcgccatcacccgcgccggccagatcaaagacccgagcgggcgccacgagaaagacgaccgcagccgcatcgacgaccgcagccgctacgtgctgggctggagcaacgccgacaagctgcgcgccttgcgcgatcagcgccagcggctggaacagcaactggccgcactcgggcacgagctgggcgcgatcaaacaggcgcgcgacgaactgcgcggccggctggatgcactgctcaagctcgaagactacacgcgctacgccgacatcgactggatggcccccgcgcgccagatggccgccttggccgaagagcgcgcccggctgcaagccgcatccaacgccttgcaagagctcgagcgccagctcaaaaccgtgcgcgagcggctggccgaactcgagcgccagtggcgcgacaccttgggcaaacaaggcgagctcaagagcaagcacgaggcggcgctggagctgcgccagcaagtgcagcgcatcagccacgaggcgccgctgaccgaagcccagatcgagcgcctgcatggctggcgcgcggccgctttgggcgagcaccagctctcggttgaatcctgcgaccaccgcgaacaggagctgcgcaagtggctgcaagaccgcatcgacgccgaggacaagcgcctggcgcggctcaccgagcgcatcgtcaacgccatgcgcggcttcaaagaggccttcaaagccgaaactgccgaggtggacgtggccttggcggcgctgcccgactacgcgcgcctgctcaccggcttgaagagcgacgacctgccgcgcttcgagtcgcgcttcaaagagctgctcaacgtcaacaccatcaaccagatcgccagcttcaacgcccacctcgccagccagcgcgagaccatcaaagagcgcgtggcacgcatcaaccagtcgctcgaggcgatcgactacaaccccgggcgcttcatcctgttgctggcccagcccagcccagacgccgaaatccgcgacttccagcgcgacctgcgcgcctgcaccgagggcacgctcaccggctcgggcgacgagcagtattccgaagccaagttcttgcaggtcaaggcgatcatcgaccgcttccgcggccgcgaagggctgtcggacgccgaccggcgctggacggccaaggtcaccgacgtgcgcaacgcctttttgtttgcggccagcgagcgctggcgcgccgacggcgccgagcacgagcactactccgattcgggcggcaaatcgggcggccaaaaagagaagctggcctacaccgtgctggccgcgagcttggcctaccagttcgggctcgagtggggcgcggtgcgttcgcgctcgtttcgctttgtcgtcatcgacgaggcttttgggcgcggctcggacgagtcggcgcagtacgggttgcgcctgttccagcagctcaacctgcaactgctgatcgtcacgccgctgcaaaaaatccacatcatcgaacccttcgtctcgagcgtgggcttcgtgcacaacgaaggcgggcgcgactcgcgcctgcgctgcctgtcgatcgaggactaccaagcgcagaaggcgctggccggggccgaagcccgggcggtggctggtggggacgctgctggcgcggcggcagacggcgcagcaacatga

SEQ ID NO: 45496 - DNA, 1254 bp, Comamonadaceae bacterium B1
atgagctggaccaccccagccgatctgcgcgcccaggtgcaacgcctgtgggagcgcggcgagctgctgcgcgcggcggtgtccgattccagctgggtgcccctgcgcctaaacctgaaggcccccagcgcagccgacctgtccgagcgcttcgaggccgtgcgcgactgggtgcgcgccctagccgacaccgcgccgctgcgcatcgaatggcgcgactggaaccaccgcgtccaaggcgcgcagcggctgccggcggccatctggctcgacaccctgcacgaggccttggccttcatcggcaagctgcgtcaggcccaaggctttagggccctgtggaagcagaccgccagcgcgcagccggcgcttctggcctacctgagccgccgacccatccaagcgctggagctgattgagcgctggccgcgcctgttggccgtggtggcttggctgcaagcgcacccgcgccccggcgtgtacctgcgccaactcgacgtgcccggagtggacagcaagttcatcgaggcccatcggggcgtgctgaccgagctgctggatgcggccctgccgcccgaggccatcgacagccaagccagcggcgtggcgcagttcacgcgccgcttcggctttctggacaaacccgtgcgcatccgctttcgtctgctcgacccggcgttgcccagcctgccgggctgccaagccccggcagccttagcaccagccgccgtgccttcacccgctgcgcttgccgccgtgccgctcgccgccctgcccgacatcaccctcgatgccgccagctttgcggccttggccttgcccgttgagcgcgttttcatcaccgaaaacgagaccaacttcctcgccttcccggcgctgccacgcgccctcgtcgtctttggcgccggctacggctgggaggcgctggcccgcgccgcgtggctgcagcgctgccagctgcactactggggcgacatcgacacccacggctttgccatcctagaccagctgcgcggccagttcccgcacgccgcgtccatgctcatggacatggacacgctgctggcccaccgcgcgcactggggcgcagagcctgaacccgtgcgccacgacctgccgcgcctcacccccgccgaagccgccgtctacaacgcgctgcgcttcgaccagctcgaaccccggctgcgactggagcaagagcgcgtcggctttggctgcctgcgcgcgctgctggcgcgcatgagggctcagacttag

SEQ ID NO: 45497 - DNA, 1632 bp, Bifidobacterium longum; identical to SEQ ID NO: 42480

SEQ ID NO: 45498 - DNA, 684 bp, Bifidobacterium longum; identical to SEQ ID NO: 42481

SEQ ID NO: 45499 - DNA, 3549 bp, Bifidobacterium longum
atgatgcaggcgacagacgtgcagatgatcgcggaccggtggatgctggaatcccgccgactcatcaactggggctcctatgagggctaccacgaattccgcccctccacggaccacaagctgccggtgaccctgctcgccggcgccagcgaatccggcaaatccacgctggtcgacgcgcagatctccctgctgtacccaaccggcacgccgttcaacaaggcctcgaactccggccgctccgaacgcagcgactacacctacctgcgcggcatggtcggcgtgggcagcaccgaaaccggcgacgagccgctctacctgcgcggccgcgacgagaacggcgcaccgcaacccgtgtggggcgccatcgtggacacctatcgcaaccagaccaccggccaggtgctctcctgcgccaaattcctctacctgatgcccggcgacggccgcggcgacgtgcgccgacagtacgtggtctggggcaagcccgtggaccccaggcgcatggaccaataccgtgacgccccgttcacgccggcccagctcaaagccacctaccccgactgcctcacattccccagcgccgaagcgttccacacacacatctggagcgcaatgggcctgagcgaggccgcctgccgactgctgcacaagatccagtccgccgacgcgccctcccggctcgacgacatcttcaaacaaggcgtgctcggcgtgcccgaagccctggacctggcccgcaccacggtcgaggactacgaacgttacgacgagaacttccacgccatggacgagaagacccgccgcatggacacgctgcgcggcatccaacaggcctacggcgaatacgccgccgcacgcggcaaggcccgcgccttcgaaccggtcaagccggccgtcgacggcacggtgccggccgtgctgcgcgactgggcattggcccgcatgcgcggcgaagtcgccgtccaactgcccgccgaccgcgccgaacaacagaacagcgaggcggaagccaagctgctgcgccgccgaaccgaagacctgcgcacccgtctcgacatgatccgaggccagatgcagggtctggacggcggcgacctgacccgactcgaactcgaactcgaccaggcccgccgcaccctcgaagacgtgcaagccaaccgaacacgaatcaaacaaacgttcgcatccatcggcgagacgctgcccggcgacgaacaggcctggaacgaacgccgcatcaacgccgtgaacttcaaacgcgaatacaacaaacgagacggcgaatgcgaggaagccctcaccgccgccatcaacgcgcgggccggcgcacgcggcgacctcgaacgactgcaacgcgacttcgaccggcaacgctcccagcgcacccgcatctcccagcagatggacgaaacccgcgccatgctctgccgcgccaccggactcacccccgccgaactgccgtacgtggccgaactcatggacgtgaacgaacacgaggaagactggcgtctcgccatgaacgtcgcctacgcgcccatcgcccagaccatcctcgtcgacaagcgccacgaacagggcttcgccgccaaagtcagcaccatcgacccgcgcaccatgccccgacgcacctggcagttcgtggacaccgcacgccactacgacgacaccggcgcgcacgcgaacatactcaccggagaacaggacggcgactggctgtccggcaaactgcgctaccgcgacgactcgcccttcgccgactggctgcgctcgcagacccaggacgaacgattcgacgccctatgcgtcaccgccatcgacgacaccgaccgcaccaaccgtcaggtgcaggccgacggtcagatcaaatccggcgcacgcggccagcacggcaccaaagaccgcgcccaggtcatcggattcgtcaacgaaacctacctcaacgcgctcgcagcgcaggtcgacgccgcccgcaacgcgctcagccaagccgacaccgactacacggccgccaaaacacagtccgataacctccaccgcgaactcgaactggccaaccagctcgcctacacgtcctgggagcgcatcgacatcgccggcgcgcaacggaccatcacggacacgcaggacgccatcgcatccatcaaaaacgatcccaagctcgccgaactcgccaaacagcgcgacgaactgaacgccgaactcgaccgtgtggaacgccagcgcatcgaatccgaccaggccgcggcccgcgccggcagcgccgtcgaagcggcgctcatctggctgcgcgaccatgccgacaccggcacgacggacgccgccggtgccaccgccgacaatgacgatgacgccgcgtccggcccgctgccggacgaagtcacggcggcgctcgccgaatcctacgacaaccgattcgccggactggcggacgccgccatgcgcgcgcacatgatcatcggcgcgggcgcggcaggaacgcaggcaccgggggagagcttccccgaacgcaccatcgccggcatcggcaaggacatggcctcccgcatcaacctgctgaacggccaggccgatgccgcacgcaccggcgtcgaatcgaaaatgagcacctacatcgcgctctacgcggccgacgatgattcgctgaccgccagcgtggaggactaccggtactatctcgacgaactcgccagcctcacccagctggccgcggtcgccgccaccgacgccgaataccggcgctgcctcgaacagctgctcaggagcttcctgaccatcaaacgcgccatcgacacggatgccagcgacatccacgaccagcttgaccgcatcaacgccatgctcaaaggccagcagttcggtcccaagcacggcagcctgtccctgcacgcggacgtgcgccgtcccgagcgcaccttctgggcgcagctcatccgcgtcatcggcaccctgaacgattggaaatccgccgacgtcaacgattccgacgcctcgcgcaaggctttcgcggcctgcgcgccgatggtcgggctgctgcgcgccgaactcgcgcaggtcaaggacgcgaacggcgtgaaaagctacggcgcccgcaacctcgacccgcgctgccgctcgtccttctacgccatcgtgcatcatgccgacggcccggatgaacgcatcacctccaccggcggccgttcgggcggcgccttgcaggagctcacctcattcgtatacggcgcggcgctcatctacctgctcggcggcggcctgaccagcgagccctcgtacaccacgctgttcctcgacgaggcgctcatcaaggccgacggccgttacacgcagcgcgccctcacggtgctgccgcgcctcggattccaggtcatcgtctccgccccggaaagcaagaccggcgaaatcctcgaggtctccaccaaggcctacgtgacctacaaggaccccgacaccggcctcacctccctgcgcgaggccgtgctgcatcagaatgacatggacgatgaatcatcgtcggatatattgaaggatgacggggttgccgaatga

SEQ ID NO: 45500 - DNA, 1185 bp, Bifidobacterium longum; identical to SEQ ID NO: 42479

SEQ ID NO: 45501 - DNA, 1353 bp, Pseudomonas aeruginosa; identical to SEQ ID NO: 43741

SEQ ID NO: 45502 - DNA, 663 bp, Pseudomonas aeruginosa
atggatgatgaacagcctctcatgagcgccgctgtacaggtcgatgagcgccggacgccgcaacgggtacgggaggccgtacaggaaatgctcaagtacggtctgctggaagagagtcacaagcccaacctgtatcgctcagcgctttccaatatcgaggcggtcgacagaatcctggagccgctcgaccttgccatgggggtcgacgaggttcgggggctgttgttcgttatcgttcgccagggcgaggtggccgagcaggatgactggtcgcaccccctagtgcgtcggcaaaggctgaatctggagcagtctctgctgatagccatcctgcgccagcagttcatcgcctacgaacaggaaagcggtacgggcgccagtcaggcatcggtagtggtcgatgagctgattccccaattgcaggtttacctgggcgagctgggcagtgaggcaaaggagcgcaatcgcatcatcacgctgctggatcagctcaaggggcatggcctggtgtcggctttggacgcccatgatcgcgtcatcatccgtcccatcattacccacttggctaacccggagaacctgcaggcactcgtggcatggctgcgagagcaggtggagggcgcggcgacgccggctgccgatggcgaggaggatatggcatga

SEQ ID NO: 45503 - DNA, 2940 bp, Pseudomonas aeruginosa
ctgggggccgtgctctggttcgaaggcacaagctcctcggcatcggatctgaaaaaactgtggctgttaagcgagtcccccgagcagactctggagcattggctcagccagcatcacgcaggcggtatgcgggctttgcgtcagatggagaaggatgggacgggtatctggccttatcccagcaagaaagctttcttggccaggctgagggattacttcgaggtcggtgaaaacgcattcaccttgctcaaccgcgctgccggcctgaagcagctcaatagcattgacgagatctttcgcgagttggtgctggatgaccgttccgccttcgagcgggccgccgaggtcgccggcagcttcgatgatctaaccgacattcaccgagaactggaaacggctagaaagcagcagcgctcattgcagccggtcgccgatggctgggagcgttaccaggtcttgcaagaacagctgcacgataagcaggctctcgaaggtatcctcccggtttggttcgccgagcaggggtatcgactgtggttggctgaaaccaacaggctcgagaaggagtacaaaaaggccgaactggatcaggagcaatgcaaaagtcagcttgaggcccagaaaggtgtggtcgatcaacatcgccagcgctacctgcgagtagggggcgcagggatagatcaattgcgcgagcgcatcgctgattgggtgagggagtgcgataagcgcagcctgaaagccgagcaataccaactcttggccaaaggccttggactagcggatgagttatcggccgctgctctcaaggagaatcagcagcatatcgcggcacgcctggaaatactggaccaacaaattactgacgcgcgccaaaaggcgttcgacgcaggcctcgtccagcaggaactcaatggtcgcctacagaccttacagcaggagggtgctgaggttgagaaacggccaggctcgaacctgcccgggcaatttcatgctttccgaagcgatctggcgcaggcgcttggtgtcaatgagtcggccctgcctttcgttgccgagctggtgcaggtcaagcccgaggagctggactggcgtggcgccatcgagcgggcaatcggtagccaccggctacgcatcctggtgccgcaggactcatcccaggccgcactgcgttgggtgaatcaacggcacaaccgcttgcatgtgcgcttgttggaggtacaggagccgacgtcgcgccccgtgttcttcgacgatggttttacccgcaagctgaccttcaaggagcatccgtaccgagaagccataaaggcactgctggcggacaatgaccgccactgcgtcgaaagcccggagcaattacgtcatacccctcatgccatgacggctcaggggctgatgtcgggcaaagaacgcttcttcgacaagcaggaccagaagcgtctggacgaagactggctgaccggcttcgataaccgtgaccgtctggccttcctggctgagcagattcgcgaggtcaatgagcggctcgagccagccaagctcgccttggatgctgcccagggcgacgttcgtcagttggagactcaagcttcgctgctgaatcgtgtcaaagaactgcagttcgaggatattgatctgccgggtgcccagagtcagctggagtcgctgcgtacgcaactggccaccctgacgcgccccgattctaaccttgccatgatcaaggtcgagctggatgcggccgaggccctgcaggagtctctggatcaacagctccgccaactgatcgaacagtacgttcagttaaaaactcagtttgaccaggccgcatccgctacccgtaaggcctataacagcgcggagaaagggctgaacgatacgcagcgtgaactggcgcaagcgcatttcccgactctgaccgcggatgacctcggcgatattgtcgagctggagcgcaagcatacgcgtgagcttcaagggcagctcaaagcgcttggcgagaaactgggcgatcagaaatcagagcttgccaaacgtatgtctgatgccctcaaggtagacaccggggcgcttgcagaggtcgggcgagagctggtggatgtccccaggtatctggagcgtctgcgtgtgctgaccgaggaagccttgccagagaaactcaagcgcttcctggaatacctcaatcgctcctcggatgacggcgtcacccaactgctcagctatatcgaccatgaagtctcgatgatcgaggaacgcctggatgacctgaatagtacgatgcagcgtgtcgactttcagcccggacgctatctgcgcctggttgcaggcaaggtcatccatgaaagcctgcgcaccctgcagcgcgcccagcgccaactgaactcggcgcgtttcatcgatgatgaaggcgagagccattacaaggcattgcaggatcttgtggggttgctcaaggacgcctgcgaacacagcaggaatcagggagccaaggcgcttctggatccgcgcttccgcctggagttcgcagtatcggtgatcgatcgagaaagcaggaatgtcatcgaaacccgaacaggttctcagggcggtagcggtggcgagaaggagatcattgcctcctacgtgctgaccgcttccctgagctatgcgctttgtcccgacggcagcagccggccgttgttcggcaccatcgttctcgacgaggcgttctcgcgcagctcccatgcggttgcaggtcggatcatcgctgcgttgagggaattcggcctgcacgctgtcttcatcacgcccaacaaggaaatgcgcctgttacgccaccacacgcgttcggcagtcgtcgttcatcggcgcggcctggagtccagtctggtttccctgagctgggaagctttggatgagcatcatcaacagcgcatcaaggccatgcatgaagtcgcccactga

SEQ ID NO: 45504 - DNA, 1182 bp, Pseudomonas aeruginosa; identical to SEQ ID NO: 44163

SEQ ID NO: 45505 - DNA, 681 bp, Vibrio sp. JCM 19241
atggataacaaaacagattggggtgcttctgaatcacgggaccttgcttcagtacttgaggaaatagaaacatatgaagtcgagcatgagttaaccaccaatgaggaactgagagttgcttaccaagcattgtctcgtggaatcatctatgcggatacacagcaagcgttgtataccattatttctaacaatgtgaagcaactgaatgagcggtttgagtttgatggtgcccgactacttatcaacacaacttttaattttgcttatctcacaacgctcaagactgaggctggtgagtcactaccaaacttactgcgcactttaagacttaataaatacgactcgtacttgtggattttcttgcgcagtgaatttgataaagcaatgcgattaagtggtgaggcaataataaaagaaagtgaaatcattgctcaactagatcaaattgaacctagctcggttcaggataaacgaaagcatgacagagcgatgagcagcgcgattaccaagtcaattgacaatggagtgttaaaaaagctcaaacttatgaaaaatgacgagcagcgctaccttattcgccctttgatttcagtcgtaattggtgcagagcaagtggacacctttttatcccagttttccaacccaaagagtgattcagtagggggagactccaatgcttga

SEQ ID NO: 45506 - DNA, 1452 bp, Vibrio sp. JCM 19241
atgaaaaagttctatctcgaaaaattccaaatatataattggggtactttcagtggataccacagtttcaatatatcaaagcttggaactgttattactggccaatcaggtgcaggaaaatctacgattctagatgcgaattcggcattattggtgccaccgatcaagcgtcgttacaacttagcctctactaatgatggtaagaagcgctctgaccgtaatgatgtgacttatatgttaggagcatggagcaaaaagggtgataacaacaaccaagaaagaacacagtttttgcgtaccgcaccgaattattcggttttggctcagacttataaaagcggtgatggtcgaacggtaacgctatgccaactcatataccttaacaaaaaatcgatggctctggatgatgttaaacgcgtttatttgatcatcaaccgcgatttcagcatcaaagaaatcaaacattttgagagcttaaaacagctaaaagctctactaccaccagccaaggattttcgttactgcgatacgccgactgagtacttcaatctgctgcgcgaagagttaggtattgattccgaaaaagcattatcactgttgcataaagcacaatcggcaaaaaacctaggtaacattgatgcattcttgaaagattttatgattgatgaacccgagacttatgatgtcgtaaggcaaatgtccacacagttcataaacattaatcaaacctatgaacatattcgctcactggaaaagcaaatagagctacttgaagagatcgatggttttgagaaagaattggttaatttgaagcttgaagagaaaaatgtaacttcgaatcgtgactatcggcaaagtttttctgacctactcaaacgagaaatatctatacgtgttttcagtcatcttgaaacggacctaacgcgccttaacgctgaaatagagtctaatcgtgaaacattagctaagcacgaaaaaacactaatcgatctaaacgttgaatatcggtctgcaggtggcgatgctatcgccaaattaaaaaacacgcagcaagatattatcgattctcagcagagcattaaaacttcacttgatcaatttaaaagcgctttgaagaaatgtgacattccgtctgatatcactgatgaacaatctttcgctgaagctttagtaagatgtaggaaaaaggaacgagaacttgagagagtttcaaagtcactgtttaaagatgctggttacgcgtcggtaaagttggaggagcttgaagagcaaaaggaaaacgcagaaactgatctcgcactcatgaaagattcaaactccatgattgatggacatgcagctcgtattcgtaacgaaatctgtgagcacctcggcttgaatgttgatgatttaccatatgcagctgagtatctgcgtattaaaaaagtgagatgcaatggacaggttcaatag

SEQ ID NO: 45507 - DNA, 1095 bp, Vibrio sp. JCM 19241
atgctaattcaactgtacgtgaatgaacgggagttaccaaagttccctatcatgtcgatgactacacaagtttttgcggcgaatatcgatcggttaacagggttttacagtgcgtggaaacatcatcctctcaacgagtatgcacaatggcaagatagatcctttcaaaagtggggtaatcaaccctaccctaaagagttgaaatttgaaaatattgaagcgctatttcaaataacgggtttgctttctaatctcgaacaattactggataagtacaaagcacttatattattgaataggcgcttgtcgctactactcaaaaaatgtgttcggtggtttgttgcagcttctatgatagatgttaaacacctaataaacactgctgactggtttgttgagaaccccaatagcggtttgtatatgcgacaggtagatattgaaggcgtgcacactaagtggattgagcagaacattacacctctattcaccgcgttaaaactaattaacaatgacgataccgaattgagctttgaagcatatacgggtcttatgacaccaccggcaactgtgcgcttcaggctaataggctgtgaactagatgatttttttcacggtgccaaggatatcacgatgcctattaaggatttaaacatcataggtagtaagcttggtccactctgtcctgtcatcgtaatactagagaatgaaaagccaggcttgtattttaataatatagaacatgggatatgtatatttggtttaggtaatgcagtatccatacttgaacaggtcgacttcattagacagtgtcctaggatcttatatattggagatttagacattgagggcttatatatactgaaccgacttcgtaaacgtatccctcaagttgagtctcgttacatgagtatacaaaccttcattgttaatgaggcgtcagccgttacttatagacctagttttacaaatgagtcgttagatgctctaacagatattgagcgtaagctgtttgattaccttagtgagagacaaagctccggccgtaagagtcgactagagcaggaatttattcaattggcagatcgattgctgtga

SEQ ID NO: 45508 - DNA, 1443 bp, Mycobacterium kansasii 662; identical to SEQ ID NO: 42193

SEQ ID NO: 45509 - DNA, 579 bp, Mycobacterium kansasii 662; identical to SEQ ID NO: 42194

SEQ ID NO: 45510 - DNA, 3399 bp, Mycobacterium kansasii 662; identical to SEQ ID NO: 42195

SEQ ID NO: 45511 - DNA, 1161 bp, Mycobacterium kansasii 662; identical to SEQ ID NO: 42196

SEQ ID NO: 45512 - DNA, 1443 bp, Mycobacterium kansasii 824; identical to SEQ ID NO: 42193

SEQ ID NO: 45513 - DNA, 579 bp, Mycobacterium kansasii 824; identical to SEQ ID NO: 42194

SEQ ID NO: 45514 - DNA, 3399 bp, Mycobacterium kansasii 824; identical to SEQ ID NO: 44448

SEQ ID NO: 45515 - DNA, 1161 bp, Mycobacterium kansasii 824; identical to SEQ ID NO: 42196

SEQ ID NO: 45516 - DNA, 1455 bp, Thauera sp. SWB20; identical to SEQ ID NO: 41906

SEQ ID NO: 45517 - DNA, 684 bp, Thauera sp. SWB20; identical to SEQ ID NO: 41907

SEQ ID NO: 45518 - DNA, 3423 bp, Thauera sp. SWB20; identical to SEQ ID NO: 41908

SEQ ID NO: 45519 - DNA, 1326 bp, Thauera sp. SWB20
atgagctggagcaccgcgcaggacctgagggcgcaggtgatgcgcctgtgggagcgcggcgagctgctgcgcgaggggctgccgcaggacagcggcgcccccccgtgcgcgtgcttgccggaggaggagagcgagggctctggcgctcagccttgcgagctaccggccgatgccgcggcgtacacggccgtgggaccacctgcaggccacagccgcttcccgctgcgactcaccctgaagaccccaacctcggacgacatcacccgccacttcgatgccgtgcgcgcctgggtcgcggcgatctcggccacgccccatgtgcgcctcgaatggcaggagacccgccaccgcgtgcagggcagccagcgcctgcccgcgagcgcctgggtcgaccgcctcgacgacgccctggcctggatcggcaagcgcgccgaggacgcgcgctttcgtgcgctgcacgccgagactgccgcacgccagcccctgctgctgccctggctgcacaagcgcccgctgcgcgcgctcgaactcgccgccgagtggtcgcgcctgctcgacgtggtggcctggctgcaggcccacccgcgcccggacgtgtatctgcgccaggtcgacctgcccggcatccacaccaagttcatcgaatcccagcgcggcgtgctcgccgagctgctcgagctcgccctgcccgcggcggcgatcgacccgagccgcaccggcgcgcagcagttcgccgcccgctacggtttcctcgacaagcccgtgcggctgcgcttgcgcgtgctcgacccggcgctcggcctgctccccggcgcgccctgccccgacctcgccctcgacgccgacagcttcgcccgcctgcgactcgacgtggcacgcgtcttcatcaccgagaacgagaccaacttcctcgccttcccccgcgtcgacaaggccatcgtgatcttcggcgccggctacggctgggaggcgctcgcgcgcgccacgtggctgcagcgctgcccgatccactactggggcgacatcgacaccaacggcttcgccatcctcgcccagctgcgcgcccgcttcgcccatgtcgaatccctgctgatggaccgcgccaccctgctcgcacacgaggcgctgtggggcagggaagacagcccgcgcccggccgacatatcccgcctcaccaccgaggaacgcagcctctacgaagacctgcgcgaccaccgcatccgcccgtccctgcgcctggagcaggaacacatcggcttcggctggctggaaaaatggctgaaaatcgtccatttgatggatgattttcagccgtacggcggttga

SEQ ID NO: 45520 - DNA, 1473 bp, Corynebacterium singulare
atgtctgttgaagcacgcgcgctgtcactccggcgcttgatgcatgattccgccgcgattcggctcctcgctgcggataatgcgccggtgattctagcgttgattgcggagtactttccacgcggcacacgggcgcgtccggcggcggaagtctatgagctcatggtcaccgatttcgaggtgattgccagcgagtttcccatgccgcgcaccccacaaaactattgcaatgactgggtcaaggccggttggttggtgcgtaaatccggaaggagtacacgtggtgaaacactcgagcccagcgaggaagccctatcggcgttggaagccattgagcgctgggaacaaccggtgaccacagtgacggcctcgcgtgtggaatcaattagctcagcgctgcagaggttggcgcgggataccaatgaggacatcgccagccgcgtggccagtttggaggcagaacgcgcacgcattgaccacgagattgaaaaagcacaactgggtcagtttgaaaggctcactgccgccgagactgaggagcgagtccaggatgtgctcaatatggctatggcggtaccgagcgatttcgccagagtccgccacgatcttgaagcactcaaccaccagctgcgccggcagcttttggatccggagggctaccgcggtgacgtgctggaggagatcttcaacggcgtggaccacatcgcagaatcggatgcgggccgcagcttccagggcttttattccctccttatggatagggagcgcagcgcctggctggaccagtggattgagcaggtgctcgatagcgacgccgggaaagacatcacgccggagcggcgccagcagctgcgccgtctctttcgcgatatggaagaaaccagctttgaggtcaaccagaccatgacgggtttggctcgcagcctgcgccactacgtgtcctcggagcagttcgcggaggaccggcgcatgattgagctgctgcgggaagcccgcggcatggccattgatgccgcgcaaactagtgagctcaaagcctttcaccgaatggacacgcccctgcagcgcatcggcatgtctattcactcggtctcccgcattcgtctggctaaccctggacgggaggtcgtggaggaagcacccgtggcctaccaaccgggcgaagacgacgcacacgccctttacgagctggtacgcgagtccgagatcgatttcgaggagctgcacgaggcgattcggcagactgtgagcgactctggcccgtgcaccatcgcccaagtcttgcaggcccatcccgcaacacagggtctcgccagcgtggtgggattggtccacattgctgaccaacatccgctgcctgcggtgcgggaggtcagtgaaaaggtcacatggaccgaagaagacggttctcttcgtgccgcgcagattcccactatgtatttcgatcacacaaccgttgaggagcttcagtga

SEQ ID NO: 45521 - DNA, 651 bp, Corynebacterium singulare
gtgaccaccgccaacagcccccgcgtggattccgcgcacgagcccccgctgtgggagcacgacaaaggaacgttgacctaccactcgcgccgcgccttggtgcagctgctccagggcccacttatccgcgcgcagaaggagccagtgctgtggtcagcaattatctctgatgaagagaatctgcgtgcccggctgcacgaggtgtttttggagctcgtcatcgatgagaccgagggatttgcttttactcgcatggtggaagaggacagcctgagcatcccgcaagtgctgcgcacggacaagctcaagcacatcgataccgctatcttgttgaacctgcgccaggagctcggcctcgcattgcccggcgagcgcgtcatcgttgacgtagaagatctccgggagagcatcggctatgtccgcgcggtggataaccgcgacgaggccggattcaccaagcgcttcaacgcagcaataaagcgcatccagaatgactattccctgctgagcgcgacggagaccgaaggccggttagaagtttcgccggtgctgcgccagcttttcgacgcctccacggtcaccgccatccgggatgaatacgcccgcctggcgcgagccgaggataccgaggaggacacctcagatgactaa

SEQ ID NO: 45522 - DNA, 3369 bp, Corynebacterium singulare
atgactaagcacacggacctttacccaggccagttccgcatcagccgcatccagctcatcaattggggaaccttccacggctatttttccatcccggtagcgcggaaaggtttcctcatcactggtggttcgggctcaggtaaatccacgctgctggatgccatgtcagcggtccttgtcccccagaaccacgtgaaattcaacgcggcctcgcagcaagacctcgggcggcacaacggccgcaatttggtctcctacgtgcgcggagcgtggcggcagcaggagaatacgcagaccggtgagattaccccggaatacctgcgcgaaggtgccacaaactcggtcgtggcgctgacctatgacaacggccaaggcaagcagcacaccctcatcgccatttttcgcctcaatggcggggagaactccgtaggccaggtaaagaagttgtacgggctggtgccgggcgatgaggacgtcgataagctcagccccttgctcacccgcagcctggatagtcgcaagatcagagcgctgtataagggccccggcgcgtcctttacgccaacctacgccacgtttgcggaccgcttccgcaaacgcttaggtattaagaatgtggagggccagctccttcttcaccgcacgcaatccgcgaagtctctgtccagcctggaccagctctttagggattacatgctggatgtgccggataccttcaccagagcggatgaagccgtggaacagtttgaggatttgcgccaggcctacctgcgggttgaggacgtcaaggcgcagatagatacgctcgcgccgctgccccaacttcactctcagcggtctagcgctgaagcggataaggagaaagcagaggccatgagtgaggcgctgccggcagtacgcacgcgcctggtggcggaagaattggactacctcatccgcgcattcacagcacagctggcagaggcccagtcccaggccgaagcccttaacgcggaggtcgcacacttggatgacgccgaacgcctggccgcggtggctgttacccagctcagcgctggcgagctcgatgccttaagcgccaagatggaaactgcggacaaagaaattgagcaccgcacgaaggaattccaacgcctggctgcggccgctggagcgtggaccgatgattatgagttcagcccgcacggcttcgccgagctgcaagccaacgcgaagctgcgcatcgcagattttgaggttgacttcgccaaactcaccaacgagcaacaggaagccggcgtagccgcccgcgacgctgccaccgcctgcgccgcgctcgatagcgagctgcgctcatttagctcccggcgcaccaacatcgacaaagccttagtagaactgcgctcccagctggctcgcgataccggctatgccgaatccgagcttcccttcgccggcgagctcatcgatatcagcccgcagcaggcggactgggaaccggtaattcaaaagctccttcacggttttgcggccaccctgttggtgcccgaggccgcccgcgacaccatcaaccagtgggtcaattcgcgcaacgtgggcacccgtttggagtaccgcaccattccggagtttgcttcaccaccggcgtccgcacgcagcccgcggcagcttatccacaagctggaattccaggaccacgccatggcgcactgggttcgccaacatatttcgcgccgcttcaactacgagtgtgtggactcggttgcggagctagacaaggtcaccaccaccccggcggtaacgcgcgatggcctggaaagccgccccaaggataaggacggctcaacccgcttcatcaaggatgaccgcaagcgttttagcggcactgcctggtaccgggtgggttccaccaacaccgccaagattgagctgctgcgcgcccagctcacggaggccaaggccaccgctcgtgccacggccaagcaggttcaaaacctcaaccggaagatggacattctgcgctcccagcgcgataaagcccagcaggtgctggaaacctccttccaggacattgacaccgcctccgccgaggctcgccggcgggatctgcaggagcagtatgactcgctggcctcctccccggaggcccaagccttagccgcagcccacgagcaggccaaggccaagctcaaggacgcacgcgcccggcagaacgccgcccagaaacacctgggcaacatcgaaaacgagctagagcactccacaaagcgccgccgcatcattggcaccgtgcctgacatcgaggaccaggacatcgcgaaggctgtcgaagaggccctgcacaaaggcaagcgcaagctcaccatcgatgacatcgacgcccggcgcgatgaagtgcaggccagcctccagagcaccgcccggaccgccacgcgcagcatagaggacgccaacgcgaaaattgtctccgtcctccacacgtatctggcccagtggccagcggaggccgcggaccttgagccgcaggcgagcttcgccggcgagggcatagagaaactccggttcctgcgcgcggaccgcctggcggatttccgctcccaattcctcgagctgctcaacggctccaccgtgcgtaacctctcgcacctcaccacggacttgcgccgtgcgcgcagcgatattgagatgcgcatggagttcatcaacaagtccctggagcgctcgcccttcaatggggagcgcaccttgcgcatcgacgtcaaggacgcccgcggccaggtggtccaggatttccagcgggatcttgatgccgccacctcccacagtttgggcgaaatcagcgaagatgatacagaggccgcccttgcgcgctaccacgctttggacaagatcttgagccgcttgggctccagccagccggaggatatccgctggcgcaacgtggtgctggatacccgcaagcacgtcagcttcgtcggccgcgagtgctacccggatggcaccacggccaacacctaccaggattccgcctcactgtctggcggccaggcgcaaaagctcgtcttcttctgcctggccgcggccctgcgcttccggctggcggagcctgatcaggacgtgcccacctatggctccatcattttggatgaggcctttgaccgcgccgatcccacgttcacgcgcacggccatgtcggtctttacgtcctttggcttccacatgattctggctacccctttcaagctcatccagacgctatctccttacgtcgatggcacgattgtggtcaagtacgacgaacccaccatcaatggccgcccacaggcgcgcacgggctattcgcttatcgacgcctccacctaccaggaccccgaccatgcgcagccctaa

SEQ ID NO: 45523 - DNA, 1140 bp, Corynebacterium singulare
atgcgcagccctaaagatctgcaagaccacgccgcgaaatacctacgcaaccactttgccgaagcactcgcagatccggattccttgtgcgtcgactggcccttgcacccgcccaccgctgctgctgccgcccgcgatatcgacgccgcacagaactttgtccgcgcttggcagcgctggccccaccaggaggaggttatctacgcctcccgcaattggtcacgcgcgggcctcggcacgaacaccatcccgacccgcatcacaatcaccggcgccgaacgcatcgccgatgctgcgggcctcaacgccgagtacgtccgcgcccgtgaacgagcgcacagcattgccgccatattcccgggctcccccgacttcgcccacaccgtccaccgctcctataaccagtggaaggatttaagcgcctacgacctgcgctgcctcgcaccgtgcctgacctggctgcgcgccaaccctgactccggcgagtgggaacgcgccgtgccggtcgagggtgtggacggcaagtggattggtacccaccgccgcctgctcctcacactcctcgcgccgtttggcatcacagacttgggtctgcgccgcagcgacacccgaatccgcctgcgctacctcaaccacgctccagcgctcaacgatgtcgaaatccccctagcccacgcagcccacctcttcacgaccacccctccccgcgtcctcatcgtggagaacaaacaaaccttcctggccttgcccatgctttccgaagcctcccctcccaccatcgccctcctcggtgccggcaccgccgctcaccaactccacgcactgggctggcttaaccacaccgacatcacctactggggcgacctcgacgccgccggctttgccatcctcaacgccgtacgcgcccatttcccccacacgacgtcactgctcatggacacagccaccgtcactgaattccagcacctggccgtccccgaccccggcgacggctccgccacacttacccacctcaccaccgaagagcagcgcgcctaccgccaactcttcaccgcgggccgggtgcgcattgagcaggagcggattccgttcatttatacaagtgaaataattgaaagaaaatttaaagcgtcaaaatga

SEQ ID NO: 45524 - DNA, 1470 bp, Stenotrophomonas maltophilia
atgaagcatcgcgaacgcatcacccgttaccgccacctgcgcgaacaaccgcaatggaagctgctcgccgccgaccatgcgcctgagatcatcggcctgttgcagggcctgctgatggacggcgaacgcacgctggccgcgccggtgctgcacgagcgcctgcagcgcgcgctggaccagctcaacggcgaagaactgtcacgtgaactgccgcgcaccgcgcaggcctacgtggcgcactggctggcccagggctggctggaacgccgcctgcccgaaggcgccgaccaggaacagtacgaactgtccacccaggcgctgcaggcgatacgctttgccgacagcctggaacaaagccgggttgccgccaccgaaagccggctggcgctggtgatcaaccagctgtcccagctggccgcgcagaccgaagccgatccggatgcgcggctgtccgctctgcgcgacgaacgtgaccgcatcgatgcggaaatcgcccgcgtcggcgaaggccgcgtggccgcgctggatggcaagcgggcgctggagcgtgcccgccagatcatcggcctggccgacgaactcaccgaagacttccgccgcgtgcgcgatgacttcgaacgcctgaaccgcgagttccgcgaacgcatcatcgacgatgaaggcgagcgcggcgacgtgctgtccaagctgttcgaaggcgtggacgtgatcggcgagagcgaagccggccgcagtttccaggccttctggcgcctgctcaacgatgccgaacagagtgcacagctggacgccgcgctggaatcggtgctggcgcgtggcttcgcacggcgcctggaccgcaacgagcgcgcgttcctgcgcggcttcaccggcaccatgctggaacgcggcggccaggtgcacgatgtgctgcagcacttcgcgcgcagcctgcgcggtttcgtgcagagccgcggctacctggaacagcgccgcctcaaccagctgctgaagcaggcccagggcgaagcactggccctgcgtgacgacttcccggcccagcgttcgatcggccgcgacctgcagctgaccaccagccgcctgcgttcgtggtcgcagtggaagctgcatgatccgcgcagcgcccaggtcgatggcagcgtgcagcgcaatgatgccgccgcgatcagcctggaaagcgtgggcgatctggtggcatcgtccgaaatcgatttccgtacgctgcgccgcgacctgcatgacctgctcggcatgcagccgaagctgagcatttcccaggccttgtcgcagcgcgaagcgccgcagggactgggcagcgtgatcggctatctgtcgctgggcacgcgcttcggcaccgtggtggagggcgagcaggagctggcccactggcgcggtggcgacggccaatggcggcgcgcccgcatcccgctggtttggttcacccaggagaaacgccatgagctggaatga

SEQ ID NO: 45525 - DNA, 702 bp, Stenotrophomonas maltophilia
atgagctggaatgaagatccgatcgaatcctcccgcctgggcgagggcgaggatgccttcgacgccgagccggtggtggtcaccccgttgccccgccgcaacaacgacgtgctgtacctgggcgataccggccggctgccgcaggacgcacgccgcgcgctgtgccagctgctgatcgggccgagcatcgaccagcagcgccacgccaagctgtggccggcgctgctgcgcaacgaagccgccatccgcacctccctgtccgacctgttcctggaactggtgctggaccgcgagagtggtgttgccttcacccgccaggccgataccgaagatctggattcgccggtgctgctgcgcacctcgccgctgaccttcatcgactcggtcctgctgctgtaccttcgccagcaactgggcgaggccgatgcgcgcggcaaccgcgcggtggtcgccgatgccgagatggccgaagccttggcggtgtacgagaaaaacctgtccaccgatcgcgccggcttcaaccgccgcgtggccagtgccgtgcagaagatgaaggacaaccacatcctgacccgcctggcgggtcaggaagatcgccacgaagtctctcccgcattgaagctgctgttctctgccgaagacgtctccgcgctgtcggcggtgtaccgccagctgcgcgaaaccccggctgccgaagcctga

SEQ ID NO: 45526 - DNA, 3387 bp, Stenotrophomonas maltophilia
atggccatttccaagcacactcccgccctgttcaccgaaggcctgcccgacccgcgcacgcagcagttccgcatgcgccgcctgcaggtgcacaactggggcaccttcaacggcctgaccgaagtgccgatcgccgagcgcggcttcctgttcgtgggccgctccggctcgggcaagtcgaccctgcttgatgcgatgtccgcgctgctggtgccgccggccatcgtcgacttcaacgccgccgcgcgcgaagccgagcgcagtggccgcgaccgcaacctggtgtcctacgtgcgtggcgcctgggccgaccagcaggaccgcggcaccggcgagatcgccacccagtacctgcgcaagggggccacctggaccgcgctggtgctggaataccgcgccggcgatggccgggtggtcagcctggtacggctgttctggatcgccggcaacggcgccaccgctggcgatgtgcgcaagcactacctggtggccgagcgcccgttcgacatcgccaaggatctcggcggcttcgacctggacctgcgcaagctgaagcagaagctggcagacgtgcaccacttcgacagcttcgccggttatgccgagcgcttccgccacctgctcggcatcgacaacgaaatggcgctgcgcctgctgcacaagacccagtcggccaagaacctcggcgacctcaacgtcttcctgcgcgacttcatgctggatacgccgaagaccttcgatgccgccgagcggctggtcaacgacttcgccgaactggatggcgcgcaccaggccgtggtcaccgcacgtcgccaggtggaaacgctgctgccggcgcgcgagcattacagcgaactgaagcagatcaagcgccgtcgcagcgacgatgaagtgctgaagctgggcatcgacagtttccgcgaatcgcgccgccagcagttgatcgatgcgcgcctgcgtgaactcgacacccgcgaccgtggcctgctgggcgaggaatcccagcgccgcgccgccctcgacaaccataccgccaagctgggcgagctggagctgcagcggcgccagcagggcggtgagcggatcgaggaactggaacgcgaacagggccgtgccgaagccgagcgcgaccgtcgccaggccaagcaggcccaggcccgcgatgccgccggacagctgcaacaggcgcttcccgaggatgcacatggcttcgccgcgctggtggagcaggcgtcgaccgagctgctggaccgcaagcgcgcctcctcggcgctggatgatgcgatcagcgaacggctgggtggccggcgcgatgacgagcgccgcttcggcgacgtgcgtgccgagctggatgccatgcagcgcaatacctccagcatccccgcgccactgcagaaactgcgtgcacggctggtggaggaaaccggcctgcccgaggcggcgctgccattcgtcggcgagctgatccaggtacgcgaggatgacctgccgtggcagggtgcgatcgagcgcgtgctgttcgggttcgcgcagtcgctgctggtcgacgacaagcattacaacgaggtcgccgattgggtgaaccgcacccacctcggcatgcgtttcacctattaccgcgtgcgtcgcaacgacgaggcgttcgcgcgtgacccgtcgccgcgttcgctgctgcacaagctggaactgcgcgaccacgtgttcgaaggctggctgcggcgcgagctgggcaagcgcttcgactacgagtgcgtggacgcgcgccagctgcgcaacgtcgaccgtggtatcacccgcgaaggccaggtcaagcatccgggcgaccgcttcgagaaggatgaccgcagcgcggtgaccgaccgccgccgctggctgttgggcttcaacaaccgcgacaagctggccgtgtacgaaaaggaagcgcaggagctggcaaagcggatcgccggctgcgacgaagacgtcgcgcgcctgcgtgcgcagcgcgatctcgacaatgagcgccgcctggcctgccaccagttggccggcatccgctgggacgagatcgacgtcgccaccccgcagcagcgcctggtcgacatcgaagcaaccctgcgcggcctgcgcgaaggcaacgcggacctggaaaagctggcccggcagatcgacgccgcgcgttcggacatcgagcaggcgcgacgcacctacgaagatacccgggtcgagcgcggccagctggtgaaggagcgtgatcgcctggaccgtgcccgccagcagagccgcgcactggtgctgccgaccctgggcgccacccaggaagcgggcctgcaggaacgcctggaagcgctcggtgcgctcagcctggaaacgctggaggcgcacatgcgccaggtcagcaacgcgctgaacgaatcactgtcgtcctcgcagcaggacgtcaaccgggtcgagaaccagctgctgggctgcttccgccgcttcgtgcagggttggccggaagagtccggcgacttcaccgtgtcggtggcatcggccgatgatttcctggcccgcctggaacggctggaacgcgacggcctgccacagcatgaagagcgcttcttcgacctgctgcagaaccagagcaagaacaacctgctggccctgcagcggcacagcgccgaggcgcgcaagtcgatcggccagcgcctggacgaggtcaatgccagcctggaacaggtgccgttcaaccgcggcaccctgctgaccatcgagctcagcgaccgccgcctgccggaagtgctggagttccaccagcacctgcgcgacgtgctgtcccagcagcagaccgaacagcgtgaactggccgaagcccagttcgccgtgctgcgccagctggtcacccggctgggctcggccgaaggcgaagacaagcgctggcgtgagctggtgctggacgtgcgcatgcacgtggagttcatcggcgtggaactggatgccgccacccgccagcaggtcgagatctaccgcagtggcgccggcaagtccggtggccagcggcagaagctcgccaccacctgtctggcggcagcgctgcgttaccagctgggtggtgccgatggccagctgccgagctatgccgcggtggtgctggacgaagccttcgacaaggccgacaacgagttcaccgcgttggcgatgaacatcttcgacaacttcggtttccagatggtggtcgccaccccgctgaaatcggtgatgacgctggagccgttcatcggcggcgcctgcttcgtggaaatcagcggccgccatgattccggcgtcctgctgattgaatacgatgaagaaggaaagcgcctgaaactacccgaacgcagccgccagcaggccaacgaacccgaacccgaacaagccgacgcgtga

SEQ ID NO: 45527 - DNA, 1470 bp, Xanthomonas campestris
atgaagcatcaggcacggattgccggctaccgccacttgcgcgaccagccggcgtggaaattgctcgccgccgatcacgcaccggagctgatcggcctgctgcagaccctgttgatggacggcgaacgccggctgccatctgcggtgctgcatgcgcgcctgcagcgccagctggatgccttgcgcggcgacgaactctcccgcgagctgccgcgcaccgcgcaggcctacctggcgcactggctggcgcagggctggctggaacgccggctgcccgaaggcgcggccgaagaagaatacgaactctcgcgtgccgccacccaggccatccgtttcatcgccggcctgcgcgagagcggcagcagcgccaccgaaagccggctgtcgctggtgatccagcagctggtgcaactggccggccagaccgaagccgacccggacgcgcgcctggctgcactgcgcgcagaacgcgagcgcatcgatgccgagatcgagcgggtggccgccggccgcgtcggtgcgctggacggcaagcgcgcgctggaacgcacccgcgacctgatccatctgtccgatgaactggccgaagatttccatcgcgtgcgcgatgacttcgaacaactcaaccggcaatttcgcgaacgcatcatcgacgacgaaggcgcgcgcggcgatgtgctggagcagttgttcaacggcgtggacgtgattgccgacagcgaggccggacgcaccttcgaggcgttctggagcctgctcaacgacacccagcagagcagccagctggaccaggcgctggacgcactgctggcgcgcggcttcgcgcgcaagctcgaccgccgcgaacgcgccttcctgcgtgggctcaccggcaccttgctggagcgcggcggcgaagtgcacacggtgatgcagcacttcgcgcgcagcctgcgcgggttcgtgcagagccgcgggtatctggaacagcgccggctcaaccaattgctcaagcaggcacagggcgaagccttgcacctgcgcgagagcctgcacgccaccaccgccaccggctacacgcaggcattgagcggcagccgcctgcgctcgttgtcgcagtggcgcctgcacgacccgcgcctcacccaggtcgatggccgcgtgtacgcggccgacgcggcagagatctcgctggacagcgtgggcgacttggtcgcgcaatcggagatcgacgtgcgcagcctgcgccgcgatctgcacgcgctgctcggcgagcgcccgcggctcaccatcggcgatgcgttgcagcagcggccggcggtgcaggggctgggcagtgtgatcggctatttgtcgctgggcacgcgccacggcctggtgatcgatggccacatggaaacggtgcaatgggaaggcggcgacggcacgttgcggcgcgcgcgcattcccttggtgtggtttacccgggagaaacgcaatgaactggtctga

SEQ ID NO: 45528 - DNA, 708 bp, Xanthomonas campestris
atgaactggtctgagcaggcagcgctggacacgcacgacgacgatgacgccgacgcacacgccagcgcgctgaggctggcggccagcgatgccgccagcgccgcgcagggcggcgcgttgttcctcggcgacaccggtacgctgcccttcgatgcgcgccgcgcgctgtgccagctgttggccggccccagcatcgacgcgcagcggcacggcggtttgtggcctgcgctgctacgcaacgaggtggcagtgcgccaggtgctgtgcgaactgtttctggagctggtgctggaccgcgaaggcggagtggcgttcacccgccaggccgacaccgccgagctggaatcgcccaccttgctgcgcagcgcgccgctgaccttcatcgagtcggtgctgctgctgttcctgcgtcagcaactggccgaggccgatacgcgcggcgagcgcgcggtggtggacgaggcgcagttggtggaggcgttgtcggtgtacgaaaagaacgtgtccaccgacagggccgggtttacgcggcgggtgatgacggccatcggcaagatgcgcgagaaccagttgctgtcgcggttgcgcggcagcgaggagcgttacgaggtgtcgccggtgttgaagttgttgttctcggccgaggatgtgcaggcgttggtggtggcgtatcgggagttgcgcgagggggaggttgctgcggactga

SEQ ID NO: 45529 - DNA, 4017 bp, Xanthomonas campestris
atgaattcccagtccaacctgtcgccggcgtcgccgggtgcttccttgtttgccgagacgctggccgagcagcgtgcgcagcagtttcgtatgcggcggttgcaggtgcacaactgggggacgttcaacgggttgaccgaggtgccgatcgcggaaaagggcttcctgttcgtggggcggtccgggtcgggcaagtcgacgttgctggatgcgatgtcggcattgttgacgccaccgagcatcgtggacttcaacgcagccgcgcgcgaggccgagcgcagtgggcgcgaccgtagcctggtgtcgtatgtgcgcggtgcctgggccgatcagcaggacagcgcgtctggtgagatcgccacgcagtacctgcgcaagggcgcgacctggactgcgttggtattggagtatcgcaacgcgcaaggcgaggcagtgagcctggtgcggctgttctggatcgccggcagcggcaatgctgcggcggatgtgcggcggcattacatggtggtgccgcgcgcgttcgatgtggccagcgagctggagggtttcgatctggatctgcgcaagctcaaggcgcggctgggcgaggacgtggcgcatttcgacgggttcgccggctatgccgagcgcttccggcatgcgttgggcatcggcaacgacatggcactgcggctgctgcacaagacccagtcagcgaagaacctcggcgatctcaacgccttcctgcgtggcttcatgctcgatgagccgcgcaccttcgaagcggcagaccggctggtcgaagacttcgccgagctcgatggtgcgcaccatgcagtggtcaccgcgcgacggcaggtggagacgctcagcccggcgcgcgagcaccatgccgcgctgatggccttgcgccgcagcgttggcgatttgcgtgaattgcagctgggcgtggacagctaccgcgagcaacaacggctggccttgctggaggcgcgcctgcaggaggtcgacagccaggaccgcggcctggccggcgaagaaggccagcgccgtgagtcgttggacaaccacgaacagaaactggccgggctggagcgcgaacagcgcgccgccggcggtgagcagatcgaagaactcgaacgcgagcgcgtgcgggtggaacgcgagcgcgatgagcgcctgcgtcgccgtgcgcagatcgagcaggcctgccgccagctcggcaccgccttggccgccggcgccagtgggttcgccgcccaggtggcgcatgcgcagggcgtgctcgatggcggcaagcagcacgccagcgcactggacgaggccatcgccgagcgcatgggcgaacgccgcgacgacgagcgccgctttgccgagatccgcgccgagctggacgtgttgaagaaagcgccgtcgagcatgcccgcaccgatgcaggcgctgcgcgcgcggctgtgcgacgacaccggcattgccgaatcggcgctgccttttgtcggcgagctgttgcaagtgcgcgaggaccaggtggcctggcgtggcgcgatcgagcgcgtgctgcacggctttgcgcagtcgctgctggtggacgagcggcattacgcgcaggtcagcgaatgggtcaaccgcacccacatcggcacgcggctggtgtacttccgcgtgcgccgcaatgacgagctgcattcgcgccgtgtcgatcccaacgcactgcccggcaagctgcaactgcgcgagcatgccttcaccgactggctgcgcaacgagctcacccgtcgcttcgattacgcctgcgtggacaacgccgcagcgctgcgcaatgccgaccgcgccatcacccgcgagggccaagtcaagcatcccggcgaccgctacgaaaaggacgaccgccacgccgtcaacgaccgcaagcgctggctgctcggtcacgacaaccgcgacaagctcaaggtcttcgagcgcgaagcgcaggcgctggcccagcgcattgccagttgcgacgccgacgtggccgcgctgcgcaagcaacgcgagcaggaccaggaaaaacagctggccgcgcataccctggtggagcgcgactgggacgagatcgacgtcggccccaagctgcaacgcctgagcgatatcgacgaacaactgcaacagctgcgcgaaggcgatagcggcctgcgtgcactgggccaggcgatcgacaccgcgcgcacgctgcgcgatcaggccaagcgcacgtatgaagacgtgcggcttgagcgcgcgcagctggcacgcgagcgcgtgcggctggaacagcagcaggccgcctgcgcaggccgtgccggcaccgccgcgctcactcccacccagttgcagggattgcaggaacgcctggccgcgttggcaccgctgtcgttagacactctggaagcgcatttccgcgtggtcgaacgtggcttggccgagcagctggccgaaagccagggccgcgacagccggctcagtgcgcagctgctcgaatgcttccgccggtattgccagcaatggccggaagacagcggcgacttcaccgtgagcctggccagcgccgacgatttcctcgcgcggctggaccggctggaaagcgatggcttgccgcgtcacgagcaccgcttcttcgacctgctgcagacccagagcaagaacaatctgctcgccttgcaacgccacaccgccgaagcccataagggcatcaagcagcgcatggacgaggtcaacgccagcctggagcaggtgccgttcaaccgcgacaccatcctgaccatcgaggtcagcgaccgccgtctggccgaggtgcaggaattccagcagcagctacgcgccgtgttgtcgcatcagcagaccgaagaccgcgcgctggccgaagcgcagttcgccaccttgcgcacgctggtggcgcggcttggcgcgcaggagccggaggcgcggcgctggcgcgagcaggtgctggatgtgcgcctgcatgtggaatttatcggcgtggagctcgatgcacagacccgcgcgcaggtggagatctaccgcagtggcgccggcaagtccggcggccagcgccagaagttggccaccacctgcctggcggccgcgctgcggtatcagctgggcggcgaagacggcgaattgccgcgctattgcgccgtggtgctggacgaagccttcgacaaggccgacaacgaattcaccgcgctggcgatgaacatcttcgagaatttcggcttccagatggtggtggccacgccgctgaagtcggtgatgacgctggagcccttcatcggcggtgcgtgtttcgtggaaatcagcggccgccacaattccggcgtgttgttgatcgagtacgacgaacaggcgcagcgcttgaaactgccggagcgttcgcgtggggaagaagtggcggcgccgccggccgaacaagggggtgctgttgcaccaggcgatcgcgcacaacgtgctccggtgatcgctgtggagtctggccacgcggcaagcgtgcacgtagcggagaccacggcagtgcctgcgcagggggatgcagtcacggacgggcagtcgcgcggcagcaagcgcacgcgcgcggcggccaccgcgttgacggcggcgccagtgcctgcgcccgctggcaagcgcagcacggctgcagctgcaacatcagcgacggccgcgccagccacgcgcgcggcggacgcgtcgaacgcacagcgcaaacaggctgcaacccctgccacgccgccgaagccaaccaagccggcgagcacgcggactgcgtcgtccggtacgcccgctgccaagcgcacaaccaccgtgaaagccgcggccgtgccgaaggcctccaaagccacgccggccgttgcggccaagcgcacgggaaaggcgccgaaagacgttagcaagccagcatccgctcagaaggtggccaaaccggtatcgaaatccaagcccacggccaagcccgcgacggcggcttccgccaagagccgcgtcgcatccacgcgcggctctgctcccaaggtgcgcagcaaacgctga

SEQ ID NO: 45530 - DNA, 1446 bp, Xanthomonas campestris
atcttgagcaccgccgggacttcgctgctgctcttcaagctactgcctggcgagcttttccgccccttggcctccccgaaccgtgagcatcactggattcttctgtgccggctgttcgatgagttcttcgggcccgatgctccaatgccacccagcgtcggcttgccgaggcgcgagatcactgcggcgattgagcgttacctgctagccgatgacctttgggaagccgaagagggcgacattcccgatgcgccgttgccagctcgcgcccagacgctctacgagcgcctccgcggtgccggttggcttcgccaagaacgggtgggagcacgtgagatggtatccatgccgcctttggtggctcaatttctctcgacgctgatcgatttcagcgagcacggcccgacctttgtctcggccaaggtccgttcgatcgagctgcagctccaccaagttgtggagggcagggcaggggctgacgcgctggacgaggcggcagaccaggcacgaaagctgctggtgtcgctctcctccatgagcctgcaggtgcgcgacctgatgcctgagctcagcaaggccgagaccaccgcgcagtttgcccggcaatggttcgagcgctacgtgggacagttctttatcggcgactacgccgacctacatcgggcggaccatcccttggcgcgtcgtagttcgatcctggccatggttagacagatcgagtcgaccgagcttggcgagcggctccaggcttggtacgtcgagcatctgagcggccacgatcccgagcgggcgagtcatcgcctgcaacgcagcctgcgtcgcctccatgaactggatcggatcgacgaatatctcgggcgcctggatgacgatattcgacaggcgaatcgccgcgccctggcgttcatcgactaccggctgcgtgcgccggacaaactggacctactgttgcagcgcgcttgtcagggagcgctgtcggcaccgggacaagcgcttcgcatgccagtgggcccgggcggtttgatgcgggcagagcgcctgcgtgcgccccgccagaaaccgcagcccatcgcccgcagtgccaattcaagccagcagccgacatccgagcaactcgcgcgcctgaacctgctgcggcggatcaagcgggcgcggctggtgacggcggaggacatggcccgttaccttggaccttacctggagcgccagccgaaggtggattcggcggacttgtccatcgattccatcgaggagttccgtgcctaccaaacgctgctcaccctggccctgcgtagccatcgccacggcggtctgcgcagggacgaccccctgggcagactgttgcgcggattccgcgtcgaactggtcgagggcgccgggcagttggagacaacatacctgcgcgtatcgctctttgtcattcaccggattcaaaaagccgtatga

SEQ ID NO: 45531 - DNA, 639 bp, Xanthomonas campestris
atgaaacgcagctggaacaccctgagtcaggcctcgaacggggtctataccgtccaagacttcgagcgtgcggcctaccgcctggtcaccgagcaggtgctctacgctagcgatcgcagtgcccgcgtggcctataacctgattgaggcgcatctggaagacttcaagtccgcgctggagccgctcggcatagcgcttgagcgcaatgcccactatcgctatgtggtggccatgccccagcacagcgagggcacgccggtgtcgctggaggagaccattctgctgctaatcctgcgtcaccgttacgaccaggccatgcgtcagggccagatcgaggagctgggtgaggtcgtggtggatctgccggcgttgcaggaggcttacccggcgttctccggcaggcagatgcctgaggtgggcgcgctgcgtgggctggcgcgcgcactcaagcgctggggcgtgtgccgtctggtggacaccgagggcgatgatccccagccattccacctgctggtgcgtccggccatcgtggaggtggtcggcgagcagtggctgcagcgtcttgaccagcataatcgcgatgagcaggatgaaccggcgcaggatccgctggcggaggatgacgatgcagctgcttga

SEQ ID NO: 45532 - DNA, 3426 bp, Xanthomonas campestris
atgcagctgcttgagcgggtccatctcgttcagttcttcttgttcgaagcccagaccctgcagctggatgccacgagcgcgatcatcgcacccaatggcgcaggaaagagcgcgttgctcgatgccttgcagatcgtcctgctgggggccgatcgcagccgcatccgcttcaacgcccaagccggtggcagcagccgggcacgctcgatccgcgactactgtcttggcgtctaccgcagcggcgaggatggccgcaagcgacgcaccgccacgacgtatatcagcctagtgttccgcgacgaggagaccggcgtgccgttgacggccgggatcgcactcggcgcctcggcggacgaacccgaccatcgggtccatggtctctacctgctccccggtgtagcacttgaactagatgaccatctggagcacgccggcggcaaggtgctgccgctgatctggagcgcttttcgtgagctgggcagcaagcactgcaggcaggaggggaccaagcacgagctccatactaccagtgagcgcttcctcaaggatctgctgctgcgcctgcgggcgtcaccgacgctccatccggacctggtggcctatcggaaggcattttctaacgcgctgaatctgcagaagcacgaggacatcgatctgttcgtgcgaacgctggttgccgaagacaggccgaccgagattgcgcgcttccgcgccctgctcgagaccttccgccagatcaaggacaagatcgagcaggtcagtcaccggatcgaggtggctgagcaggttgaggatcagtacggcaagatcgccgcgctggccgagcgggctgcttccagccgggcgctggaggcggagtatcgccgcgacctgctgtgcgagcaggtcgaacaggccgatcagtcactcacgcttttcggcgagcagttggcaggcgcgagccgggcattgcaggaggccagggctggccgcggtcgcgtgcgccaggcatacgagcaggcgcaacagcgagtgcagggaactcctggctttgccgaccaagcttcatttgatgccatcgccgggcgagacagggaccaagtgctccagcgcaagaaggagctggtccgccagatcacctatgtccgcgaccaatggctgagggtcggcaagctgaagctggaagccgtggagccggcacgcctggccgaggcgttggcgccttggcagcggtggttggacgaactcactggattggcgcacgaatcggctatccccgtctcggcagaagctctgcatgcgctggccaaatccgcactgcagcagagcgcccccattctgagtgcagtcgccaggcatgcacgcgccagccacgccgcgtgggaagacgcctgcgcccgacgtgacagcgccaggcgcaatcaggcgcgcgtgacggctgggcaatccgagctgcggtcggacgtggtgcggctgatgaactatctgcaggatgaagggattgatgtgcgcccggtctgcgacctggtgcggattatcgatgtcgcctggcaaccggccatcgaggcctatctgcgcagccacgtcgaggcactgcttgtcccggccgagcacgaggcgcgtgccacccggctggtgcgctcgctcgacgggccgcgcgcggtctacggcgtcaagctggcgctgagcagccatgcccgggccggcaaggcagatcctccgccgggggactcggtcgccagcctcattgccggcgacggcgccgatgcagtggcgtatttgcgtcgccagctgggcgaacttcgacaggtcgacagtgaccaggaagtagtgcgcacgcgccagggcctcacccgtgacggcctgatcgccaaaggaggcggtcttgaacgccgccgcttgccatccgcctccgaactcaaaattggagcgaccgacagtcgtgcacgactcaagagcctgcgtgaagagctggaaaccgccgagcaggacgttaggcgtctggagccggcgcatcgccaggccgagtcttcgcagcagacgttgtcacgccttgcagatgctgatgaggtggcctcggcacttcatgacggcctgttgcagcatcaggaggcccaagcccgctatcaaatgacccgcgaaagccaggctgcccgaaccgacccggatctggtcgagctgaccgagcaggtgcgccaactacaggaacgggcagggctgttcgacctgcagatcgagcaactggccggacaggaagccgtcgccaaggggcagtgcgatgcagccgaagccatgctcaaagcgctacgctcgcaggaggaggcttacttgagaagtgccgtggcggcgttcaaagccccggacgtcaatcccaaccgcgtggagcggcagcgcgaggagcttgacgagaaattcccgtcactggaggatcgggtcaagcgctgcgaggaccgggcccgcgaggcagatcggcagttgaatggactcatccccacggcctggagcgcactggcccagtacggcaaggatcacggcgccacattcgatttcgatgccggcgactggaggccggcacagtccttcctgcagaaggagctcgaacacctgcgtggcacggaactggcccagtaccgggagcaggcagcagatgcgtacgccacggcggtcgacaccttccgtaccaatgtcgcctcgaccctgtacgacaacttctccaagctcaagcaccaaatcaatacgctcaaccgtacgttgcgctccagcccggcgttttcgaacaatgagcgctatcagttccactacgaggtgattgccgagtaccaggagttgcaccgcttcatccagcgggcagccgacctccatggcgaagatgggctgttcggctccgcaggcgaggtgcctgccgcgttccgcgacttgatcgaggacagcacgcaggccaaggccgtggcatcgccgctggacgactaccgtcgcttcttcaagttcgaggtgcagatcaggcaggacgatcgggtgatcggcacgctgagtgagcgcatgcgctcaggctcgggcggtgagcatcgcgcaccgctttatgtgatcgcaggggccgccttggccgcggcctatgggaagagcgatgcgcaccccggcgggatggggctgatcctgctggacgaattcggcgacaagatcgatgcccagaatgcgcgcgcgaccacaaactacctgcgttcgctgggcctgcaactgatcctagctgcccccgataccgcccagggcacgctgagcggagtcatggacagctatatcgagctgttccgcgatggagacctgcttcaggtcgagcgtatcgaggtgaaagccgccgcgcgcgagctattgctcagtgatcagtttgatctgcatcctgagttgcttgcggcagaaactgcgcgcatccaggcagagcgcggcgcgtga

SEQ ID NO: 45533 - DNA, 1209 bp, Xanthomonas campestris
gtgaccgaagctcgtgccaccctggagaagctccttcggcgtggcgagagcgcgagactgcgtggagcgtgcgagacagtctcgctgtcgttgggtagccaggcgcatgcggcggagtacaccgggctgagatctttggacgcgattgagcgctttcacgctgagattgcgcttgccgagcgcgatgccgccatcaatgtccagcgcgaccgcctggccggcgacggcacgagaattgtcagaatttccattgcgaatcttgagctgcttgcacggcatctgagcatcaagctcacaggcgagacggccgcagctgcggctcaggtgctcgcgccctgggcggatgactttcctattatccaggagatactcgagacgtggcggagcggccgcaaagtgcggggctacggaggtgaggcagccactgacgtggctgatgcggcgagcttcttcgccatgcgcgtgaaagagacccatgcagaagggatcttgcgtcgagaaagcgtcaggcactttggtgatagcaagcggcttgagcggctgacaccctggctggacgcgttgatttcaggtcaacttgcgcccagcggtttgggtaaggaggagatatgggctgcagtaggcgtccgccgcgagccacaacccttcctgatcgcagggaaggggagcgtcaggattgaaggagccccgacacgcctcccattggtggagccttaccttggtctcccaccgcaagccgttgcagagttcatgttcgagtcccgttacctcctgagcatcgagaatctcgcgaccttccacgatgccctccctgcccttgccgggtctggcggcgtcctcgtctactccggcgggatgccgtcacccgcatggcgtcgcgcctacgcgaaggcgctcaatggcctcgctgccaacgtgccggtgttccactggggtgatatcgaccagggcgggttccgtatcgccgcagtgatcgccgaaactgcggcagccgttgggaggaagtgccatccctggctaatgtcgccccgcgacatcccccaatatctcaaggcgttggcgccgcgagcgacggccggagcgctgtccgcgatgaagctctcggccgaacgggcaggatggaacacggtttcggccgacctcaccagcgagccaatcctgcttgagcaagaggcgcttgacgccgcaatgccttcgttgcgcctttaa

SEQ ID NO: 45534 - DNA, 1473 bp, Rathayibacter toxicus
atgatccactctcgcgccgaggccgcctacctacgggcgctcgccgcctttcgcactcccactctggatctgctgcacggacggcatgcccctttcgttgtgacggcgctgtccatcgtgttctcggtcgatcgcccggcggtggcggtgtcggacgcgcacgccgaggtcgccgagatcctcgacgagttgcgtgcgaatggttatgacgacggtgagcgtgcactgccgaccggatctgctcgtgacatctgtcgttcgtggtcgcgcggaggatggttgattcgtcagttcgaaggtgaggtggaggtgtaccggttgagtgctcacgcggtgagtgctctagagatcaccgggcgcacgggaggcgggcgctcgcgagtgtcgaaatcccgtgtgcgcactctcctcgacgcggtcgagcagcttgccgccgatgtcgaaaccgacccggatgctcggctccggcgcttggtggcggagcgtgaacggcttgatgccgagatcgcgcggctgagcgtctccgacgcccaggaccctgttgacgacgaacaacttctggaggaggcggagaacgtgttgcatctagcgcgtgaactgccggcagacttcgccagggtcgcggagtcgattaaagccatgcagcgtgatgtggtcagcgatctgcgccgtgacgtccgacccaccggcgaggtgctgcgggagtatctcgaccggggtcggcacgtgatgcactccactcccgaggggcgtgccttcgccggtgccctccgcctgcttggtgacccggaccggattgattccctcacgcagcagctgcacaccgtgcttgtgcagccgttttcccgtttactcgatgccgagcagcgcgcggaactcagcgcaatcggacggcgggttgaggtgggtgtgcaggaggtgctgactgcgcagcggcgggcgtcgcacgtgatcaccggtcaggtgcgtgctcatgatccggcgcgggaccggcaggttgacctgctgctgcgtgacgtgatggcgggattgcagagctggactagcgcctccgcccctgatgccgtggtcgagccgctccgtcatcttcccgttgccgagatccgccatttgcggcagtcgctcggcgacgtgcgcaccgagggggtgcctgagccgctcagcgacggtacggacgtggagtttgtcagcgacgacagccgcgcgtggggtgggccgcgctacgcggaacttgaggcctacgtttcggggctcggtgacgagtttgatctcggcgtcgccttcgagggggcggaggaggcgacgcggcgacctggtgacctgctgggactgctcgagatcgtgcaccgcggcggcatgcgcgaggaagagtctgtctcgattgttgaggcgagacggcccgacggccgtacgcggcgtttcgcgttccaagccgtgaccgctcgcagggtgaaggagaacactgatgtctga

SEQ ID NO: 45535 - DNA, 702 bp, Rathayibacter toxicus
atgcatcccgaaaccgaacctttcctcgcaccggtcgcgatggaggaggactcggacgaactcttcgtcggcgaccgcggggtgctcgacctcgaggttcgccgggtgctcgtgcaggtactgcaccgtcgcttccttctcgctgaccgtcatcgggaacagtggaccgtcctcctcgaacatcagcagctcattgagtcgcgcctcaacgaaatgtttgtgcgtctggtggttgatcacgagcgcggagtcgcctacaagcagcaggtgcgttccgacgagttcgacgtgccgattctgttgcgcgacctgccctattcccgcccggagacactggtgctcgtgcacttgcgcacggtgtaccagcgggagacagccaccggggagctagcggcgcacgtggacagtgaggacgttgagcagacggtgctcagctatttttccgacggtgaccgtgacacggcgaaacggcagcggatgatccgtaaggcgttggagcgacttggccgtgacggcatcgtcgacgaggagtcggccgggcgtttccggatcagcccgctcgtcgagatcgtgttgagcgccgagaagctgcgggaattgcgtgactggttgcagaggcaatcggtgtcgacagtcgtggcggcgggggacgacggtgaggattcagactccgatgatgacctgctggaggtacagcgatga

SEQ ID NO: 45536 - DNA, 3348 bp, Rathayibacter toxicus
atgacgatgctcgacacgctcttcggccttatcccggctgcgtcacggggtcagcaatggcttgccgaagacctccagctggtcaattggggcggttacgacggcgcgcaccgggttcggttctcgccgggagcgacgctgctctgcggcggctccggttctggcaaatcgacgctcatggatgcctatatcgcattgatgatgccgcacacgactccgtttaacggcgcatcgaatgggggtgtcacggggcgaccgcggggtgaggagcagcgcaatatcctttcgtattcccgcggcaagctggacgagtcgcgtaccgatgagggcacacggatgcgggtgctccgcggtgacggccgtgatacgtggaccgcggtggcgatgacctggagtgatcacgatggctcccgcttcactgcggtccgggcgtggtatgtaccggctgacgcgcgggttctcgaggatgccgtgcgagtccgcgcgacggttgacgatgggtttgagctgggcacgctcgaggaagcggcgaccaggcgattcaccgacgcttccgtgcgcgccgtagggctggatccgcttgcgaccgaccgggaattctcggcgcgcttgcacgctgttctcggtattggtgccgcgggtgccggggcgaaggcgatcagtttgctcgcgcggattcaggcgggccagcagatcaccaccgttgatgacctctacaagcggctggtgctcgaagagtccgaaacgatggcgactgccgatgccattgttgcgcacttcgatgagcttgagagcacgaggacgcggatgatgacggcccggcagcaggtgagcgcccttcgtccgctgcgcgagctgggtaccaagattgcggcctccgctgagagagcccggctcattgatgcgatcggttcgtgtgatgatccggagtcggcggcggcgctgtggcgcgcagagcgcaggctcggtctgctccgcgaggtcgaaaccgaattgcgtgaccgcaagcgcgctactgatgctctgctgcgtgacaagcggacgctggctcaggcaaccgaggccgagcgcgatggactcgctgagatactcaggctcaccggcggcgaccggctcgagacggctcagcgcgaacttcgcgaggtcgagcggaggctggccaccacacagcagaaccggtcgcgtctcgacgaagatctgcgcgtgctgggggcaagcgcgacaacgcgcgacgagttcgaggcggtgctcgctcaggcccgcgaaacggtcggtgcgcagtccaagcgtgccgcacggacgcgatggtcggatgcggtggcggcgcttcacgaggccgccgacgaggttcgggaacttgaggcggagcagcgcagtgttctgggacgtcacgacagcatcccgcgtgccctgcacgaggcacgtgagcgggttgcgcaggcggcgggattctcctcccaggagctgctcttcgtcggggagctggttgaggttcgtaccgagttcgagccgtggcgcgaggccttcaccctcgcactcggtggcttcgcgacgacactcatgatcgatgtcgctcagcttgcgcagttccgcgctgctgttgatgcggtccgactgccggtgcgtctgcgctacgagggcgtgcacacggggcttccggagaggcctcagtctgatgtgcgtacccttcccggccgtctcgactatcgcagtactccctttaccggttggttgcagcagcgtcttgacgaccgtttcggtttcgtctgcgtcgattctcccgcagagctcgctcagcatcgaatggcgctgactctcaccggacagatctcgcagggcagccgcggggctcacggcggccacggcgtacagaacgtgttgggcttttctcctgcgcaccggttgcgcgagatttccgcccagctcgagcgggctcgcgctcgtcacgcgtcggcggagtcggctgctgcgctggccgaggaggctctggacaccctcgacgatcgactctcgtgttatgcacgcatcgaccagatcgcctgggagcaggtggatgtggcggcggtgctggccgagcaggagaggtggcggggcgtgcagcgtgaagtatcagccacacaccccgagattgctcgattgcagaagagtagtgccaagttgcgagtacggagtgagcgcttgcgcgaggaaatcgcacgcgctggactggaacgtgagcagagtcaggcgcagtgggccgcgatcactgacgaggtcgatgccagccaggccattctcgacgcggcggaggcagagggccgcgttctcgactccgaccagcgctccttccttgacgaccgattcatcctgtcggtggcggccgggacggcgccggaggcactcgctcgttttgacgctgcgctcgccagtgccgcccagcgccttgccgaggatctccgaaccgcaattgaggcgctacacgaccagcgtgagagcatgcgtcgcatcatggtcgggttcctcgatcggtggccgaacccgaccatgattgccgacccggatgccgctgcgtccgattttgagcgcctcctcgaggccctggaaacccacggtctgcatgagctggaggagcagtggcgggacagcttgctcacgctttcgggcaacgacctcaccaacctcgactccacgctgagtcgttctctgcgcgagattcggcagcgtatcgagccgatcaatctgatcatgcaggacctgccgttctacgacgatcagcaccggttgcagatcactctccgcgagaaccagtcggaagtgcgccgacggttccgtcgtgagctccgtgaggtgcgcggtctgatcgaggctgcctcgacagaagaagagcgcgagcaggtgtaccgccgcactgccaggatgatggaacggatgcgccgcaacgccccagatttcgccgacctgatcgacgtacgcaaccacgtgcgggtcagcgccgagcggattgaggcacgcagcaagcagcacgtcgctgtgtacgaccacatcggtgagaagtccggtggcgagtcgcaggagctgattgctttcatcgtgggcgccgcgttgcgctaccagctgggtgacgctggggcagcacgaccacgctatgcgccggttttgctcgatgaagcgttgatcaaggcggatgcccatttcactcagcgcgccatcggggcctggcgtggcctcggttttcagctgatcatcggcgcaccgaacgacaagtacagcgctatcgagccgcacgtcgaggtcgaatacgacatcctcaaggatactcgcgggcgttcgtgggcgaagctcaaggtcgccctgcccgagacagcgtga

SEQ ID NO: 45537 - DNA, 1443 bp, Arthrobacter sp. SPG23
atggactactacgcaatcaatgcactgcgtgagaaccacgcaggatggtctctgctccgcgcacagaatgccccgctcgccatcgcgttttttatggcggcgttcaccgaacccaaccagcgggatattggccgccaggacctgatcgacaccctggatgatgtgctgttcgggctgcgtgaaacctacggcgatgacaagttcccgcgccaggcctcggaatacctggatgactgggccgccccggaacgggcgtggctgcggaagtactacgtttccgggcaggacgagccgcgctacgacctcactgcgacggcggaggacgtggtccggtgggtggagagcctgcgcggccgtgacttcgtggccacccagtcgcggctgaccagcatcttcgccgtgctcaagcagctcgtccagcagtcagaaacggacccggaagtccggctcgcggaactccagcgccagcgtgacgggatcgacgccgagatgcagcggatccgcgacggccacgtcaaggtgatgagcgggccggaagcgctggaccacttccagcagctcaccgccctcgccaaggatctgctggcggacttccgggaggtcgaacaaaacttccggaaactggaccgtcaggtccgggaacagatcgccacctgggacggcacacagggcgagctgctggagtcgatcttcgccaaccagcaggacatcagcggctccctccaaggccgcactttccagggtttctgggactacctcatgtccccgcagctgcgcaccgaactgcgggacttgctgcagcgggccactcagatcgatgccctcgccaaactggataacctccacgcagtggcgaacctccaccaggactggctgcccgccgtcgaacagacccaggccactgtccggcagctgtcccagcaaatgcgccggctcctggatgacaaggtgttcctggagaacaagcgcatcatgcagctggtccgcagcattgaagccggcgccctcgccacgcgctccgaggcaccgccgggagtctttatggacatagccgctcagtccgtggatgtcgcactgccctttgaacgtcccctgtatgagcccagccggcggatcatggtggacgacgtcgtggtggcggcaaacgatgccgaagtggacgccgccgccctctttagccagttccatgtggacacggaacggctcaagtccaacatcgacgccgtcctcgcgggagccgagcaggccactctgggcgacgtcaccgaggcctacccgctctcccagggactggccgagatcgtggcctactaccagctcgccaccgaatcggactgggcatcaatcagcccggagcggacccagcagttgtcctggcagctcccggacggcagcacccgggaagccaccgttgaacagattatctttgtgaggcccgcatga

SEQ ID NO: 45538 - DNA, 642 bp, Arthrobacter sp. SPG23
atgaaccacactgatacaccggcaacgaacgcgcccgaagaacttcccggcgtcgtgaccaagctcttcaaaggcgtggtgtacgccgagtcggacgagaaggtctggcagtcgctgctgggcttgtcctcccacgtccgcgactacgtggcagttctgggcctggacctcatcctggatgaatccgagggctacgcattcctgaaatcgcgtgaggacccggacggtacgttgccaaggcttatcccccggcgaccgctgaccttcaacgtcagcctgctcctggcgctgctccgcggccggatgctggaattcgacaccaacagcagcgagctccgcctcatcatgaccgaacaggacatcgcagacatggtcgccgtcttcctgccagaatccagcaacgaggccaggatcctggaccagctcggcaccaacattaagaaagtggtggaactgggcttcctgcgcaaactccgcaaccagcccggcacctacgaggtggcccgcatcctcaaggcctacgttgacgcccagtggctggaagagttcgacgcgcggctggccgattaccgtgcctccctcaccggcgcgggcaccggcaccgcttcggggcccgacacgacggaaggaaacctcccgtga

SEQ ID NO: 45539 - DNA, 3375 bp, Arthrobacter sp. SPG23
atgctgttcagcctcgatgaaaaagcggacgacgccggtactcccccggggttccggctgcaccgtttggagctgctcaactggggtacgttccaccgggaggtccgtacgttccggctggacggatccaacagcctgctgaccggcgacatcggttccggcaagtcaacggtggtggacgccatcaccacgctgctgctgccggccaacaggatcgagtacaacaaggccgcgggtgcacagaagaaggaacgcaccctgatgtcctatgtgcgcggcttccacaagagcacccgcagcaccggcggcgaatactccaagccggtggcgctgcgcggcaccggcaaactgtcagtggtgctgggcgtcttccacaacgccgtcctcggcaaatcgatcacgctggcgatcagcctgtgggccacgcaggaagcaggccagcccagccgcttctactcgctgatggagggcgagcagtccatcgccggggacttcgccaacttcggtcaggaccccgcgaagctgaagaagcagctccgggcggccggcgcctccatccacgacacgttcgagccctacgcagcagccttcaaaaggcagttcggcatcagcggcaaccaggccatggaactgttccaccgcacggtgtccatgaagcaggtggaaaacatcaccaacttcgtgcgcaccaacatgctcgaagaagatgacgtccaggcccggatcggcaacctcatccaccatttcgacgatctgaagaaggcccacgacgccgtcctccgggccaaggaccagatcgcgctgctgacgcccatcacgcagggcgccgcccagcacaccagtctgagcgccgaagatgaattcgctcgccggcagcgggaccagctgcacccctggttcacggaccggaagctgcagctcagcctcgagcaccaggccgaactgcacagcaccggcgtccggctgcaggaggacagcggcaagctcgccaccgaaatcacccagctccggctggacctggcggctgtcaaggaggacatccgcagcaacggcggcggacggctggcggccatcgaagccgaagccgcgcggctgggcgaggagtctagggcgcagcgggcgcggtttgacaagtacgcagaggcagcggcggaccttggtcttcaggccccggcggaccgcgtgctgttcgacgccaaccgggcacggctcgccgaagtcgaaatagagctcgccgccaaggccgacgagctgcaggacagccgcaccgagctcaccatgacgcgcacggtgctcaccagccgcgccatcgacatcgccgctgagctgaccagcctgcagtcccggcccaacctgctaccgcgcccccaactggagctccgccgtcggctgtgtgacgggaccggaatccgggagtccgagctgccgtacgccggcgagctgctgcgcgtccgcgacggcgaagcggcgtgggaaggcgctgccgagcgcaccctgcggggttttgcactctcgctcctggttccgtcggaacactacgctgcggtgagcggctgggtggacggcaacaacctgcgcggccggctggtgtacctgaagatcggcgagtcgtacgcgccgaagccggccgaagcgggcacccttgccgctaaaatcgccatcaaacagggaacgccgttccgtgacttcctgctggatgagctcagcagccgctttgactatttctgctgcgacaccctcgaggatttccgccgacgctccaaggccctcaccgccaacggccagctcaagggcgggcgcgggcggcacgaaaaggacgaccggcaggacctctcggaccgccgcaattacgtcctcggctgggacaaccacgacaagatcagccgcttccgcgccgaacaggacgacctccaggggcagctcagcgtggtggccggccagctttcgcgggtcaacgtttccctgggcgccgtcggccggcagaaccagcagctggggaccatcggctcggtgtcggacttcgcagaggtcagctggcagctcaccgcgcggcgcatcgaggacctcaaggcggagaagacccagctggaatccaccagcgatgtactccgggagctcacggcgaaggaaaccgagatttccgggaccctggaccgccttcaaacgcgggccgacgacgtccagcgccggatcggctccaatgagggtgcggccaaggacatcgccgaggcgatcgcggactgccgtgacgtcctcagggaaaccccgttgacgggcgacggcgcggtgctggctgccgtggcccgcctcgccggcgcagaactcgccggcaaaacgctcacctacaagaacaccggcactgtggaaagtgcggtccggtccgggctgacggacagcatcgatgcgctttccaaacagatcgcgcgtgccgcggaaaagactgtccggctcatggccgagttccggaacacgtacccgaacgagacggtcgagatcgacgccgccctcgaggcagccggcgacttcgccaagctcctggagcagctcgtcagcaacgacctcccccggttcgaggcccatttcaaggaatcgctgaaccaaaacaccatccatgaggtggtggccttcaacgctttcctggacagccgccgccaggacatcgtgaaccggatcggcgaaatcaacctttccctggccgggatcgagtacaactccggccggcacatccagctggagcaccagaacagcaccgacctggacgtcaggcagttcgggatggacctgcgggcctgttcggaagggaccatcggcgatgatgaccagtattccgagcagaagtacctgcaggttgcccggctgattgaacgcttccgcggccgggacggctacaccaccctcgatgaacgatggacggccaaggtcacggacgtccggaattggttcacgttctccgcttcggaaaagtggaccgagaccggcgaggagtttgagcatttcaccgactccggtggaaagtccggcggccaaaaggagaagctcgcctacaccattctggctgccgccctcgcgttccagttcgggctcgcgtccggcaagggcgccggaaagaacgccgggagcggacgtagcttccggttcgtcgtgattgatgaggcgttcggccgcggctccgatgagtcggcgcggtacgggctggagctgttccagcggatgaagctgcagttgctcatcgtgactccgttgcagaagatccatgtgatcgagccgtttgtgtcccacgtgggattcgtggccaacgtcaacggcgacgattcgcagctgcgtaacatgaccatccaggaataccgggacgaacgggaccggcgtgccgactga

SEQ ID NO: 45540 - DNA, 1227 bp, Arthrobacter sp. SPG23
atgctccgcgctctgtcgttgaaggcctgggacagcggggcgctgctgcgcgaactgctggaacctaccggtgcatatccccgccgccgcccgctaaaacgtccgacggcggccggcctccggacggactacgccgccgcacatgcgtgggcaagcgaattgttcgtggctgccgggcgctacacgctggagaccgccgacgtcgggcggaccaccatcggttccaaccggctgcccgccgcagcggtgttcgagtcggtcgacgacgagatcgccttcgtcggcaagacccgtaatgcggcccggttccgggaactcgcggacgaattgtcggcgttggatccggcacttcgccagtgggcgtggaagcggccgcttcagctactggcgctggaagaagctgcgctgacagccgggcgcgtggccctctggttactcagcaccccggcgcccggaatatacgtgcggcagctgagcctgcccggcgtgcacaccaagttcctggagacccatcggcgggtggtggacgagatggccgcagcgctgcaggcgatcatgcccagcgagccgacggccgaagaacagacggacgccgtcctgggcaatgcagaaccgggcgatgccgtcctcggcaacgcagcagcgcgcacaccggcagggcgttttgctgaacgccacggcttcatccatccgcctgaactggtccggttccgaatgctggacccggagattccgctcctgggcgacgcccgcgacgtcacggtaaccgcggacgccttccgcactttacgtttgccggtccgcacggtggtcgtcaccgaaaacctcgtcaacttcctggccctgccggagcggcccggtgctttggccctcttcggtgcgggctacggtttttccgcgctgcgtgacgcggcctggcttcaggactgcgaggtcctctattggggtgacctggacacccatggcttccgcatcctggaccaactgagggcagcccatccgcatgtgggaagtgtgctgatggaccgggcaaccctgctggaacaccgcgatgcgtggggctcggaaccgacgcctgcaacggccgcacttacgcggctgacggcagaggagtctgagttgtatcagtctctcgctgacggcgagttcggttcggctgtccgcctggagcaggagctgattggctgggactgggcgctggcgcggcttctgccgcgaggaaactaa

SEQ ID NO: 45541 - DNA, 1449 bp, Arthrobacter sp. SPG23
gtgtcccgatccgccccgtcctccgcggacgcgatcagcgcccggctccgggacctcgaactcctcaccaaagggccggcctgggcgctcacgcggtccgcgccgtgggtcatcgccgtcctgcaggcttccttcacccgcacccgtccgcagcttccgctggaagagttccatgccgacgtcgacgccttccttgaacagctccgccgccaggaccccggactgggcgggatagccaacgggaaatccttcggggacgaatggacccgtaagaatttcctgacccgccgcaaccagtcggggcagatcgtctacgaaatcaccgaacccgcggcccgcgtcctggctttcctggacagcctttccagcgaacgctccaccctgaacggttcccgcctggggacgctgctcggtgacgtcgaaaagctcgccaacgagaccaacccggaccagagtgcccggcttgagtcgctcgaggacgagatcgaggagcgccagcagctcatccaggacatcagctccggcgacttcgacgggctgctggacgacgacgaagcagtggaggccgccggaaacatcctcgacctcgccgccagcctgcccgcggattataagaagatgcgtgaccggatcgaagagctggtgggcgagctccgcaaccagatcatcgaggaatccctcagcaaaggtgccaccatggcgcaggtgctggaggcggacaagcggctgcggcagagtcctgaaggcaggacattccggtccttcacggcattcctggaggatccccagcagcagctgcgtttccggtcggcgatcggcgaggtgctcagccgccagttcgcggacgacctcagccatgacgaccgcgagacgctgaagaacctggtggccgagctccgaacgcagcatagccagatccagcggatctacggcaagctcagcgaaagcctcaacacctatgtccagagcgacgatttccgccagtccgtgcggctgcggaaggtgctccgggaagctgaacaggccatccgctcgctgccttatgagcgggaacgccccggcctggtgcccggaccggtgctcttcaacgcaggcttcgagtccttgtccatggtcaagcttttcgaccccgacgagttcgcggcgcccccgaagctcgccgaccccatcgccttcagcgactcggaccgggtgcgctcgccgcgcaccggcaaggccaaaccggcagccatccgcgccgcgctcgccggggccgccacgctcccggaggcctgggagcagcttccgccggaggaacgccacatcaactccatccgcgcgctgctgtcccacgccctgcacgacggggccggcttcgaccgcgccggctgggacgccatcgacttcgaacaaatagacggaaccacccgcaaggcattcctgccggtggtcaccctcacaaaggattga

SEQ ID NO: 45542 - DNA, 828 bp, Arthrobacter sp. SPG23
gtgccggtggtcgagcccgaagtaccggtggtcgagcccgtcgagaccccggaggcaccctccgcccccggacacatccacgccgagccgtttacggtgactccgcgggacactttcgtggacggcgccgcgctgttccccggggacaccggcgtcctcccgatgaaggtccgccaagcactggtgaagctgctgaaaggcccctatgttgatggcggccgggacgagaaactatggaccacgctgctggacaaccagctgatcctgcggagccggctgtccgagctgttcctgacactccagctggaccacgaacgcaaggtagcagtgctgcgcccggtggaccctgaagccatcggaggcagcacccgctccagcatcctgcgccagcagcgtgcgctcagccgggtggaaaccatcgtgctgctgcgcctgcggctcctgctggaccgccacgtcacggcccagacggatcccaccatcacgaaggaagaaatcgccgagctggtggcccactaccagccctccggccagcaggacgccctgcgcgactccgacgtcgtcaaccgcgccatcaccaagctcctggcccgccagctcctcatcaccacgggcctcgaggacgtttacaccatctccaacgccctgccgctggccctccccttcgaaaacatcggcgacatcccggcccatatcgaggccctggtggcggcaacagcagaccccgccggaacggaagcgctcattgagcttgacgctaatccggtggttgagcctgtcgaaacggatgacgacgacactgacgacgacgcggaggacagcaagtga

SEQ ID NO: 45543 - DNA, 3480 bp, Arthrobacter sp. SPG23
gtgagcatcgcaaccatgctgcccatgggcgagctcaccaaccccggccagatgcgcctggccctggtccaggtggtcaactggggcacgttccatggcgcccacacgatgcacgtggaccgcaacggcaccctgctgaccggcaattccggcgtcggcaagtccacgctgtttgacgccatgctgcgggtgttcgatgcgcggccgcgctccaacgaggctgcggcgcaacgctcgggtgccgtggaggacaagaggaccacgttcacctacatgcgcggcaaggtgggggacaaagctgtgggcgagggctccgccagcgccttccagcgccccggtgctacctggtccgccgtcgccctgacgttcgataacgcggccggcacgaaagtgacggtgtcggcgctcttcgacctgccgaagaacggcacggagtcgagcgtcggccggtactacctgatcgacaacaaaccgctggaccttgccgcgatcgagggcattgccgagaagcgcttcaccaaggctgcgctggacacgatcttcccggacgcgcaggtcttcgatgtgcacaaggccttcgccgagcggttccgacgcctgctgggcatcaattcggaccaggccctgccgctgctccgcgtcatccaggccggcaagggcctcggcggcagcgtcaacaccttcttccgggaccaggtgcttgatgcgcccgccaccctggccgcggcggacgacgtcgtcgaggaattcagcaacctgatgtccatccggcagcggctggaggacgtacggcagcagcgcgaccagctggctccggtgccgggcctcaatagggaatacgcacagtccctgctggacgcgaaccgtctgcgggagcttgccggcgaagagttcgatgccttcaagcagcagctcgcggttgcggtccacgaaaagaccctggcccgctacaaggacctcgcccaggccaaggccagggagcttgccgcggagcgcgcggtccgggacggcctggccaaggatctgcgccagctggaggcggactacaacaatcagggcggcaacgcgatctcggcgattgagcagtcgctggagaacgcccgggtgggactcaagctccgccagcaggtggagcaggcggcacggcaggcgctggcggatgccggccttgacctcgagtggacggccgaaggctgggagcaggcgcacacccacgccgccgaccgctccgccgaactgcaggatgactccgaggcgctcaaggagctgcgcttcgaggcgttcgacggccacgccacgaagaaacgtgagctggcggcggcccagcaggaactcgtctcgctgaagacgcgcaagtccctgctcccgccgtcgagcattgaaaaccgggccgccatcgcggcggcaaccggcgtgccggaggagcagatgccgttcggcggcgaactgatcgacctcgccgatgggcaggaacaatggcgccctgccgccgaacgcgcgctgcggaacctggccaccacgctgctggtccccggcgaacacttcgccgccgtcacccgctacctgaacgacaactccgtccgcggcgcgctccgtgcggtggacgtatccaagccgctcgccggcggtgcgctggccgttgaagacgtggccgacggcgatctgctgagcaagctggacatcctcaccgccgggcctgcggccgatgccgggcagtggatccgcgagcggatcgctgccgacttcgcctacccgtgcgtcgaggacccggaccaactggccgcgttggacaagggcctgagcctgggcggcgtggtcaaacgcaaccgccacaccgtagaaaaagacgaccgcttcactagcaggcaggactacgtcctcggcttcgacaacgcgtcgaagctcgaactcgttgccgcccaggtggaggacctgcagcaggaactggccaaagccgccgaactcgcgcaaagccgcgaagagtcgcaccaggggatgacccgccagctggaggccctgcgccggatcgccgaagaccaccggccctgggaacaggtttccgcggctgtggcggaggacgagctcggcaaaatcgagcagcgcctcaaggatgccctcgccgcccaggccgacctggagccgttgcgcgccaacatcgaggcggcccggcagaagcaccagtccagcaccgaggccgcagcggtcctgcagagcgaatacaaagcgctggatcaacagctcaccgcagcggattcgctgctggaagcggcgcgcacccgcctgcgccaggctccgccgtcggacgccaccgttgccgcgctggaacaatattgtgccgacttcggcggcgttggcgacgtcacggaaatgcatgagctggacaacctggccaaccaggtccggacccggctcctcgccgaactgcatgctgcagagtcccgcgggcaggccacctcggagcgcctcacccgaatcttcgaaggattcgtccgcgaatggggcacggccatttccgcggaccacggcacctcgatcggcgccgccggggagttcgaagcccggtaccacgcgattgtcagcgatggcctgccggcgcaggaggccgagttccggcagttcttcaaccagcgcacgcacgaatcgttcagcaccctgctgcacctgctggatgaggaacgccggtccatcaccagccgcatcctgcccctgaacggcatcctgtccgaggtcaatttccatgagggcagcttcctggaactcgacatcaaacagactctgccgcccaccgcgaagcagttcaaggacgccatccagaatgcgttgaggatccggcatgtccggccctcgcgcgcggccggtgcaccggcttccggttcggaagcggacgacgacgccgagctcaccaaccgctacaagtcgctggaaacgctggtgaagcggctggggtcgcagactccggaggaccggcgctggcgggccgaggtgctggatgtgcgcgggcacctgttcatccagtgcaaggagcaccgcgaagtggcgggaacgccgtcgaacggaaagggccggggcaagcggaccgacgtattcatgcacgcggatacgggttccatgtccggcggcgaacggcagcggttcacggcgttcatcatggcggcggcgctgagctaccagctgggcatcgcggagcagggcttcaccacgtacggcaccgtgatgatggacgaggccttcgtgctggcttcggaggaattcgcgggtgccggcatcaaggcgctgcatgaattcggattccagctgctcctggccgcacccgagaacgtgatcgacctgtcccggcaccttggttcggtcaccgagatcctgcgggacaagcgcaccaaccggtccggtgtgctcactgctcctgtgatcggcccgaggcccggtgccgagggccagtggaggtccgaggcgaacccggtggacatcgtcctgcgctga

SEQ ID NO: 45544 - DNA, 1470 bp, Stenotrophomonas maltophilia WJ66
atgaagcatcgcgaacgcattgcccgttaccgccacctgcgcgaacagccccagtggaagctgcttgccgccgaccacgctccggaaatcatcggcctgctgcagggcctgctgatggacggcgagcgcacgctgccgtcctcggtactgaacgagcgactgcagcgcgcgctggaccagctggccggcgatgaactctcgcgcgagctgccgcgcaccgcccaggcctacatcgcgcactggctggcccagggctggctggaacgccgtctgcccgaaggcgccgaccaggagcagtacgagctggcgaccgcggcactgcaggcgatccgcttcgccgacggcctcgagcaggcccgcgtggccgccaccgaaagccgcctggcgctggtcattgagcagctctcggcgctggctgcgcagaccgaagccgatcccgatgcgcgcctgtccgcgctgcacgacgagcgcgaccgcatcgatgccgaaatcgcccgggtcggcaccggccgcgtggttgcgctggacggcaagcgcgcgctggaacgcacccgccagatcatcggcctggccgacgagctgaccgaggacttccgccgcgtgcgcgatgacttcgagcagctcaaccgcgatttccgcgaacgcatcatcgacgacgagggcgagcgcggcgatgtgctgtcgcagctgttcgaaggtgtggatgtcattggcgaaagtgacgccgggcgcagtttccaggccttctggcgcctgctcaacgacgccgaacagagtgcccagctcgatgccgcgctggaagcggtgctggcgcgcggcttcgcccgccgcctggaccgcaacgaacgcaacttcctgcgcagcttcaccagcaccatgctcgagcgcggtggccaggtgcacgacgtgctgcagaacttcgcgcgcagcctgcgcggcttcgtgcagagccgtggctacctggaacagcgccgcctcaaccagttgttgaagcaggcgcagtccgaagcgctggccctgcgcgacgaattccccgcacaacgcggcatcggccgcgacctgcagctgaccaccagccgcctgcgctcgtggtcgcagtggaagctgcatgatccgcgcagcgcccaggtcgacggcaatgtcgagtacaacgacgcggccgcgatcagcctggagagcgtcggcgacctggtcgcttcgtccgaaatcgacttccgcaccctgcgccgcgacctgcacgacctgctcgatgcacagccgcggctcagcatcgcccaggccctgtcgcagcgcgaggcgccgcaaggtcttggcagcgtcatcggctatctgtcgctgggcacgcgcttcggcaacgtggtcgccggcgagcaggagcttgcgcagtggcgtggtggcgacggccaggtccgtcgcgcccgcatcccgctggtttggttcacccaggagagacgccatgagctggcatga

SEQ ID NO: 45545 - DNA, 702 bp, Stenotrophomonas maltophilia WJ66
atgagctggcatgaagatcccatcgacgcagcgcaggccgacgtggcggaagacgcctacgaggccgaaccggtggcggccgtggcgcagccccgccgtggcaacgacgtctattacctcggcgacaccgggcgcctgccgctggatgcgcgccgcgcgctgtgccagctgctgatcggccccagcatcgaccagctgcgccacgccaagctgtggccggcactgatccgcagcgaagcggccatccgctcgtcgctggcggacctgttcctggaactggtgctcgaccgtgacagcggcgtggcgttcacccgccaggccgataccgaagacgtcgatgcgccggtgctgctgcgcacctcgccgctcaccttcatcgactcggtgctgctgctgtacctgcgccagcagctggccgaagccgatgcgcgcggcaaccgcgcggtggtcgccgatgccgaaatggccgaagcactggccatctacgaaaagaacctgtccaccgaccgcgccggcttcaaccgccgcgtcgcctcggcggtgcagaagatgaaggacaaccacatcctgacccgcctcagcggccaggaagaccgccacgaagtctcgccggcgctgaagctgctgttctccgccgaagacgtgtcccagctctcggcggtctaccgccagctgcgcgaaaccccggccgccgaggcctga

SEQ ID NO: 45546 - DNA, 3381 bp, Stenotrophomonas maltophilia WJ66
atggctatctccaagcacactcccgccctgttcaacgaaggcctgccggacccgcgcctgcagcagttccgcatgcgccgcctgcaggtgcacaactggggcaccttcaacggcctgaccgaagtaccgatcgccgagcgcggcttcctgttcgtcggacgttccggctcgggcaagtcgacactgctcgatgccatgtccgcgctgctgacgccgccggccatcgtcgacttcaacgctgctgcgcgtgaagccgagcgcagtggccgcgaccgcaacctggtgtcctacgtgcgtggcgcgtgggctgaccagcaggacagcggcaccggcgaaatcgccacccagtacctgcgcaagggcgccacctggaccgcactggtgctggaataccgcgccggcgatggccgcgtggtcagcctggtgcgcctgctgtggatctccggcaacggcacctcggccggtgacgtgcgcaagcactacatgattgccgagcgcccgttcgacatcgccaaggatcttggtgggttcgacctggacctgcgcaagctcaagcagaagctgtccgacctgcaccacttcgacaccttctccggctacgccgagcgcttccgcgacctgctcggcatcgacaacgagatggcgctgcgcctgctgcacaagacgcagtcggcgaagaacctgggcgacctcaacgtcttcctgcgcgacttcatgctcgacacgccgaagaccttcgacgccgccgagcgcctggtcagcgacttcgccgagctcgatggcgcgcaccaggcggtggtcaccgcccgtcgccaggtggagaccctgctgccggcacgcgcctactacaacgacctgaaggaaatgcaccgccggcgcggcgacgacgaagccctcaagctcggcgtcgacagcttccgtgaaagccgccgccaggcgctgatcgaagcgcgcctgcgcgagatggacgtgcgtgaccgcggcctgcttggcgaagaagcccagcgccgtgctgcactggacaatcacaccgagcgcctggccgaactggaactgcagcgccgccagcagggcggtgagcgcatcgaagaactggaacgcgagcagggccgcgccgaagccgagcgcgaccgccggcaggccaagcgcgagcaggcaagcctggccgcgcagcagctgggggccgaactgccggacgacgcacacggcttcgccgaactggtcgagcgcgcacagaacgagctgcaggaccgccagcgcgcctcttcggcgctggacgatgcgatcagcgatcgcctgggtggcaagcgcgatgacgagcgccgcttcggcgaggtccgtgcggaactcgaagcgatgcagcgcacgccctccaacatcccggcgccgatgcagaagctgcgcgcgcgcctggccgaggaaaccggcatcgccgaagcggcgctgccgttcgtcggcgaactgatccaggtccgctcggaagagcagggctggcagggtgccatcgagcgcgtgctgggtggcttcgcgctgtcgctgctggtcgacgacaagcattacaacgacgtcgccgagtgggtgaaccgtacccacctgggcatgcgcttcacctactaccgcgtgcgccgcaacgatgatgcgttcgcccgtgagccgtcggcgaagtcgctgctgcacaagctggaactgcgcgaacacgtgttcgaaagctggctgcgccgcgagctcggcaagcgattcgactacgagtgcgtggatgccaagcagctgcgcaacgtcgaccgcggcatcacccgcgaaggccaggtcaagcatccgggcgaccgtttcgagaaggatgaccgcagtgcggtgggcgaccgccgtcgctggatcctcggcttcaacaaccacgacaaggtgggcgccttcgagcgcgaagctcaggaactggcgaagcgcatcgccagctgcgagaccgacatcgcgcgcctgcgtgggcagcgtgaccgcgacaacgaacgccgcctggcctgccacgagctggtcagcatcagctggaacgagatcgacatcgccgccccgcagcagcgcctgagcgacatcgaggccacgctgcgcgacctgcgcgaaggcaatgccgacctcgccaagctggccaagcagatcgacgccgtgcgcgccgacatcgagcaggcccgccgcacctatgaagacgtccgcgtcgagcgcgggcagctggtcaaggaacgtgaccgcctggaccgcgcgcgccagcagagccgtgcgctggtgctgccgagcctggcccaggagcaggaagccggccttgccgagcgcctgcaggagcagggtccgctcagcctggaaacgctggaagcgcacatgcgccaggtcagcaacgcgctgaacgagcagctgtcgtcctcgcagcaggacctcaaccgcatcgagaaccagctgatcggctgcttccgtcgcttcatccagcaatggccggaggaatcgggcgacttcaccgtgtcggtggcctcggccgaggacttcctcgcacgcctcgaacgactggagcgcgatggcctgccgcagcacgaagagcgcttcttcgatctgctgcagaaccagagcaagaacaacctgctggccctgcagcgccacagcgccgaggcccgcaagtcgatcggccagcgcctggacgaagtgaacgccagcctggaacaggtgccgttcaaccgcggtacgttgctgaccatcgaactgagcgaccgtcgtctgccggaagtgggcgagttccagctgcagctgcgcgaagtgctgtcgcagcagcagaccgagcagcgcgagctggccgaatcgcagttcaccgtgctgcgccagctggtcaaccgcctgggctcgcaggaaggcgaggacaagcgttggcgggagctggtgctggacgtgcgcatgcacgtggagttcatcggcgtcgagctggatgcggaaacgcgccagcaggtcgagatctaccgcagcggcgccggcaagtccggtggccagcgccagaaactggctaccacctgcctggccgcggcactgcgctaccagctcggcggtgccgacagccagctgcccagctacgccgcagtggtgctcgacgaagccttcgacaaggccgacaacgagttcaccgcgctggcgatgaacatcttcgacaacttcggcttccagatggtggttgccaccccgctgaagtcggtgatgacactggaaccgttcatcggcggcgcctgcttcgtcgaaatcagcggccgccacgactccggcgtgctgctgatcgagtacgacgaggaaggcaagcgcctgaagctacccgagcgcagccgccagcaggccaacgaaccggaagaagccgaggcctga

SEQ ID NO: 45547 - DNA, 1464 bp, Micrococcus luteus; identical to SEQ ID NO: 41940

SEQ ID NO: 45548 - DNA, 681 bp, Micrococcus luteus; identical to SEQ ID NO: 41941

SEQ ID NO: 45549 - DNA, 3357 bp, Micrococcus luteus; identical to SEQ ID NO: 41942

SEQ ID NO: 45550 - DNA, 1281 bp, Micrococcus luteus; identical to SEQ ID NO: 41943

SEQ ID NO: 45551 - DNA, 1479 bp, Mycobacterium llatzerense
ttgcgggtgcaagagaatgcggcgctgtcggcggccgagttgctcgaactcaaccgtgacgttcagggctcgcgcgcagtccggctgctggccaccaacaacctcggggtgtacgccaccctgatggagcggcatctcagtgacggcacggtcgccgagaccgagctggtggtccggctggaacgcgatttggcggccctaggggagaccgacgatcagctcggccagtccggcctcgccttgatcaagttgtgggccagccagggctggctgcatcgggtggccgagaaccgtgccggtgccgaacgcaacgtctgctacctgacccaggacgcgcgacgcgcactcgacttcgtccgcggcatgcgccggggcgacagcatcgccacgggcggctcgatcagtggcatcgcatcccgcatgcgccagatcgccacccgcgccggcaatgaccccgaccgcatccgggccggcatcgaagccgacatcgccgcgctgcaccgcgagctcgacgagctggaagccggcctgcgacccgagcccgacgtcaccgacatgtacgacgaggcccgcgccatcgcgctgcagatggaacggttgatcaccgacatcgggctgtatggcaccatgatcgagcaggccacgcaggcgctggacgatcccatcgacaccaacatcgagtaccgcgaccggcaacgccagatgtacgccgactatcaggcggcgtgggattcggcgggccgcgattcgcaccgggcgttcctgcggatgatcaacgaccccgaccagcgcgccgaattcgagaccgacatcgccaccgtcgcctctgccctcccggaactggacccggcgttgcgcaaggtgatggccgggttcttcgagctgatcgggcatcagatcgacgaggtcgaacgcatccagcagcgctgcgcgcagcgggtcaagcggttcaccgcggtcggcaccatggagtccagccgcggcgtcgcccggcagctcaacgaggcgatcggcgcggcccggacgctgctgaagtcgtcactgaccgactcccggctggacatcgaagtcccgctggcgcgtcacgccatcagctcgatcggcgcgctgagcttcaagatcggcgacctgtcggcacccaggcaggctgaagcggcacaaggcgacgtcgacctgtccagcttcgcggcgctgaccacccaggtcgatgcaccggcgatgtccgagatgctcaattccgcggtcgcccgccgaccggtctcgctggccgaggccgtcgcactgctggattcggcgtacctgggccacgtcatcgtgttgtggtcgtgggccctcaagcaaccctcggcaccaggcgacccgagtgacaacacaatgtcggtgcgcttccgttcgctcgacggccgagaccgcgagatcgaggtgccgtatctgatgttcaccgagcctgttgcggtggcgggagccctacatgactag

SEQ ID NO: 45552 - DNA, 669 bp, Mycobacterium llatzerense
atgaccgacagcccaatcgatttcgcctcacttcccgaggtcgacggcgccagccgggtggcgcagcaacgtcggccccggttcgacggcgacgtcagcgccatgccagaccgggcctgctgggcactgcagcacctgctgacccgccgctacatcagcagcgaatccgatcgcgacatctacagctggatcctggagtaccgcaacgaattgtcggtgcggctgtccgaactcgacctgcagctgcgcatctccgaaggcgtggacatcgcgttcatcgagcaggcccgctacgagtccgccaagggcatcaaggtgttgcggcgcgagccgctgggcacctacgactcgattctggcgctgcacctggcgcagatgatgcgcgccggcggcgaccagagcttcctgatcagccgcgacgaaatgcacggcatgttcaccggggtgctcaacgaaaccgaccgcgacgccgtgactttcaccgcccggatcgacgccgccatcgcgcgtctcaccggtctcgacatcctgcgccgcagccgcgacgacgaagacagctacaccgtgagcccggtgatcaccgcggtgatgacggcctcggtgatcaccgagttgcaacagcagttcgaacaactcacgggcactgggggatccgatacagatgtctga

SEQ ID NO: 45553 - DNA, 3342 bp, Mycobacterium llatzerense
atgtctgagcagttccacctgtcccggctccagatcatcaactggggtgtgttcgacggctaccacaccattccgttcagtgccggcggttcgctggtcgccggcgcctccggcagcggcaaatcatcactgctggacgccatctcactcggcttcctgccgttcaaccggcgcaacttcaatgcctccggcgacaacaccgcagccggctcgagcgccggtcgccgcaccgtcgacaagtacgtccgtggcgcgtggggccagcgcagcgacgcgggtaccagtcaggtcatgtacctgcgcggcgacggcaccacgtggtccgcggtcgcggtcagctacaccagcaacaccggccgcaccatcaccggcctggtgctcaaatggcttaccggagaatcacgttcggactcctcgagccggttcgtcatcggcgacggcgatctggacatcgaggacgtgtgcaaccggtgggccgcgggccggttcgacaccggggtgttcaaggaaaacggctggcggttcaccaccaaggtcgagtctcagtacctcgcgcagctgtacgcctcgatcggcatccgggcctcggacgccgcgcagcagctgctcggcaaggccaagtcactgaaaagcgttggtggactggagcagttcgtccgcgagttcatgctggacgaaccggacagcctggcgcggctgcccgaggccctcaagcagatcgatcccctcgtcgaggcccgtgaactgctcgcggtggcccagcgcaagcgcaagatcctcggtgacatcgaggccatccaggtgcgctacgcctccgagtcgaccgacctcgggatcatcgatctggtcgacctgccgatggtgcgggcctacaccgaccacgtccggctgcggcactgtcccgccgagatcgagacgctcgacgcgaccatcgaccagctggagcacgagaacgccgacctgacccggcagctgaatctggccaaggccgagggcgattcgctcaatgcccagatcaacggggcatcggcgaatgtcgccccgctgcagtcgcaggtaaccgcggccgaggcgcaggccgacgatgtggcccgccggcgcgcgggctacgaggagatggtcgcggccctgggcgtggaagtgcccgacagcgccgacgaattctggaatctgcgcgaggagttgacccggcaggccaccgagatgctgggcaagttggagtggggccgcgatacctccaccgacgccgagtacgcgcagaagtcggcgcgaatcctgcgcgacaacgcggccaaggagctcaagcgcgtggagcacgtgggctcggcgctgcccgagtccgcggtcacgatgcgcgaccagatctgcgcgggtgtgggcatcgaccccaccgaactgccctatgtcgccgagcttttcgatctgcagcccgagcacacgcggtggcgcctcgcggtggagaaggtgctgcgctcggtcggcctgcggctgctggtgccggatcagcactacgccaaggtgctgcggttcgtcaacgagaccaacatgcgcggacgcctggcgctgcaccacgtccgggccggctcctccggtcgcgaggcagaaccgaacacgttggcgggcaagctgttcctggtcaagccgaagcacgcctgcgccgccgaagccgtagatgtgatcgccgcggccggtgaccacatctgcgtggacacccccgacgtgttcgtgcggttccgccgcgccgtcaccgacacgggtctgtacaaggactccgaccggctggccatcaaggacgaccggcgcccgatcaagccgtccgagtacatctatcagggcgacatcagcgccaagctggaggcgctgcacaccgagctcaccgaggccgaggaggccttcagcgccgcccgccgtgccgcggatgagattgcggcgcagcggcaacgctggcgcgaccgggccgcggcctgcaaggccgtctacgagcagttcccgcagtggagccagatcgacaccgacaccgccgaaggccatgccgaccggctccgcgaacagtacgacctgctgctggccgaccaccccgacatcgaggcgctgtcggcccgcgccgaggaatgctgggtcgacatccagaccctgatgacccggcgcggcgccatccagacccggcgcgacgatctcgacggccgtcgtaccaagctgatggacctgcaggaccggctgtcccccgccgacgtgtcggagcacgcgacagatctgttgcgccgctacgccgctgacgttccggtgccgctggaactgctcaaccctgagccgcaccgcgaggcgttgttcgcggccatccgccgcgaacgcgaccagctcaccgagagccgccggcgctcctacgaggaactgtcacgcatcgtcgcaacgttcgacacctcgttcccggacgcgatcccgaacgactcggatgacttcgacgagcgcatctacgactacgtcgcggtgtgccgccacatcgacgagcgcgagctacccgacgcctacgaccgcatgatgcggctgatcaccgaacaggcgcccgacgcgatcctgacgctgcaccgcgtcgccgagcaggagacccggcggatcagcgagcagatcgaccgggtcaacaccggtttgggcgcagtggaattcaaccgcggcacccgactcacgctgcgcgccaacccgcgcagcatggtcgcggtctccgagctgaccgacatcgtcaaggccatctcgcggcgcatcgccgaggtggggctgggcgacaagaaggccatcctcgaccagtacgccgacatcctgcgcttgcgaaaccgattggccggcaacaaccccgaggaccgggcctggacccgcgacgcactcgacgtgcgtaaccgcttcacgttcgactgtgccgagtgggatgtcgccaacgacgaactgatccgcacgcacagcaacgccggcgacaactccggcggcgagcaggagaagctgatggccttctgcctggccggggcgctcagcttcaacctggccaaccccgaaagcggcgacaacaaaccggttttcgcgcagctgatgctcgacgaggcgttctccaaatccgacccgcagttcgcctcgcaggccctgcaggcgttccgcaagttcggcttccagctggtgatcgtcgcaacggtgcagaacgccaccaccattcagccgtacatcgacggtgtggtgatggtgtccaagtccgaggccaccggtcgcaatgcccggcccgttgccaacgtcgccaccaagaccatcaccgatttcaccgccctgcgtcgggaactgaaagttcccgaacccgtctga

SEQ ID NO: 45554 - DNA, 1461 bp, Mycobacterium immunogenum
atgaatgatctgacagttgacgagctgttcgcgcacaacgatgacgtgcagaaatcccgtgcggtacggctgttggccgcaaagaatctggcgccgtacatcacgcttatggaacgccatttggatcgcagcgccaaggtctccgagccgcagctggtggccaagctggaccgggatctggccgcggtcggcctgggggagcagtcgggattggccctcatcaagagctgggcgagcgacggatggctgcaccgcgcgtccgacggcgccggccccgacgccgagaacgtctgctccctgaccgaggacgcgcgcagcgcgctggcatttgtccgacgcctgcgccgcgccgacaccgtggccactggcgggtcgatcgccggtatcgccgccggcttgaagcgggtcgccacgcagctcgatggtgacccggcccgtctgcgcgccgatatcgaagcccagatcgccgagctgcagacccagctgcacgccatcgacgacggctaccgtcccgaaccggacatcgtcgacctggaggacgagacccgcgccatcgcctaccagatggagcaggtgatcaccgacatcgtgcgttacggcagcatgcagaacgagatcaccgccgggctcatcgacgccgccgaggattccgattccggtttccgcgaccgcgcccgccgaatgttcgccgactacgacgcactcttcgactctcgggaacgcgcctcgtatgcggcattcacgcggaccatccaagatccggatcagcgagctgcgctacggggcgatatcgcttgtgtcgcagaggggttgcccgaccttgaccccggtctgcgggaagtcatgaggaatttcttcaagctggtttcccaacagatcgcggaggtctctcgcatcgaacagcgctgtgcgcagcgcattcggaggttcttcgccgccggcaccacggagcaggcgcgtggccgcgcacgccagctcaacgacgcactcgcggcaggtcatgcgctgctcaaggtatccacggcggactcgccgatcggggcggaactgccgatcgggcgctcggcggcggccgccatcggcgccctctcgttcaccatcaaggacaccgcgccaccggtgctcgcacaggacgcgccgtcggggccgctcgatctgagcggtttctcggcattggccacccaggtggacatggcagcactggccgagacggtcaacagcgctgttgccagtggcccggtttccctgccggacatgatctctcatgtcgacgcgccgtatctcggtgatgtgatcgtgttgtggtcgctggcgctcaagcaggacaacacggccgatcgtgagtcggtcaatgtgaagttccggtccctcgacggacaggaccgggtgatggaggtgcctcagttgatgttccgtgaaccggtgctggccacccttgacgaggagggggcgacgctgtga

SEQ ID NO: 45555 - DNA, 741 bp, Mycobacterium immunogenum
gtgacgacaacgccgttggggaatatcaactttgacgacctgccgggtgtcgaacccgacgcctccgcgccgagaacggccaaggggccgcggttcgacggcgacaccagcgagctgcccgacaaggcgtgctgggcactgcagaacttggtggcccggcgctatctcagcaaggacggccagcctgaactgtgggcctcgatgatcgagcaccgcaaggtgctggcctcgcgcctttcggaattggatctgcggctgcgggtgttcgacgatcttgaggtcgcctacgccgaaccggcaccgctggagaaccccagcgcctacggcgcccgggtgttgcgacgggaacccctgggcacctacgcatcgatcgtggcgctgcacttggccaagatcgcccgaaccgcgcacgacgaacacgtgctggtgagccgggacgatattcacgagcttttcgccaacgtcacccacgatgtcgaccgcgacgaggccatgctgcgtgaccgtgtcgacgaggcgatcaagaggctgtccaaagcggagattctgcaacgtacccgcgatgacgagcacagctacaccatcagtccggtcatcaacgccctgatgtccgcgcagatgatcgaggcgctgcagcgtcaatacgagcagttgcagcggggcggcggcgcccccgaagacggcaccgacgccgcagactccaccgacgaagaagatggcgagaccgatgacgatgagtga

SEQ ID NO: 45556 - DNA, 3348 bp, Mycobacterium immunogenum
atgacgatgagtgacgcagcgacccagcagttctggctgtcccgtctgcaggtcatcaactggggtgtgttcgacggctaccacagcattgagttcagccgccgcggcaccctgatcaccggctcttccggtagcggtaaatcatctctgctggatgcgatttcgctggcattcctgtcgtcgaaccgccgtaacttcaacgcctccagcgacaccaccgcggccggttccagcatgggcaagcgcactgtcgacaagtatgtgcgcggcctgtggggcgaactgaagaatccgggggagcgccccaagcagatgttcttgcgcggcaagggcggggcgtggtcggcgatcgccgtcacctattcgggcactgacgggcgtgtgatcaccggcctggtactcaaatggcttgccccgggctcggattcggactcgtcgagccggtactacctgatcgacgccgatgccgatatccgtgatctgtgcaatgcgtgggccagcaagggatatgccggctcggtgttcgagggtgccggctggcgtggtcacaagagtgagcgctggtacctggaacagctgtatgccgccgtcggtattcagggttcctcggccgctcagcagctgctgggcaaggccaagtcgctcaagagcgttggtggtctggaacagttcgtacgcgagtacatgctcgacgagcccgagtcgatggcagccatctccgaagcgctgggccagatcacgccgctggtcgacgcgcgcgccgcgctcgcggttgcgcagcgccagcgccagaccctcggcgacatcgaacagatccagcagacctacgccagcgatgcggcgcagttggccaccgtggacgtcgtcgatcatcacactgttcgcgactacgtcgatcagcagcggctggccctggcgggccccgagatcgatctgctggacaccgagatcacccgcctcggtggtgaatgcgatgaaatccagtcgcgtcaagacattctcaccggtgagcgggacaagctgctcggccggatcgccgccgcggacagcaatctggctccgctcaagagcgagctggctcatgcccgcgcccgcgccgaggaggtgtcgcgccgtcgtaccgcctacgacagcgcgctatgggatctgggccatgacgaggacatcgaatccgccgaggaattcgaagccatgcgggtggagagcctgcgtgcggtcacccggatcaacgccgaactcgaagccgggcatgacgcctatgtcatggccgccggtgcgctgtcgacggcacgcgatcaactgcgggccgcctccaccgaattcaagcgggtcgagcatctgggaaccccggtgccgcccgacgaggaccgcatgcgtggggagatcgccgcggcactcggtctgaccgccaaggacctgccctacgtctgcgagctgatggatctgcggcccggacaggaacggtggcgcaagtcggtcgagaaggtactgcgatctaccgggctctgcctgttggtgcccgatcagcatcaccggcaggtgctgcgctacgtcaacgagaatccgatgcgcggttacctgcagatggaacgggtgatcccgtccggtgcgccccgccgcgcggagccgggcacgcttgccgactgcctgcgcgtgaccaacccgaaccacgaatgtgccggcgccgccatgaatttggtggcaggtgtgggcgactacgtgttggtcgacagccccgatgaattcagtaaacaccgccgggcggtcaccgatcaggggctgcgcaaggacggcgaccggcgcgcggtcaaggacgaccggcgggaactgcgtgcatcccaatacatctaccagggcaatgccggcgacaagcgggccgcgctgtccgatgatgtggttgaggcgcagcaggcggtcagcgatgccgagaagttcatcggcgaaatggacaccaagcgcgaggagctgcgctcggaggtggtgcggtggtccaaactccatagccagtacgagtattggagccagatcgacaccgattcggccgaggcggccgtggggcggctacaggatcagtacgacgcgatgctggacgccaaccccgacctcaccggcctgcagcagcaggcggattcttatctcgacgagatcaagaagctttccgaacgcatcggagcgttgagaaagcaggaatccgaacatgactcgcggcgtacccggctgctggacctgatggataatctgagcccgcgtgaggtgggtgggcacactcgatcgggtatcgaagcctatgtaccgcaactttcgtccagcctggacgtgctggagccggacgcctatcgggtggagttgtggcgccagatcgagaaggatcagtcggtgctgcgcgagagtgtcactcgctcacgcaacgagctgaaccgaattctcaacgcctacgaccgggacttccctgactcgattcccaacgacagcgagaacttcgacgagaagatccacgactatgtcgcgttgtgccgccggatcgatgaacgtgacctgccggccgcctatgagcgcatgctgcggctcatcaccgagcaggcgcccaccgccgtgctgcggctgcaccagctcgccgaggaggaagcccatcgcatcaccgatcagatcgaccgtgtcaacagcggtttgggatcggtggagttcaaccggggtacgcggctgactctgcgcgccgagccgaaggcgcttgaggcggtcggcgagctcaacgagcgtgcccggcggatatcggggcgtgccgtcgccgtttcgatgggggacgagaaggccatccatgaccagtaccaggacatcctgcaactgcggaatctgttggctgccgagacgcctgaagcacgacagtggacacgtgatgccctggatgtgcgtaaccgcttcgtgctgtactgcgaggagcgcgatgccaccaccggtgagccgatccgtacctacagcaatgcgggcgcgaactccggtggagagcaagagaagttgatggcgttctgccttgccggtgcgctgagcttcaacctggccaacccggagacgggcgacaaccggccggtcttcgcccagctgatgctggatgaggcgttctcgaaatcggacccgcaattcgcgcagcaggcgctgtcggcgttccgcaagttcgggttccagctggtgatcgtggccaccgtgcagaacaccaccaccatccagccctacatcgacagcgtcgtcatggtgtccaagccggatggccctggggtacggcccgttgcctcgacgcgcacggtgccgatcggcgaactcggcgatgtacgcaaggccgtgaacgctcgctag

SEQ ID NO: 45557 - DNA, 1419 bp, Burkholderia pseudomallei
gtgttcttcgacgccgagcggcagaggttttttcgtccgctcaatagctccaggcgtgaattagtagcggcatgcttgcgtgcactttatgaccgcctccatgggcccgcagccgactatgcgcaccaccttactcgagacgtccttcgcgaactactgctgccggttgttcggcaataccagactacgctggcggatgacggctccgacgatgaattcagcgccgtcgatgcgagcgaccctcaactgctggtcgccatggtcattcgggcgctcgtcgcagacggttggctagagcagttcgctgaccggactggcttggttgcagcttttcgtttttcgcgtcccggcaagcttttttcggaggcgctttgggcattggaccgcccaagccgaagccggcagcgcaacatgcgcgggtgccgcaatgcgctcgaggctgcgttgtccgaacgaggcgacgcacatgacttggtggatgcctacgaatacgccgagaaggttatcgaggacctcgcggacggcatcgattactttcaagaactggtccggcacttgatgcaagccgcgtctgctcatacgcaatggaacgaattcgttgactttctcgacagattccagcgggactactccaagcaacttacagcggataacgcgacgctgaaccgccaagccattcggcaaaagcttgagaaactccgggccgttccggaggcgaagttcaatcgaatggatgcgcagttgcgcgatatcgctcactggatggcgaaggagtacaccggaagctcgctctatgattggctgctcggtcgtattgaagacatcgtagacgcggcgtgcgagtctaagcagccgggctttctcaaggccatggagacttatctgaagcgtgtgaacggcctcgctttgcagtcgatgatgctacgctcggggcagactcggcatgcctacttagcagccgttcagaaagtggccgagtctcccaagttggaacaggaccgcttgctgaagcttgttggccagttcctcgcaccagcggaggtgcgcgtcctagacccagctagcttcaagctgaagactgcaacgcagcgccgcaaagcagtaaccgtgtctattcgaccgcgcccgacaagggaagagcggctcgctgcggcgatggcgcgagcagaggccgaagtgttctcaataccgaacgaggatgtcgcgcaggggctgcgtgcggacctgcgactcttccaacatccaatccgcgtttccgcaatgcctacggcaagtgcccgcgacgtcattcgcgcaatgcaagcggtggaagccgcgcgaagcgccatcggcggggacctcatcgtcaagaagctgccgacccgtttggagaatgagttctacggggccaacgactacgaaatcgacctgaaaaaatga

SEQ ID NO: 45558 - DNA, 672 bp, Burkholderia pseudomallei; identical to SEQ ID NO: 44291

SEQ ID NO: 45559 - DNA, 3633 bp, Burkholderia pseudomallei; identical to SEQ ID NO: 44292

SEQ ID NO: 45560 - DNA, 693 bp, Burkholderia pseudomallei; identical to SEQ ID NO: 44293

SEQ ID NO: 45561 - DNA, 1461 bp, Rhodocyclaceae bacterium PG1-Ca6
gtgaaagcagacaaagccatcgcgacctaccggcgcatgcgggcgcagccgctgtggcgtctgcttgcctcgactaccgggcccaccgtcattggcctgctccaatctcatctatatgagagcgagcgaagcctccctgcctccatttttcacgaacgcatcgcaagggatctggaagagctgcgcgcccaaggcgaagactttccccaaacggcacaggcgtatgtcgccagctggctcgccgatgggtacctggagcgacgcttcccggctggggcttcagaagaggaatatgaactctccacggcggccgtcgaagccattcggtttgtatctggactggcgcagccgcactccgccgcgaccgaaagtcgcctgacgctcgtcatcgaggccttggcccgacttgccgaggacaccgacaccgacaagttccgccgcatcgaccggctgatggccgagcaagcccgcatcgacaaggagattgacgccatccagaaggggcagatgcgcgtgctgccccaaacaacggcgctcgagcgcacgcgggagatcatcacgctggccgacgatctggccggtgatttccgccgagtccgcgatcagttcgaccagctcaatcgcgatctccgtgagcgcatcatggacaacgatggcaatcgcggggatgtgctggattcgctgttcgccggaatcgacctgatttcagagagtgacgccggaagaactttctccgctttctggcgactgctcacggacccagaacaagcggccacgcttgatcaggcgctagatagcgttatgtcgcgggagttcgtggggcagctcgaagccaaggagcgacgattccttctgcggctcacgcggactcttctcgagcaaggcggtatggttcacgaggtgctccagaccttcgcgcgcagcctgaagcacttcgtccaaagtcgtgagtacctcgagcaacgccgactcaatcacctgctgaaagacgcccaacgcgcagcactggccctgaaggatgaagtcagggccacagaaaccctccagtacacgctggaactcacgagcagtcgtttgcgctcattgtctcaatgggtgttgcacgacccatccctacaagcattgcccgggcagatggcagaaggggatgcgccgccaatcgaccttgagtctgtgagcgaactggtcgcacagtccgagatcgacttccgaacactgaaggccaacgtgctggctgtcctagagcaacgctcccaggcatccattgccgacgtgctggagcagttccctgctgcgcaggggttgggcagcgtcgtcggcctgcttgcgttgggcagtcggcatgggttcaaggccgaccacagtgaaaccgtaggctgggttggaggcgacgacgagcgtcgtagcgcccgaattccaaagatcttctttttgagggagcgggccaatgaactggtctga

SEQ ID NO: 45562 - DNA, 708 bp, Rhodocyclaceae bacterium PG1-Ca6
atgaactggtctgagaacaacgaatcagcaatgccagtcgaagcacaagcacccgatgatgctcaggcacctgccaacaccctgttcctgggcgacagcggcgagttggcactggatacccggcgcgccctggtgcagctgctggcagggccatcgctcgacggacgtcggcatccaaaactctggccgatcttggtacgagacgaagcggtgatccgtcggcgtcttgccgagctgtttctcgaactggttatcgaccgagacgtacaagtggcgttcacgcgccaggcagacaccggcgaacttgaggtacctctcctgttgcgtcgtgcccagctgacgttcattgactccattctgctgctccaccttcgccagcgattgacccaggcggactcgcagggcgaccgtgccgtggtgtcgacagacgagatcacggagtttctctccctctatgagcgcgccgccaacaccgaccgtgcagggttcgtgaaacgggttcatgcctccatcgagaagatcaagaagcacagcattcttcagaaaattcgctcgagtgaggatcgcttcgagatttcgccgacgctgaagctcctcttctcggcagaggaaatacaagcgctgacgcacctgtatcagcgaatggcggccggagaaacgccagcgcagctggttcagactgaagctgatgaggaggctgaccaatga

SEQ ID NO: 45563 - DNA, 3375 bp, Rhodocyclaceae bacterium PG1-Ca6
atgatctcggaaccccaaaccgcctccttgtttgcccgcgagcagttccggatgacccgcctgcaggtttacaactggggtactttctccggcctgcacgacgtgccgatcagcgagcgaggctttctgtttgtgggtcgatccggcgctggaaagtcgacactgctcgatgcattttcggcgttgctgacgccacctcgctggatcgatttcaacgctgctgcacgcgaggcggaccgcagcggtcgtgaccgaaacctcgtcacctacatacgtggtgcgtgggctgaacagaaggatggggagtcgggagagatcgcgacccgctacctgcgcgcagggacgacctggtcagccttggcactgacctaccagaatgccttgggtcagtctgtggtgctggttcaggtgttctggttgcggggcaatgcaaacggcagtaccgacgtcaaacgccactaccttgtcatggaacgggcctttgatctgcgcgagctggaggactttggccaattcaacttcgacatccggaagctcaagcagtctttccctgaggcattcgcacgcgacgaatttcgcccctattgcgaacggttctgccgtctgctcggcatcgaaagcgaaatggcgctgcgtttgctgcacaaaacccagtcggccaaaaacctcggcgacctcaataccttcctgcgcgacttcatgctcgacaagcccgagaccttcgaggtggcggatcgcttggtcagcgaattcggcgaactcaatgcggcccaccaggcggtcgtcacggctcgcgaacaggttcaaacgctcgcgccagcgcgggagcagcatcagcgcagggattcgttgatgctgctgcgcaatgggctggatgagcttcggctgggggttgatggctaccgtgagactcgccgtattgagctcctcaaggagcacgtggcatccctggaggtgcaagccaacggctcggaaggcgaagtggggcgacgtcaaagcactctggaaaaccacgctgcaatcctgcgcgatctggagcggcagcaccgtgaagcaggcggtgatcagatcgaacaatgggaagcagagaaatctggtctggagggccagcgcacggatcgcctgcgcaaacgcggtcaggccgaagatgcgtgcaagaagctgggctggagccttcctgattcgcctcaagccttcgcagaactgttgggcaacgcgcggcaggaagtcgaaaattgggaacagcgcagcaacgatagccgggccgagcagttccgcctggaccgagaaaagaaggatgccgagaccgcgttttcgcaagcactgaaagaggtgcaggcactccagcgccagccatcgaacattccggcggacatgctggaaatgcgtcgagaaatcgccgccgccatcggcatctcagagtcggcacttccctttgttggcgaactcgtcgaggtgaagcctgacgaggccgaatggcagggggccattgagcgcgtactgcatggattcgcgctctcactcttggtagacgagcgccagtattcagcgctagccaaccacatcaacaccacccacctcggccagcgcctggtttattaccggactggccgcccggagacctggcaggccaagcccattggtggcaactcgctcgtcctcaagctgaacgtcaaggagggggcgtatgccgattggctccaggccgagctacggcaacgcttcgattacgcgtgcgtcgattccattcagtcgttcaggagtgctgatcgcgccatcacccgcgaggggcaggtcaagcacagcaaaacccggcacgagaaagacgaccgaagaagtgtcggcgaccggcgaaactgggtgctcggattcgataaccgcgagaagctcgggctctttcaagctcaggcgcaggagctagctgacaccatttcgcgcctcggcggggagatcgacaagctctccgaccaggacaagaatcgtgcggcccgagcgatgcagtgccagactctggtgaatctccagtggcaggaaatagatgtgctcccattgctggatcgcatctccagcattgaacggcagatccgcgaagcgcgggagggcaatgccaccctgctgcaaatcagcgagcagatcggtgaacaaaagaagctcgtcgaggatgctgacaaggagcttcgccaggcaacacgcgcgcacgactcgattcttgatcagatcaagaccagcacccagaaactggaatctctcctgcaggacgcgtctatcgttccattgacgccccatcaggtgtcgggtctcgacgagcgcttcgccaagcagtcagatgcagtccggctcgacaacctcgacaaggtgacaacgtctgtagaacgcgcactcaatgcggagatcgaagaggtcaaccgtgggattggtgcctgcgagaaggaaatagaagcgcgctttgccgatttcaaacggcaatggccgatggacgcgggcgacatggacacgagccttgccagcgcgccagatttcttcgccaaactggttcggctggaaacggatggactgcccgcctatgagcagcgattctttgaactgctacagaaccaaagccaccagaatctggcggcgctttccacctacctgaacgatgcgcgtaaggcgatcctggaacggatggatctggtcaacgatagtcttggccaggtgcccttcaaccagagcgccaatcaacgcacctatctccacatcgacgccagtgaccggcagcttgtcgacgtcaaggagttcaagcaggagatccagcaggcgctgagtcatgcatggacggaggatcgcgagtttgccgaggcacggtttctggccttgcgacgacttgttgatcgactcgccagtcaggaccccgagcaaaagcgctggcgcgagactgtgctcgacgttcgacagcatgttgagttcatcgggcgggagatcgatgaaagcggcgtcgaggtcgagatctaccgcagcggagcaggcaagtccggcggccaacggcagaaactggccactacgtgcttggccgcagccctgcgatatcaactgggcgggaacgaccacggcgtgccgatgtatgcgcccgtcgtgctggatgaagccttcgacaaggcggataacgagttcaccgctttggcgatgaatatctttaccaatttcggattccagatggtggtcgccacgccgctgaagtccgtcatgacccttgagccattcatcggtggcgcctgcttcgtggacatcagcgatcggcgcgtgtcaggcgtcctgctgattgagtacgacggtgatcgtcagcggctgaaactgccagagcacgcacgagaggaggctagcgttgaagcttcctga

SEQ ID NO: 45564 - DNA, 1164 bp, Rhodocyclaceae bacterium PG1-Ca6
ttgaagcttcctgaagatgttcggcagtttcttgcccgtcgctttcaaagcaagcaccgcgagtggttgattggtgatgcgggcgaggatcaatggccgctggaagttccgctcggcataccgacggaacaggctgcgctgaggcaggtcgacggcgttcgtgcttgggtgagcgcatggcaaggttggcaaggagtcggctccttgtcctggtgtgagcgccggtggaaagcgcttggcgttcagctactaccggagaagctagcgttgggcggcccagagcatgttgccatgtggattggtgagtccgcacgatgggagcgtgctcaatctcgctaccggacactcaccgctcgctggccggtactggcgcagccgttgccaaggtactttgatgtcctggcggactacggcgatgccgattttcatcggcttgcagagatgctggactggatagcgaaccatccacaatccgacctatacccccgccagctgccggtgtccgggctggatagcaaatggctcgatgggcgcaaaggactgctgacggatctggtggccgcaatacaagaggactcctccagcgacctggacttctaccagcgctgcggactgaaggcacctccactccttgtgcgaatgcgggtgctggatcaggcattgcgagccagggtcggtggcgtgggtgacatcactgcaccagtggaagatctggcaagtctcaatttgccggtctcacatgtgtttattgtcgagaaccttcaaacgggactggcaatgtccgacatgccgggcgctgtcgtgttcatgcgtcttggctataacgtcgacgtgttggcccgattgccttggcttgcccgcgcgaagtgcatctactggggtgatttggacacccatggatttgccatcctgcatcgagcccgctcatacattccagcgttgcaatccgtgctcatggacgagggcaccttgctgcaacacaaggcgctgtgggtggatgagtcggcgcagcatccatcaacggaactgacgcttctgacggagcaagagcagcaactctatcgggatctcaagcagcagcgctgggggcaaaacgttcgcttggagcaagagcggatcgactgggtcgccgcgtggggcgcgttgcagcggacattggcctaa

SEQ ID NO: 45565 - DNA, 1461 bp, Pseudomonas sp. 10-1B
gtgaaagcagacaaagtcatcgcgacctatcggcgcatgcgggcgcagccgctatggcgactgcttgcctcgaacaccgggcctaccgtcatcggtctgcttcaggtccatctttacgaaagtaagcgaagtcttcctgcctccatttttcacgaacgaattgccagagatctggaagatctacgcgcccaaggagaagactttccccaaactgcacaagcgtacgtcgccagctggctcgctgatgggtacctggagcgacgcttccctgccggggctttagaggaggaatatgaactctccacagccgccgtcgaagcagttagatttgtttctggcctggagcagccacactctgccgcaaccgaaagccgcctggcgcttgttatcgaagcactaacccaacttgccgcggacaccgacacagacaaataccgtcgcatagaccggctcatgatcgagcaagcccgcatcgataaggaaatcgacgccatccagaagggacagatgcgcgtcctgccccacacagcggcactggaacgcacgcgggaaatcatcacgttggcagatgatcttgcaggtgatttccggcgcgttcgcgatcagttcgaccagctcaaccgagagctccgtgaacgcatcatggacaacgatggcaatcgtggggatgtgctgaattcactgttcgctggaatcgacctgatttcagagagcgatgccggaaggactttctccgctttctggcgattgcttacggacccagaacaggccgccacgctggaccaggcgcttgatagcgtcatgtcgagggagttcgtggggcaactcgaagccaaggaacgacgattccttctacggctgacgcggacccttctcgagcagggtggtatggttcacgaggtactccaaaccttcgcgcgtagcctgaagcacttcgtccagagccgtgaatacctcgaacaacgccgactcaaccatcttctgaaagacgctcaacgagcagcacttgccctgaagaatgaagtcagggccacagaaaccctccagtacacgcttgagctcacgagcagccgtttgcgctccttgtctcaatgggtactgtacgacccctccctacaagctttgcccggccaaatggcagaaggggacgccccgccaatcgacctggagtccgtcagcgaactggtcgcccagtccgagatcgacttcagaacattgaaggccaacgtgctggcagtcctggaacaacggtcccaggcatccatcgctgacgtgctggagcaattccccgctgcacagggtctgggcagcgttgtcggcctgcttgcattgggcagtcgccatggtttcaaagccgaccatagcgaaaccgtaggctgggttggaggcgacgacgagcgtcgtagcgcccgaattccaaagatcttctttttgagggagcgggccaatgaactggtctga

SEQ ID NO: 45566 - DNA, 708 bp, Pseudomonas sp. 10-1B
atgaactggtctgagaacaacgaagcgataatgccagcagaagcacaaacgcctgatgctgcgcagacacctgccaacacccttttcaccggtgacagcggcgagttggtactcgatactcggcgcgccctggtgcagctactggcagggccatcgctggacggacgtcgacatccaaaactgtggccgatagtagtgcgagatgaagcggtaatacgtcggcgtcttgccgagctgttcctcgaactggtcatcgaccgggacgtacaagttgccttcacccgtcaagcagataccggcgaccttgaggtaccacttctgctgcgccgcgcgcagttgaccttcattgactccattctgctgcttcaccttcgccagcgattgacccaggcggactcgcagggcgaccgtgccgtggtatcgactgacgagatcatggagtttctgaccctctatgagcgtgcctccaacaccgaccacgcaggattcgtgaaacgtgttcacgcatccatcgagaagatcaagaaacacagcatcctccagaaaattcgctcgagtgaagaccgtttcgagatttcgccaacgatgaagctcctcttctctgcagaagaaatacaagccctgactcacttgtatcaacgcatggccggcaatgagacgccagcgcaactggcccagaccgagcccgatgaggagggagaccaatga

SEQ ID NO: 45567 - DNA, 3375 bp, Pseudomonas sp. 10-1B
atgatctcggacccccaaaccgcgtccttgttcgcccgggagcaattccggatgactcgcctgcaggtttacaactggggcactttttctggcctgcatgacataccgatcagcgaacgcggctttctgtttgtaggtcggtccggagcggggaaatcgacgcttctcgacgctttttcggcgttgctggtacctcctcgctggattgacttcaacgcggccgcgcgcgaggctgaccgcagtggccgtgaccgaagcctcgtcacctacttacgcggcgcgtgggccgaacagaaggatggagagtcgggtgaaatcgccacccgctacctgcgctcggggacaacgtggtctgccctggcgctgacctaccagaacgcacagggccagtctgtggtgctggttcaggtgttctggcttcgcggcaatgcgaatggaaacaccgacgtcaaacgccactaccttgtcctggagcgggcctttgacctgcgcgagctggagggtttcggtcaatccaacttcgacatccgaaagctcaagcagtctttctccgaggcgttcacccgcgatgagtttcgtccctattgcgagcgattctgccgcctgctcggcatcgagagcgaaatggcgttgcgtttgctgcacaaaacccagtcggccaagaatctcggcgacctcaataccttcctgcgcgacttcatgctcgacaagcccgaaaccttcgaggtggcggatcgcttggtcagcgaatttggtgaactcaatgctgcccaccaatcggtagtgacagctcgcgagcaggttcaaacactcgtgccagcccgggagcaatatcagcgcagagattcgttgatgctgcaatacaataagctggatgagcttcggctgggcgttgatagctaccgcgaagcccgccgtattgaactcctcaagcagcatgtcgcatccctggaggtgcaagccaacgcctcggaaggtgaaacaagtcgacgtcagagcattctggataaccacaccataactttgcgcgatctggagcgacagcaccgtgaagcaggcggtgatcagatcgagcaatgggaaacagagaaagcagggctggagagcctgcgcatggatcgcctgcgcaaacgcggccaggctgaagatgcgtgcaagaagcttggctggagcctcccggattcgcctcagagcttcgctgaactgctaggcaacgcgcggcaggaagtcgaaaactgggagcagcgcagcaacgaaaaccgcgaagaacagttccacttggcgggtcaaaagagagacgctgagacggcattttcgcaagcggttaaggagatacaggcgcttcagcgccagccatcgaacattcctgccgatatgctcgaaatgcgccgagacatcgccgcagctatagggatatcagaatcggctttgcctttcgtcggcgaactcattgaggtgaaacctgacgaggccgactggcaaggtgccatcgagcgagtactgcacggatttgcgctctcactcttggtggacgaacgtcagtattcggcactggccaatcacatcaacaacacccatcttgggcaacgtctggtgtactaccgaactggtcgcccggagacctggcagacgaagcccatcggcgctaactcgctcgtcctcaagttgaacgtcaaggaggggacgtatatcgactggctgcacgccgagctacggcaacgcttcgattacgcgtgcgtcgactccattcagtcgttcaggagcgctgatcgagccatcacccgtgagggccaagtcaagcacagcaaaaaccggcatgagaaagacgaccggagaagtgtcggtgaccggcgaaactgggtgctcgggttcgataatcgcgagaaacttgcgctctttcaagcccaggcccaggcgctggctgccacgattacacgcctaggaggagaaatcgaaacccttgccgaccaagacaagaatcgtgcaacccgagcgatgcagtgccagatcctggtgaatctccagtggcaggaaatcgatgtaatcccgttgctagaccgcatcgccaccatcgaacagcagatccgcgaagcgcgagaaggaaatatagccttacagcaaatcagtgagcggatcgacaagcaaaatagcctggttaatcaagcagacaaggacctccgagaagccaaggttacgcatgactcaattctcaagcagataaacgacagtacgcagaagctggaatccctccttcaagatacttccagagttccattgactccccatcagatgcaggggctcgacgaacgcttcagcaagcagtcagacgcgatcaggctcgaaagcctcgacaaggcagcaactgctgttgagcgagggctcaacacagaaatcggtgaggtcaaagatgagatcggcgattgcgagaagaaaatagaagcacactttgccgatttcaaacggcagtggccaatggatgctggcgacatggacacgagcctcgccagcgcaccggactttttcgccaaattggtacgactggaaacggatggcctgcctgcctatgagcagcgattctttgaactgctgcagaaccaaagccaccaaaatctggcagcactctccacctacctgaacgatgcgcgtaaggccatcctggaacggatggatctggtcaacgacagtcttggccaggtgccgttcaaccaaagcgccaatcaacgtacctacctccacatcgacgccagtgaccggcaacttgttgatgtcaaggcgttcaagcaggagatccagcaggcactcagccatgcatggacggaggatcgcgagtttgccgaagcacggttcctggccctacgccgacttgttgatcgacttgccagtcaggcccccgagcagaaacgctggcgtgagactgtgctcgacgttcgacagcatgtcgagttcatcggacgggagatcgatgaaggcggcgttgaggtggagatttatcgcagcggggctggtaagtctggaggccaacgccagaagctagccaccacatgtttggccgcagcccttcggtatcaactgggagggaatgaccacggcgtaccgatgtatgcacccgtcgtgcttgatgaggcattcgacaaggctgacaacgagttcaccgctttggcgatgaacatctttaccaatttcgggtttcaaatggtagtcgctacgccactgaagtccgtcatgaccctcgaaccattcatcggtggcgcctgctttgtagatatcagtgaccggcgagtgtcaggcttgctgctgatcgagtacgacggtgaccgtcagcggttgaagctgcctgagcacgctcgagaggaggctagcattgaagcttcctga

SEQ ID NO: 45568 - DNA, 1164 bp, Pseudomonas sp. 10-1B
ttgaagcttcctgacgatgtcagacaatttcttgctcgtcgctttcagagtaaacaccgcgagtggttgatcggtgatactggcgagagcccatggccactggaagttccactcggcatacctacggaacaggcagccctgcggcaagtcgacggcgttcgagcttgggtaagcgcatggcaacgctggcaaggaatcggtatcctttcctggtgtgagcgccgctggaaagcgcttggcgtccagcgactgccagagaaactggcgttacgcagtcctgaagatgttgccatgtggattggtgaatccagacgatgggagcgagcccagtctcgttaccaaacgctcattgctcgctggccggttctggcgcagcagttaccgaggcactttgacatcctcgctgactacagcgataccaattttcgtcgcctgacagagatgctggattggatcaatctcaattcaaaatccaatctctacccacgacaaattccggtggccggtgccgacagcaaatggctggagtcgcgcaaggggcttatctctgatctggttgcgacacttcagaatgacccaacaggggatcgcgacttctttaggcgctgcggtttgaggccgcagccgcagctgctgcgcatgcgtgttctggccccagagctgagagcccgtttggacggccttggcgatatctctgcaccttttgaggaagtggcaagcattggcatacggccaacgaatgtcttcattgttgagaaccttcaaaccgggcttgcctttgatgacctgccagggtcggttgtgattatgcggctgggttacgcggttgacattctggggcagcttccatggctacaacaggcgcaatgcatctattggggtgacattgatacgcatggctttgccattcttaatcgagccagaacatacatcactgccctgaagactgtgcttatggatgagtcaacgctgatgaatcatcgagatttatgggtggaggagaaggaccagcatctttccatcgagctcccattactcaccagcacagaacaaaagctctatcagttgcttaagagcaatacctgtgggcaacaagtccgcctagaacaggagcgggtgcgctgggatgtggcgtgggcagccatacaagcaagtattcgatga

SEQ ID NO: 45569 - DNA, 1455 bp, Pseudomonas aeruginosa; identical to SEQ ID NO: 44081

SEQ ID NO: 45570 - DNA, 756 bp, Pseudomonas aeruginosa; identical to SEQ ID NO: 44082

SEQ ID NO: 45571 - DNA, 3387 bp, Pseudomonas aeruginosa; identical to SEQ ID NO: 44177

SEQ ID NO: 45572 - DNA, 1194 bp, Pseudomonas aeruginosa; identical to SEQ ID NO: 44178

SEQ ID NO: 45573 - DNA, 1440 bp, Pseudomonas sp. 12M76_air
atgttctttaccgatcagcgcctgcagttcttcaagccactgaccagcaaataccgcgaacagatcgtcgaatgcctgcgcctgctgcacgaacgcctgtacagcgccagcgccgattacggcgagtcgctcaagcgcgaacaggtgctagatatcttctgcgaggcactggagcgggcgccgctgctcgatggcgacgacgatgagcagggccgcttccgcactaaccgtgaacaggccggctgggttctcaccaacctgatcgattacggctggctcgagcgtcaggtggaccaggccaccttccagtccacctaccccttcagccgcctcggccgcctgtttacccaatcgctcaccgaagcggccggccacagcgtacggacgcggcatcgcaacacccgcaataccctgaacgccctgaccgcctttgccgagcatgccgaagtctatgatctgctcgatgcttacgagtattccgagcgcatcatcgccgacttcaccgacatcattgccgagctggaagagcgcaagcgccagctggtgcgtgaggtcgaagcccagcaactggtgcagcaggccagcgaccagttctttgacttcatggagcggcgcttccagcccgacgtttccgtccggctctccgccgacagcgtggagaaacaccgcgaccgcatccacgaagtactacggcgcatccggcataaaccccgggaatggaaggcccaggccgaacgggagctgcgccgcctggcgcctgatctgattgtcgatgaccgcgcttcggtactctggcaactgctcgacaccatcgacaaccgcctgcgcaatgcctcggaaatcatgctgccggccctgcgccgcaccctgcagagctttaccaagcgcgccgacattctcattcgtcaattgagctatctgcagagccagcagcacaacgatatggtcggcctgtgccgcgacctcagccagctcgatgcagccgcctatgagcagcgtctgtccgctgccggcgaggccatggcgcgtatccgcctggaactgatcgaccccgcccaggtacgcctgcgtgaacgccagcagcgccagccggtacacagccagatggaagaccccggccagccggatgaccagaccctgcgctcgctggccgttacccaactgctggagcgcgccttccatatcaacgccagcggtatgcgcgactacctgcgcagcgccctgggcgacggccgccgcattgacagccgcgacctgccgatccgcgacgccagcgatctgctcgccgtcagccatgtcattgccctgggcagtgccgaccaggccgcggccggctttcgcgtgaagatcgagcccaccggccagccggttaccgacgacacctacttcaaccgccgcgacggattcatcatcgaattggaacaagatagccatgcgtga

SEQ ID NO: 45574 - DNA, 681 bp, Pseudomonas sp. 12M76_air
atgcgtgacgccctggaaaaccaactgcagcaatacggcgtgagcgccgacgacttttccgacctgatgatccggctgcttgatcgtggcgtgctgtgccgtgacgaaagtaaacgcgaaaccgaactctatgaccgcttcctccaggtgcaaccgctggtcgaggattacctgtgggtgctgcgcattcggctgctccacgagacccgcttcaatatggtgcgcatcttcccgccgggcgcggaagtgcctggcctggccgacagcgatgagagcttcaacagcggcctgcgggaacgcctgagccagcaggaagtttccctggtgctggtgctgcgcgccgagtatgacaaggctctgcgcgacgggcaggtggatgagctggggcaggtgatgctgtcactggaagcgctaagcctgagccatcgcaacctgctgggccgcccgctgccggaacaggccagtgaacgcgaagccctgctgcggcgcatgcgccaactacggctgatccgcagcccaggcgaaggcaccctggaggacggtgaaggttggctgatcattcgcccgggcatcatcagtctggtgacggatgccgccctcagccaactggccggcggcgtggcaatggataaagcagaccctctggacgaacccgttgatcacctcgaaggaggccactga

SEQ ID NO: 45575 - DNA, 3630 bp, Pseudomonas sp. 12M76_air
atgtacctgaaacgctcgattaccgccaattggggcaacctgcccgttgaagagatggagtacggcccgatcaacctgttctccggcggcaacggctccggcaagaccaccgccgccgacgcattgcagacgctgatgactgccgcccacgataacctgttcaactacaacccgggccaggacgaaaccacccagcgcggccgcggcggcaagcaggtgcgcaccctcgcctcctacgtgctcgggtgtgacgatggcgccttcgcccgtccctggaccaccgatggctatattgccggggtcttccacccgaccctgggggaaaccgccgagcccttcactgccgtcatcggcgtgcgcgcgcacctggacaccgctggcagcagccgtcaggcccgccaggatgaactgctgttgatgattgtgcccggcgaaatgctgtcgctcagcgactttgtccgcgacgcggaagacggtcgccacgtcatccccttgaccgaacttcccgccctgctgcgcaagcagttcggcactcagggagtggagacctacgaccgcaagagtgcctacctggctcgcctgtatggcgccctacgcggcaagggtgaagcggtctcggttcgtgaagcgaagaatgcggcgcgcaccttcgccaacttcatggcctacaagccggtgcgctcgatcgatcagttcgtcgccggtgaagtactggaagcccgcgagttcggcgataccatcaagcgcatccgcgacctgctgcggaccgtccatggcatggagcaggaagcggcgcgggtccgtggcgctgtcggcctgctggagcaagcccgccagctgaccgaggattaccagaacagctggctggaacgcaccgggctggactacgccgctgccgcacagaactggcagcaaaatcgcaagcaatacgtggttgccaagaaccagcagcaggagctgcaggcgcgcatcgaagacctgagcgccgaacagcagctcaacgatgagcgcacccagcaggcccaccgcgacctggtccaattggaggcgcgccgtcagggtattcccgccttgcagggcaaggacgagctggaaagccgtcagcggcagctcggcacgcggctgcgccagggtgtcgcaccactgctggaacaggcgcaccagcgggatgtaaacctggaagccgtgcgtaccatccagcatctggtcgctaccggcgtgggcggggaaatccccgaactgactacccataactggaagaccctggctaacgaagtgctggccgccgagcagcagccggtggcggaactgcaccagttgctgtccaacgactggatcgacctgagcccgctgcacaagggtttggacaatgtgcgccaacaacagcaaagccataaccggctggctaccctgctcgcccaacccgggaccgacggcatcagcctgacccagcgggtggatcggctgaaccaggaacgggctaacgcccgggccaacctcgaacgccagatcaccgccagcgaacgccagatcagtgccctccagcaaagccgggtaacctacccagcctatgtcgaggaagcgctggcagccatccgccagcaatgccccgaagcagacccacgggtgctgtgtgatcacgtggaggtcaccgaccccgaatggcagatgtccatcgaaggttacctgggcggctctcgctacggcattctggtggagccggaccatgaggccgaggctatccgcatcgttcgccagctcagcgcccgggaccgcaaccgggcgcgggtgattcagggcaacaaggcccggcaggacgccgagcgaatcagcctgccgccggattcggtggtacatgtgctgcgtttcagccaccgggtagccgagcattatgtacgcgcctcctatgccaacctggtacgggtcgacagtgccgaaggtctgcgtcaaacccggcgtggcatcacccgtgagggcatgggctcaggcaactattccatgttccgctgtgatattgatgacagccagctggtcttcggcgcggcagcccgcgagcgcagcctgcgcgcccagcagaaacaactcgatgagctgttggcacagcgccatgcccagcgccagctcggtgaaaatctgcaacacttggcagctgcattccagcgcatcaagccgctggactacgttaaccaggccagccaactactggagcaccgccagcagctgcacgacatcgagcaacagttggccagcctggacctgagcgccttccaggatgtggagcaggagctgcaccgggtcacagaacgccacgctgactgggtgacgcgccagagtgagctgcagaacgagctcggcggcctgaacgttcagctgaaccagatcaatcagcgcatccgtaccctctccgaccagggcgataccctccaggaccagcgtgacgaggccgagcagttcctgctcaacgccgccgcccgggtcagtggcctggatccgcagcagcggctgacccagattgatgagatgctgacccgcgccagcgatgacttcgacttcgccgccgacgccaagagtttgaccgacagcctgtatcaactggccgtggcgctggaccgcagcatcaaggagtacaatcagcaggcccagcccgccgacaacctgctgcacgacaccggtgccgcggtgcatagcctggacttcttcacccatatctgtagcctgcgcctgcagctggacaacctgcacaaccggctacgcaataacgtgctgctggaaaagcaggaacagttgatcaagctgcgcgatagcttcaacaccaccttcatcagtgacctctgccatgagatccaccaggccatcaatgacggcgggcgcaccctggacggcttgaacagcgagctgcagcaccaccgtttcggtgctgaccgcgaaagcttccagttcgaatggagctgggtaccggagtacaaggagtactgggagttcttccgcgaggtgacccagatgcccaatcttggcgatggcgccagcttgttcgatgccaccctgtcaggcaagggcgctgcaatacgcgaccaattgctcgggttactactcgatggcgacgagcaacaggcgttacgggaactggagcggatcagcgattaccggcgttaccgccgctatgacatcctcaagcatcctgaaggcaaggcaccgatccggctcagtgaatacggcaccggctccggcggccagctggaaaccccggcctacatcattcgcgccgctgccgtgaccagcgccttccgcttcaatgaaggcgacagccatctgcgcatggtcatcgttgacgaagccttcatgcacatggacgaaacccgctcgcgggaggtgatcaactacctgaccgaaaccctgggcctgcagctgatcttcatcatgcccaccagcaaggccggcccgttcctggaactgatcagcaaccagttcgtgttcagcaaggtgcccagtgcccgcccggtgggcgaactcaatacccgggtgttgctcgaccgccagcagctcaaccgcgagcgcatcaccgagctgtgggccaaccaccgccgggtgattcgccagcagggggcgctggatttcatggagatggtgtaa

SEQ ID NO: 45576 - DNA, 1446 bp, Gynuella sunshinyii YC6258
atgtttttcgaacaaccgagagcgcagtttttcaaacctttgaccagcaaatatcgtgaacaggtggttgaatgcctgagagaactgtacttgcgcctctacagtgccagccacgcagactatggtcaggcgttgcagcgcgacaacctgatagaaattttccaggaggcgcttgagcgtgccccggtgctggctgatgattccgatgaatccaccggtgagcagcgttttcgtaacagtcgtgaacaggccggctggattttgaacagtctgctcgaatatggttggcttgaacgtcaggtggatgaagccacgttacaaagcacttatgccttcagtcgttttggccgtcagtttaccgagccgtttattgcgtctgaacgcagtgcccgaacccgccatcgcaatactcgcggcacttataactccctgagcgcctttctcagcaacggtgaagtctatgatctgctggatgcgtttgagtattccgaacgcatcatcgctgactttaccgatgtcatcacagagcttgatgatcgacgcagggagttggtcaaggatatggaaacccagatgctggtgcaaaaagccagtgatgaatttttcgattttatggaaaagcgttttcagcccgacctctctattcgcttatcagctgacagcgtcgaaaaatttcgtgaccgtatcgaagcgttaattcagaaaatccgcaaaaaagatcgagcctttaaaacccggacggaacagcgattgcgggaactgttacctgatcagatcgtggctgggcaatcgttattgtggtcactgttggatggcatcgaatatcgcatccgagctgccagtgatgtcatggtgccgcaattgcggcgggctttgcagagttttaccaaacgggcagatatcatcatccgacagatgagctatttgtccagccagcagcataatgatctggtgagtatctgtaagcgcctgtccgaactgcctgcacaggaacaggggcaggccttgttgcatgccggtgaaatcatggcagtaccgcgactcgggtatgttgacccgcaacaggtgcgtctggcagcgccgcgcaggcgtctggtattggcgatggatatcgacagcagtgagagttttgatgtcgaggcccgcaaagacatttatatccagcagctgctggatcaggccttttttatcagcgatcagaccatccgtgattatctgtatcggaatctgttagccggccataaagtggatacccggcaattaccggttgaaaccgccagggatctgttatctgtttcccatgctatcgaagtcggtgcggccagcaacctgtccacggaattccggtttcaggtgacaccggtcgaaaacgaaacccacgaaaatgaatattttgccagacaggatgtgttcgaaatttgtctggttacgaataatcaggaataa

SEQ ID NO: 45577 - DNA, 741 bp, Gynuella sunshinyii YC6258
atgttgaatgcactggaaaaccagcttgaaaaacagggcctgcagttacgtgattttaccgagctgatgatccggctgatggattatggtgtgatctgtcgtgatgaaagtcaggttgaacaggttttgtacgaccgttttgtacgccttgaaggtctggttgaggattacctcaccgtgctcagcattcgcatgcagcacgatcgtaagtttcagtttgtacgattgtttccgccaggagcggaagtgccgggtatggatgccgaagaagatactcccttcaatggtggttttcgggtgcgtttgaatcaacacgaagtcgccctggtgctggtattgcgaagcttatatgacaaagcgctcagagaagggcaggttgatgaacatggtaatgttctggcgtcattggaaaacataaacatcgccatgaaaaacctgttgaagcggacccttccggaaaacgtgaccgaacgtaaagctctgtttcgtcgtacccggcaattgcgattgatcagtctgaatcctgaagcatcatttgaagatgtcgaattgtggttgcgtatccggccaatgatcatgagctatgtcagtggtgatgttctcgcttccctggtagagggaatggatcaggacgtcactggtggagtcgaaccgattgccgaaccagatagcggtgaagaagaggaagagttgatcgtcaatcaacacgcttctgtttttgatcaggacgaggcagagtaa

SEQ ID NO: 45578 - DNA, 3645 bp, Gynuella sunshinyii YC6258
atgtatctgaagaaatttatttatgttaattggggtaatattccggctttggaatttgattttggcccaatcaacctgctcagtggtggtaatggctccggtaagacgaccgcagcggatgccattcagaccatcatgacagcagcacatgataccttgttcatgtttaaccccggtcaggatgaggctacccagcgtggccgtaacaaacaggtcagaaccctggccagttatgtgctcggatgtgacgatggcagttatgccagaccggaaggcgcagtgggctatctgggagcggtcttttatccgacggagggcgaaaccgcgtcgccgttcaccgcactgattggtgtatctgcctccctcgaccgtgccggtacccaggctgtggcgcgtcagaatgatatgcagttttttatcagcccggcggaagagctggcacttgacgatctggtgaaaaccgatgcctccggtggcaagcaggttgtctccatggacgtgctgaccaagcaggtgcgtaagcgttttggtgctgacgcgattgaaaaatacgataccaaacggcagtatctgcggcgtctttatggtgctctgcgggggcgtcgcgatggtgtttccgaagcagaagcgctgaatgcggctcgcgccttcagccgttttatggcctacaaacctgtcaaaagcatcaatggttttgtggctcacgagattctggagccgaaaaatctgggcgaagccattcgcagtatttcagaactgatgaaaaccatttatgcgatggaaagcgaagccacccggctgaaggaaacggcaggtattctggagaacactcgggccaaatccgatgcctatatcgaacagtggattgagcatcatgtgctggaatatctcgctgccagaagtcgttatctcaaagaacaaaaagcgtacctggataccaaagaacagcaaaaaaatatacgtgaagccattgaacagtccaaaaaagaccgtgaactggccgcccgccggcgtgaacagttgcatgagcaactggtcaatatcgaggcacagcgcaaaggcattggtgcgttacaggccaaagatgattacgagaaactgattcgcaacaataccgacaaactacacgagttggtgccgaagctgttggaacaggccaacaatcttgaaggtgccgctcaggccaatcgctccattcagcaattattgtcgcagtcttcattgtcagcggatatccctgaacttgggcagcggtcgctgttaactcaggccaaggcagtgattgccaaatccgaacaggaacagatcgatttcccgcgcttgctgggtaaggatctggcgggcttggctgcactcgaagatcatctggacagcgccctggccagtcaaaaacaactgaatcagtggcgtgacacctggttcagctctgagcagagccgttccggtatgagtctgcgtgatcaggtggcgcggctggtggaacagcgtgatcaaaagctacaggcaattcgacgccaaattgccatgaaacaggtggatatcgacagcttgtctaccttgcaagtgaattatcccggttatacccgcgcggccatagaagcaattcggcgggagtgcccacaggctgaccccagagtattgtgtgactacattgaggtcattgaccctgactggcaatcggcgctggaaggttatatcggtggtgcgcggttctcgatcattgtggagccggagtttgaagcggaagccattcagatcgttcgtaacatgccgggacgggataaccgtgcccgtgtggttcagggatctaaagcccgcagtgatgctgagcggatgaaagtcccggccaactcgatcattcatctgatggaattcaaccacgcggtggtgaaaggctacattaccgcgacttatggcagcgtcgagcaggttcgcgatgctcaaaccctgacccagactcgccgtggtgtaacggcaacaggtatgggcagtggaggttattccatgtttcgctgtgatttacctgactccgagctggtgtttggcaaaggtgcacgtgagcgggcgctggcggctaaaaaggctgagctgaaccaactggctgttcaggccaacgaggcagatcagagtattggtgaagcccgtaacctgttaaatgccgttaatcagttgccacatctggtgtatgccgactacatgcaagccatgctggaatgccatcgcagcatacagaccagcgaacaggcgttggacatgctggacttatcggattttgagtcactggaaatcgagttcaaccgattgcggcaacagcagcaggagctggatcagtccatttcctccctggataaagaaaccggcgagcaggaaaaccgcctgaaaacagtcagcaaacgttgtgaagatcttgccgaccaacaggacgaaacattaacggtggtggaaacccgggaagaggatctgcgtaatatcaaaacggtctggccggagttcgatgccgatgcacgcttggcttcggccgatgaagaggccaaagatgttacccaggaattcgttgataaccaggtgatggcaattgccgcggaactgaacagcaaagcccatgaaatcgaacgcaatatcctcgaacacaatcaacgttgtactccgggtgatgccattgtttatcagcctgactatgcgctgggccataatcagacctttttcaaaggcatttgcatggtgcgccgggaagctgaccaggttcacaatcgcctgaaaaataatattctggttgataagctcgataagctggtgggattgaaagaggatttcaacaacgctttcgtcaccaacctgtgtcattccatctatcagtccatcaatgatggcaaacggattctggaaaatctcaataaagaacttgagcatcatcggtttggggctgaccgcgaaagctatcggtttggctgggaatgggttccggaatacaaagaatactggagcttcttcaaagagatcatcaacgacccgagtctcggtgagagcaatacgctgttcagcagcagtctttcggataaatccaaaaaaatccgtgaccagctgatgtccatgctacttgatgaagatgaacaaaaagccatgcgtgaactggaacggatttccgattaccgtaactatcgtaactacgaaatctacaaacagcccgaaggcaaagaacctatcgcgctgagccaatacggtaccggttccgggggccagctggaaacacctgcatatattattcgcagtgccgcaattaccagtgcgttccgcttcagcgagggggacagccatctgcgtatggtgctggttgacgaggctttctcgaagatggacgaaacccgctctaaagaagtgatcaactatctgaccgaaactttgggattgcagcttctgtttatcatgccaaccagtaaatccgggccgtttatggatctcatttccaatcagttcgtattcaccaaagtgccgttgccggcgggtcagaaaaccggggagctggctacccgggtactggttgaccggcaaaaatgtaaccaggacagaatcaaagaactatgggccaaccatcgccgtgtcgtgatgcaccagggtgaactggactttatggaagagttcgcctga

SEQ ID NO: 45579 - DNA, 1176 bp, Gynuella sunshinyii YC6258
atggcactgccgcttccccggttatcaaagccactggaagcggcattcttttgtttgtttaaagcagttgtcagcaaacatctcaagggaaacaagcggctgtatataaagttcagcgaaagaaactgcgccaggattcgtgacctcaaataccttggcaacgatcaactcggactgttctttgaatacttaaacgatctcgatcaccaccatcagttgtttatcaactggtcaccccagcgcgaagaagatatcgaaaaagaagacatgtctgattgttttgtggaattcaggcccgacagtattgagcagatcaggcagtggtttccagaacttgatcagctgtatgaacgtcattcctggtctgatcgggtccttcaatcagagttttcgggtaataaggacgtgctggcccgaaggccattggagatcacgggttatgattcacaggaagtgatcaccaggctcagtcgtattccggaattactgcagcaaaacgccatgacaaccactgagttgagcgcggtattgtttgacggacatgcaaaacacctgactcatcgcgactggctgtgtcgtttattccccgagtacgaagaacggatattgccacgaaagatcataatgaatgtctggctgccggatgaccttgactatgtgctgctgatcgaaaaccaggatgcgttttttaagctggtcgatctgaatcctccctgtgccctggtgttcagcgccggatacaaaggtgcttcacaacggttgtgggaaccatcactctgtcagttcttttttgccggtcagttggaacaacgcaatcgtttcataagctcgtggtttgagcagtgcatgacgctttatttctggggagatctggatttcgccgggcttgatatgctggcattgatgaatcagaaatatcgcgccaaagtcaatgcctggcaaccaggctatcaattgttacgggatcagattgaagcaggcaaaggcatagctgccgacgtttatcaacaaattaccggcaaggcccagaaccggaaaatatccgcgaccggtgacccatgggcggatgaacaattactgcagtacttacaatcacatcagagttttgtgcaacaggaaacagtgttgagcctgctgaatttgagtcactttgataaaacgggggaaggtcgctga

SEQ ID NO: 45580 - DNA, 1473 bp, Xanthomonas oryzae pv. oryzicola
atgaaacaccgtgcccgtatcgcccgctatcgcgccctgcgcgagcagccgctgtggaaactactggcggccgatcagtcgccggaagtgatcggcctgctgcagacgttgttgctcgacagcgagcgcggtttgcccgcggcggtcctgcatgaacgcctgcagcgcatgcttgacgatctcaatgtcgatcagctctcgcgcgagctgccgcgcactgcgcaggcctatgtagcgcactggctggcgcagggctggctggaacggcgcctgcccgagggcgcgcagcaggagcagtacgagttgtctacccaggcgatacaggcgattcgctttgccgatggtctggagcaggcgcgtggtgccgcgaccgagagccggcttgcgctggtgatgcagcagttgtcgcagttggccgcgttgaccgaaaccaatcccgatgcgcggctgtcggcgctgcgcgacgagcgtgatcgcattgatgcggagatcgcgcgggtggctgccggcaaggtcgcctcgttggatggcaaacgcgcgctggagcgtgcgcggcaggtgatcgcgctggccgacgagctgaccgaggattttcgccgggtacgcgacgatttcgagcagctcaatcgccagttccgtgagcgcatcatcgacgacgagggcgagcgtggcgaggtgttgacgcggctgttcgagggcgtggacgtgatcggcgacagcgaggccggacgcagttttcaagcgttctgggcgctgctcaacgatgccgaacaaagcgcgcagctggatgcggcgctggagacggtgttggcgcgggcgttcgcacgcaagctcgaccgccgcgagcgcagcttcctgcgcggcttgaccggtaccatgctcgaacgcggcggtcaggtgcacgatgtgatgcagcatttcgcccgcagcctgcgcggcttcgtccaaagccgtggctatctggaacaacgccggctcaatcaattgctcaagcaggcacaggccgaggcgttggggctgcgcgagcatctgcgtgcgcagcgctcggtcgggcacgacctcaacctgaccaccagccgcttacgctcgctgtcgcaatggcgtctgcacgatccgcgtcagacccaggtcgatggcagcatccagcgcaacgacgcagccgcgatctcgctggacagcgtcggcgatctggtcgcgcagtcggaaatcgacttccgcagcctgcgccgtgatctgtacgagctgctcggcgaacacgcacagctgtccatcgcgcaggtgctggcgcaacggcaggcagagcaggggctcggcagtgtgatcggctacctgtcgcttggcacgcggcatgggcaggtggatgcgcaacgcagcgagatcgcgcgatggcgtggcggcgatggccagtggcgcggcgcacgtattccgttagtgtggttcagccaggagaaacgcaatgaattggcaggctga

SEQ ID NO: 45581 - DNA, 699 bp, Xanthomonas oryzae pv. oryzicola; identical to SEQ ID NO: 42287

SEQ ID NO: 45582 - DNA, 3432 bp, Xanthomonas oryzae pv. oryzicola
atgaaatcttcttcctccagcctgtttgccgacgatctgcccgacccgcgcgtgcagcagtttcgcatgcgccgcctgcaggtccataactggggcacgttcaacggcttgaccgacgtgccgatcgccgcgaagggcttcttgttcgtcggccgttccggttcgggcaaatccacgctgctggatgccatgtccgctctgttgaccccgcccaatctggtcgacttcaatgccgccgcgcgcgaggccgagcgcactggccgcgatcgcaacctggtgtcgtatgtgcgcggcgcctgggccgaccagcaggacagcgcctccggcgaaatcgccacgcaatatctgcgcaagggcagcacctggaccgcgctggtgctggaataccgcaacggcgagggacgggtgatcagcctgatacggctgttctggatcgctggcagcggtgcggcggcagccgacgtgcgcaagcattacatggtggccgagcgcagtttcgatatcgccagcgaactggtcggcttcgatctggatttgcgcaagctcaaggcgcgtctgggcgacgacatcgcccacttcgacaatttctccggctatgccgagcgcttacgccatcagttgggcatcgccaacgagatggcgttacggctgctgcacaaaacccagtccgcgaagaatctcggcgatctcaatgtgttcctgcgcggcttcatgctcgaggcgcccaagaccttcgacgccagcgagcggctggtgggcgacttcgccgaactcgatggagcgcatcgggcggtggtcaccgcacggcggcaggtcgaaacgctgctgcccgcgcgtgcgcattacgacgacttgcagtcggtgcaacgtcagcgcggccgcttgcaggaactcaagctcggcctggacccctatcgcgagcaacgccggcttgcgttgctggatgcgcgcctgcatgcactggacgtcaacgaccagggcctggccggcgaggagggccaacgccgcgctgcagtggataaccaccaacaacgcttgtccgatctggaggcccagcgccgcagccagggcggcgagcggatcgacgcgctggaacgcgagcagctccaggtccagggcgaacttgcacgccgcagcgacaagcgtgccaaggccgaacaggcctgccgccagctcgaccaaactttggccgacaacgcgcatggatttgccgagcagtccgcgcaggcgcgcgccgcgctcgaggacgggcagcggctggccgccgaacaggacgaggcgatcgtcgagcgtatcgctggcaagcgcgaggacagccagcgctttgcgcaggtgcgcgccgagatcgaggcgctcacccgcaatccctccaacattgctgcgccgatgcaggccctgcgtgcacgcctgagcgaagaaaccggcattcccgaggccgcgctgcccttcgtcggcgaactgatccaggtgcgtgaggaagatgccgcctggcgcggtgccatcgagcgcgtgctgcatgggtttgcgcaatcgctgctggtggacgagcgccattacgccgaactggccgagtgggtcaaccgcacacatctgggctcgcgcctggtctattaccgggtgcgcaataacgaacaggcgtttgccggccgcgaacccggcagcgcctcgctgctgcacaagctgcaattgcgcgagcatccctttgccggctggctgcggcgcgaactgggcaagcgttttgactacgactgcctggagagcgccaaggccttgcgcacggcagagcgcgcgatcacccgcgaaggccagatcaagcatcccggcgaacgctatgaaaaggacgaccgtcatgcggtcggcgaccgtcggcgctggctgctgggcttcgacaaccgcgacaagctggcactgtacgagcgcgaagccattgaactggcacaacgcatcgccgcctgcgatgccgacgtggccgagctgcgtgcgcgccgcgaacgcgatgccagccggcgcctggcccagcacaccctggccaacctggcctgggaggaaatcgacgtcgccgcacagctgcaacgccgcgacgatatcgccaacgccttgcgccagctgcgcgaaggcgatgccaacctgcgcgcgctgggcgaggcgatcgagcgcacgcgcggcgacctggaacaggccaagcgcacgttcgacggtgtgcgcgaggaacggatcgcgctgggggtcgagcgcacgcgcctggaaaagcaacgcctgcactgcgccgacgccgatgcccgggtggtcacgccgctgcagcgcgaggggctggaggagcgcctggccaacctgggcgcgcttagcctggacaatctcgaagcgcattttcgccagatcggcaacgccatcgccgagcagaccagcgccagcgacagcgagcacaatcggctcgaacagttgctgctcggctgctttcgccggtatagccaacagtggcccgaagacagtggtgacttcatcatcagcctggccggcgccgaggattttcttgcccgcctgcagcgtctggaacgcgatggcctgccgcagcacgaagcgcgctttttcgagctgttgcagagccagagcaagaacaatctgctcgccttgcagcgccacaccgccgaagcacgcaaatcgatcgcccaacgcctggacgaggtcaacgccagcctggagcaggtgccgttcaaccatggcaccttgctgaccatcgaactcagcgatcggcgtctgccggaggtgatcgacttccatcaacgtctgcgcgatgtgctcggtcaccaccagaccgaacagcgtgacgtggccgaacagcaatttgccgtgctgcgcgaactggtgcgtaagctcggctcggccgatggcgaggacaagcgctggcgcgagctggtgctggatgtgcgcctgcatgtggagttcgtcggtgtcgagctggatgcggccacccgccagcaggtggagatctaccgcagcggcgccggcaagtccggcggccagcggcagaaactggcaaccacctgcctggccgccgcgctgcggtatcaacttggcggcgaagacggcgaattgccgcgctacgcggccgtggtactggacgaagccttcgacaaggccgacaacgaattcaccgccttggcgatgaacatcttcgagaatttcggcttccagatggtggtggccacgccgctcaagtcggtgatgacgctggagccgtttatcggcggtgcctgctttgtcgaaatcagcggccgtcacgactcgggcgtattgctgatcgaatacgacgaacaggcacgccggctcaagttacccgagcgttcgcgcagcgcggccgccgccggtgcggcgcgcgcgaccgagccgtccgccgacgccgtcggcggagcgagcgtcgatgaactgcactga

SEQ ID NO: 45583 - DNA, 1182 bp, Xanthomonas oryzae pv. oryzicola
atggccgccgccgcgcccatgatgttgcctgccgctgcgctgctggccttgcgcgggcagtggcagcgcgcacgcgggcagtggctgatcggcgagggcgcaccgcaggcgatcgggttgcgggcgccgacccaggcacaggccatcgcgcggttcgatgccttcggtgcgtggttgcaggagtggagccgcacaggcctgccggggcgggtggagtatcgcgcggtgagctggacgcagctggggccgcagcgcctgccgcagacctgggtgctggacgatgcgggccaggccgccggcgcgcttggcgagggcgagcgctgggcgcgtgcccgccaacgcagcgcggccttgcaggcgcgctggccgcaggcggtcgcgctggcggcgcggctacgccgtcaattcgatctgctggccgactggccggaggccgagttcgcacgcttggtggcggtggtggagtggctgcaccagcatcgcgacagtggactgttcctgcgccagcttcccatcgccggcatcgacagcaaatggatcgaaccgcatcgcggcgtcatcgccgactggcttgccggcctgcgcggcatcgccgagccgcgcagctttgccagcctgtccggcctgcgcaacgcgccggatcgggtgcgcttgcgattgctcgacccggccctgcgccaccacctcggcggcctggaggacatcaccgcaccgatcgcgcagatcgccgcgctgcgtctgcctgcgcgccgcgtgctgatcgtggaaaaccgcgaaaccggtctggcctgcgaatcgctgccgggcacgctggtgctgatggcgcgcgggtacgccgtcgaatacgtgagcaatatcgcgtggctgcgcgaattgccgctgtactactggggcgacatcgacacccacggcctggcgatcctgcaccgcctgcgcacgcacgctccgcacaccaccgcggtgttgatgaatgaggccaccctgcaggccactccgcgcgcgttgtgggggcacgaacgcaggccgcaccgcgcccaacgcctggctgcgctcagcatccaggagcagcgcctgtatgcagacctgcgcggcggccggttcggtccgtcgccgcgcctggagcaggaacgtatcgcctgggactatgcctggccgcgcatccaggccgcattggcggactaa

SEQ ID NO: 45584 - DNA, 1326 bp, Halomonas meridiana
atgctggggcgttatgccgagcaggatgagtacgccattgatcctgacaatacgcgacagcaggctgggcgtgagctgcgcgagtggatacgtcggggcctggtcactgagcgtggtcaacggttgtatgccaccgatgccttgtcgtcggcgattcagtttgtcgattcgctggacaaccgcatcatgacctctactgcgtcgcggctgtcggtggtgcaacgggaaatcgaaagcctggaagtaagcctcaaccccaaccctgagagtcgcaaagcagcgattcggcgcaaaatccaacagttggagggcgaattggccgacgcggaggctggtcatgtgccggtgctttcggaacagcaagctattgaaaatataagagaagtgtttcatttggccactgggctgcgtgccgattttcggcgagtggaagactcctggcgagaggcggatcgccaactgcgccaatcgatcatgtccgagaagtatcatcggggggatattgtcgatcgcttgctggatggtcaggaggctttgctggacaccccagagggccgtgtgttcgatagttttttgcaacagctacgccaaaccgccgcgctggatatgatgcgccagcagctacgcactattctcgtccaccccgctgctgagaaagcgcttggtcggttacagcggcaggatcttaaacagctgggcatgcggctggttctggaaagtcagtccgtattacaagccagagcgcgcagtgaaaaggatgtcaaaggcttcctcaagaccggtttggcggccgaacaccaccgcgtcggacagttgctcaatgatatctttcataccgctcaggcgctggattggcagcgccagaaagtgcgtcgttcagagatgtcagcgctgccgccgctgggctttgccttgggcaacttatcggtgatcgagcggctgcgtttcaaggtgctggaaaacgagcaggaggagacgctggatttggctcagcagacgagcgatttgagcgatgtcgagactgagttctgggattctctggatgggctcgaccgcgacgctttggtgcaggaaacactggcgctgctggcggcagaagggcgcccactcaccctgctggagctcgccgagcgcctgccgcccagtcatgacctggaaaccttggcactctggctgggcatggcgcgggaagctggggttgagataaccgggcaggatgttcaggacgtagtcattaccgatgatgaacagtgcgattggctattcaaagtgccgctggtttccttgagtgagcaggcgttgcagggcattgagtgggagttttaa

SEQ ID NO: 45585 - DNA, 759 bp, Halomonas meridiana
atggcgggtgtttttgatcagattgttggacgccagcaggcagacgaggtgagtgaagagcaatcgcctccagaagggaaggattcgtcccattcaatggctgaggaagggctcgcaggtaccgacggagaaaatagcgcgcgtaccgacgtcaaactgcgggaagtggctcaagagctgctgcgtatggggctgctggaagagagcctgcgcccgcatctttatcgaacggccctggcctccatggagaggctcaatgcaacgttagagcccctggatttaattgcccgcgccgatgagatccgtgggttggtatttctggcggtgcgtcatgaggatggcgatgtgtttcaagacgagtggtcgcatccactggtgcgcaagcagcggctgaatatggagcagacgctgctggtggctattttgcgtcagcacttcatcgcttacgagcaggacgctggcacgggcgccggtgacgccatggtggcggttgacgagctgattccgcatatgcaggtgtatttgggggagagtggcagcgaggcccgggagcgcacgcgcatgttgcaattattggatcagctcaaggggcatggcctggtctcggcgccggacagtcacgagcgggtagtcatccggccaatgatcgctcacctggccaacccggagaacctcactgccttgctgtatgagttaaaggcaagagtcgccgcggagagtagtgaccgccaggacagtgacaaagaggggatgccatga

SEQ ID NO: 45586 - DNA, 3312 bp, Halomonas meridiana
ctggatgaggaacaggcgaccgcctggcagttggctcccacctatatcctgcaaaccctggagctgttcaactggggtggctttggtggtatgcacaaggctgatatcgacgctcagggtagcgccatcattggtcccactggcagtggcaagaccacgctggtggatgcattgatgaccctgctcacggccaatcccaagtacaaccttgcctctaccggtggccatgagagtgaccgggatctggtctcttacgtgcgcggggtgagtggccccggcgatggcagtgaggggcagtcgcatattgcccggcccggtaagaccgtgacggggctggtggcgacgctcagtaatggtgaaagcctggtgcgtatcggtgccctgctgtggttcgacagcaccagcatgtcgccctcggatatgaaaaagctctggttgttcagtactgcccccgaacatactctgcatcgctggctgacactgcagcaggaaggcggtatgcgcgccttgcgccaacaggataagacagacaccggtatctggacgtaccccagcaaaaagggctttttagcgaggctgcgggactttttcgaagtgcgtgataacgccttcaacttgctcaaccgagcggcagggttgaagcagctaaacagcattgacgaaatttttcgcgagttagtgctagacgataacgcccagtttcagcgcgcccgggaagtcgccgatagcttcgatgacctcaccgccattcatgaagagcttgaaatcgcccgccgccagcagcgctctctggaaccgattaaaaccggttgggataagtacctgcacaaccaaacgctacttgatgaccaggaaaccctcagccgggtactgccggtgtggtttggtgaacaggctcaccggctgtggaaggccgaagccgagcgtcttcagcaacaaacccagcaggccgaggccgagttggcagccgctgaggagagctgcactcaccagcagcgtacctgtgagcgtttaaatgaagcttatctgcgtctgggcggttcggatattgagaccctggaagcgctggtcaaggcaaagcaagccaacctggagcgctgccagcgccatgcggcagactaccagcgattggcacgctcgctctcctttgacgatgccctcaaccgtgaagcggtcgccaccaatcagatgctggctgccgagcagttgcgcgaggttcagcaggcgcttgacgccgccaagcaggcggcctttgagcagggcagccaatgctatcggatggagcatgagtgcacggagttgcacaaagagctggccgaggcgaaagcgcgcccagggtctaatatcccggggcgctttcaacaatttcgctccctgctggccgaagcgttggcactcggcgaagacgacctgccctttgtcgccgagctggtacaggtaaaagcggacgagcaagcctggcgcggcgcgattgaacgggcgatgggtagccaccggttgcgtattttggtgccgccggaggccagccaccaagcgctagactggatcaatagccgccacaatgcgctgcatgtacgactcctggaagtgaaaccgcccgccagccagccgcgcttttttgaggatggctttacccgcaagctcgactacaaggatcacccctaccgggaagcggttaaggagcttttagccgggctggacaggcactgcgttggctcgccggagaggttgcgagagactccccatgccatgacggcggaagggttgatgtcgggcaaggcacgcttttttgacaagcaggatcagaagcggctaagcgacgattggcaaactggctttgataaccgtgaccggctggcggcgttaagcgcgcaaatcagcgaagcagaagcgcgcttacagagcgccagggcggaagaggagcaggcgaaggcctcactggctgcgcttgaacagcaggtagtgctgttaaccaggctggcagcgttggactatgaggagatcaatgcgccccaggccgagcgtgaatggcaacagcagcgggacaaactggccgccttgaccgcacccgattccgatgcggcgacagccaaacgccaactggagcaagcccgcgatgagttggccacgctggagcagcaaaaaacgcagtgcatcaggcagtgtgcccagttaaacaaccggctggaaaccgcccaaaaagagcagcagcaggcgtttcgcaaaagcgaagcagggctgaaggaggcggagcgcacccttgctgatggccatttctctccccttgatcaacggcagcttgccaatgttgatgagctggagcgccaagctactacccagttgcaacagcaactgaccaccttgcggacgacccaaagccgagtggaaaaagagttggtcaaagccatgtcggatgcccagcgggaagaccgcggggcgctttctgaggttgggcgggagctcgacgatgtgcccgactacctggcccgactcaaggtgctcaccgaagaagcactgcccgacaagcagcagcgttttcagcaatacctcaccgactcttccgatcagggcgtatcacagctgctggccaccatcgagggggaagtagagcggatcgaagagcggttggaagacctcaataacaccctgcggcgggtagacttccagcgcggccgttacctacagttagtggccaacaaggtggtgcatgaaagcctgcgcacctttacccgggccaatacggcgctcgcctcgtcgcggtttgtcgaggatggcggcgaaagccagtacaaggcgttgcaatatattatcgccctgctgcgcgatgcctgcgaacgccagcgcaccctcggcgcgcgagcgctattggatccgcgttttaggcttgagtttaaagtcgccatgatcgaccgggccgatgggcgtgtgattgaaacccgctcgggttcccagggcggtagcggtggcgaaaaagagattatcgcctcctatgtgctgacggcctcgctgagttacgcgctgtgccccgacggcagccctcggccgctgtttggcaccatcgtgctggatgaagccttttcgcgcagttcgaatgctgtagctgggcgaattattgccgcgctcaacgaattccaccttcatgcgctgtttattacccccaataaggagatgcgtttgctgcgcaagcacacccgctcggcggtggtggtgcatcgccgtggtaatgcctccagcctgacgccgatcagttggcaggcgctggatgccgtgcgtgaaaagcggcgtgaggcgcgcaatgaagtccccgagtga

SEQ ID NO: 45587 - DNA, 1146 bp, Halomonas meridiana
atgaagtccccgagtgagatcgctgctcgcctggctaagcagtggcagcaagcgttctggcgggtagagcgattgttatcctcggagagttggccgctggtgatccccattggcaaacccagcggccgccagtttgccgatcaaaccggtctggtgcaggcccatgtgcagcgctggcggcagataaccgttggtgaggtggtgtttcaagatatcaacttccgcgctgctgctgagccggtgtcactccccgtgcagtgggtgttgcacacgccgtctgaatgggccgccgctacggcggatggcgacgtgcagcaggagtttgcgctgctggaaactctggtaggcagcgtcaaccagcgttactgggaggtgctggttcgcgaacgcgccctctggcgcaataagtctgttagcgaaatcactgccgctgcagcgctggcggactcgctttctccggggatggcagaaggtcgaccattaagattgctcaacggactgagggtggacaccaagtttatcgagcgcaacacggtgttactgacacgcctgctggatgaacgctacgacggcatggctagccaacaaggcttaaacggttttctggatgcccccgacgataaagatcactggctgctggtggtgcccttggagaaggggttgctgccttttaagcgtcagcgcatcaccgccagagaactggcggatacttgcctgccgggctcgcgggtggtggtggtcgagaatgagcagtgtgagcacttgctacccggcatgccgggtacagtggcgattcttggcgcagggctagatgtacactggctatcaggtgaggcgctaaaaacaaaagcggtcgcctattggggcgatatggatacttggggactgctgatgctggccagagcgaggcaggtactgcctacgattactccgctgatgatgagcgaggcgcacttcaaggcattttgccgtgactgcgccgtgccagagccggttcaagccgagctgccgagcagcggcctgactgagcatgaagtggcttttttccatttgcttaaagcccaaccacaagggcgcctggagcaggagtatctaccttcacaagacgtacagcgtgagctgctggggtggctgggtcgctgttaa

SEQ ID NO: 45588 - DNA, 1443 bp, Desulfitobacterium hafniense
atgaagctttttgagattctgccggaaagtttttttcagctttttacgggaaaaaacagacaagtttatgcggaagccctcttgctcctctatgagcaatatcaggtgaaccgctttggcgttgactatgaagtgatgcgggatcttctgcaagagctgatcgagacccaggaaagcctgggctattcctttgaagttgaagaaggggaggaagctccggaggcggacctcttccggacccaggtcaattccatcctgcgccgcctgaaagttctgggctggctggatgtggagacccgggacaattttaaacagtacatccttctgccccattactccagccgcatcctgcaggtcttcaaagagctttgtgaagaacggaccgtggaattccagcgttttgcttttgtcacctatcagctgctgaccagtgaagaagccaaacgacgtccggcctttgccatgatcgaggccgagaagaccaccgaacaatttaccggcgagttaaccctgctcgccaacaatatgaagttccacgccgaacaggtggcggccaagaccagcatacaggaagttctggatcatcattttgatgagtataaaaccaagattgtcgacaagagctaccaccgtctgaaaacttcagatcatgtctcccgctaccggcaccagatcctggagcgggtccggaccctgctcatcgatcaggaaatctttcaggaagcggtggaggacggaatccgcagcgagttctttgccacccgggaggaggccgagcataagctgcgccaggccctgttaagtgttgaagaagtctaccgggaactggatgaggtctttaaccgcattgacctgcggcacaatcagtatttgcgcgcctccttcgaccgggcccgctatctgagccagcactcccaaggggtggatcagcgtctggcggaaattttggattggctgtcggagcgaaggtcctcaagcaaggatattggagcaaaaatccttggcccggaggggctccgcttcctcaccctttcccagctgagcgaaccttctgtttttacaccgcgcaaaaaacgcctgcctcaccaagcggaagatatcgaggtcatccagctatccccggaactcaaagctcagctgcgggaagaatccctgagcaaaatgcgccggaacatcacccgggaaaaggtacgggactatgtcctggctcacctgggccagcgggaaaccatggggatcgccgaactggctccgcagaatctggaggaattcctctacctaacctatgtctatttatacggttacgacgggggagccggctacaccctggagcgggagtacaaccgcgtcctggagatcggcggctaccgcttccatgatcggcaaatccggcgcctgaccgccaaaaaggagggatctcaccgtgttcgagcaactcagtga

SEQ ID NO: 45589 - DNA, 609 bp, Desulfitobacterium hafniense; identical to SEQ ID NO: 41915

SEQ ID NO: 45590 - DNA, 3480 bp, Desulfitobacterium hafniense
atgaaatggatgaaacggcttcggctcgttaattggcattattttcaggatgaatccctggaattcggcaggcaaaccctgatctccggacgcaacagcgccggcaaatccaccattatcgacgctttgcaggtgcttttcatcgccgatcagcggcaaatccgctttaatccggccgcccatgaagaggccaaacgctccctgctcaattatctgcgggggaaaataggcagtgatgaaaaatctttcgtccgggagcgggattttacctcctatattctgggggaattctacgatgacaaagcccgcaaatcctttgccatcggcgctgtgatggacgtgtacagcgataacaagatcgacgatgaatttttcatcattcccgatctggaactggctgagctggagattcaaaagggcaaaagaacctatcgcaataaagaagaattccaccgttatgctctgggcatcaggcccaagacccagtttttccggggcaggcaggagtatcagaaggccttcctcaaccgcatgggacagctggaacggcgtttttaccgcacctttttaagggccttatcctttaagccgattcaggatatccgggaatttgtgtatcagtatatcctggacgagcgggagctccagcttaacatcatgaaggagaatttcgaacttcatgaacgctatcaacgggagctgaaggatttagaggagcggaaaaccgtcctggaaaaaatctcccggcagcatgaacaagccatcaaataccgggatatcgctgccacccaggaatatgtgatccggggcttaaagcatttggagctcacagagaaaagggaagacctggagcaagacattgaatcctcccaaaatgagctcaagagtgttaaggaacgggcggctctcaccgaggagcagcaccgggaggcccgggaacgggccttggagtattaccgtcaatggtccacccaccagctccagaaggaaaaggaaagcttggaagcacagattgaggacatgcagaagacccttgccgatcaaaaacgccggttggagatttgggtcgccaaagtcaaaggggagatccggcttttggaaggtctggccaccgcttttgcggtagatggggaagtatggcggcaggaagaccggcgaaagctggaaaacgtcctgggtgcgctgcggactgccttggacttagccggccggcccaaccttgaatgggcccaggaagaccaggacgtattaggggaagaaatccggcaaagtggtctttttctggctgcattgcagatgggttttctgcagacccaaacccgcctggaagatagaatcagggaacaagaagcccagcaagagcgcttgaatcaggaaatccgcggactggagcagaagaagcgcccctaccgtgaagaggttctccggctcaaagccttgctggaagagcggctggcgggacgatcgccggtctggatcttctgtgaagagatggaagttctggacgaggccgaagcctggcgcaatgccattgaaggctatcttcacacccaaagattcgacctgctcgtcaaacctcaggctttctccgaagccctccgcatctatgagcaggaaaaatggatccatcgcctccagggggtgggtttggtggatacggaaaaagaagaacggtatctgggcaagcgggagtcaggctctttggccgcccttttgcagacagataatcccatcattcaggcccgcatcgatcatttgctgggccgggtcatgcaagcggctgacgagcaggatctccgccgtcatcacacagcggtaacccggacctgcatgtcctacaccaatctggtggcccgccagattcaaaaggaacgctatgagattccctatatcggctcccaggccatcgtccggcaattggaaatcaaacgccgggaactgaggaccgttcaggataacctcagacagctccaggcagagctcatcatcatgaaggaatgggtgagcagccttgctgacaggaaaaccctttatgaaggactggctcaagggctggagctgcccaagatggtggagcagcaggagtatgaactgctggaggtgcagatcaagctggaagagctggatctttctgaagtggagcgcttgaagcaggagtatgaggaatggcaccggcgggaaggtcagctggtggaagccatgaaggagctcagcgggaaaataaccggattggatcttgagatcggccgaaagcaaaccgacctctatctcttaacccgccgggagcaagaggcccaagagctgtgggacggctggaaagccgagtatgccccggaactctgggaaaaagccgcggagcgctggcaggaagcccaaagacaaacccagcctgcgtccacgaagctggtgaactgggaaggcagccaaaaagggaatgttacccgtaaacttcaggagtttggcagactccgcgacctgagacaggattataatatccgttatacctataatggcagtctggatggggaagacaacgcctcttaccaaagcctcctggatgaagtagcgggggtggatatcccggactatcaagtcaagctggcggaagctctcaagcagtcagaggaagaatttaagtctgatttcgtggccaaactccgggaagccattgagatggcccgtcacgaattcagtcagttgaacctggccctgaagaacttccccttccatcaggataagtaccattttgaagtccggcccagcagtcactataaacggttttacgatgtgatcatggatccggacatcgtgaaccggggctccttattcgattccttagctgatgataaagccgatactctccacgaactctttgaacgcctggtgcggggggaggccggagaccaggaggaatttaccgattaccgccgctatctggatttcgatatcgccgtcaccaccgagacggggcgttactatttctcgcaagtcctcaaggaaaaatccgggggagagacccaaacccccttttacatcgccgtgttagcctcgttttattatctttacaactccggaaaaaccctgcgcttagtggtgtttgacgaagccttcaataaaatggacgaagagcggattcagaccagcctccgcctgatcaagaaaatgggtcttcagctgattgccgcagtccccgatgagaaaatgcagcatatggctccggaagtctccaccaccctaattgtccaccgggacggtcaccactgctttatcgatatgatcagccgtgaggaaatgctggatagcctgaatggagatgaagagaatgctcaggattcccaggacgatggcgttgaggggaaaggggcagatacggagacggatgccgggcaggaggcagagtcaggcgtgagcgcagatccggcatggatgcagattcggatgcaggctcaaatgcagaatcagatacagagacaaacataa

SEQ ID NO: 45591 - DNA, 1254 bp, Desulfitobacterium hafniense; identical to SEQ ID NO: 41917

SEQ ID NO: 45592 - DNA, 1440 bp, Pseudomonas sp. 12M76_air; identical to SEQ ID NO: 45573

SEQ ID NO: 45593 - DNA, 681 bp, Pseudomonas sp. 12M76_air; identical to SEQ ID NO: 45574

SEQ ID NO: 45594 - DNA, 3630 bp, Pseudomonas sp. 12M76_air; identical to SEQ ID NO: 45575

SEQ ID NO: 45595 - DNA, 1473 bp, Xanthomonas oryzae pv. oryzae PXO86; identical to SEQ ID NO: 41663

SEQ ID NO: 45596 - DNA, 699 bp, Xanthomonas oryzae pv. oryzae PXO86; identical to SEQ ID NO: 41664

SEQ ID NO: 45597 - DNA, 3432 bp, Xanthomonas oryzae pv. oryzae PXO86; identical to SEQ ID NO: 41665

SEQ ID NO: 45598 - DNA, 1185 bp, Xanthomonas oryzae pv. oryzae PXO86
ttgatggcccccgccgcgcccatgatgttgcctgccgctgcgctgctggccttgcgcgggcagtggcagcgcgcacgcgggcagtggctgatcggcgagggcgcaccgcaggcgatcggattgcgggcgccgacccaggcacaggccatcgcgcggttcgatgccttcggtgcgtggttgcaggagtggagccgcacaggcctgccggggcgggtggagtatcgcgcggtgagctggacgcagctggggccgcagcgcctgccgcagacctgggtgctggacgatgcgggccaggccgccggcgcgcttggcgagggcgagcgctgggcgcgtgcccgccaacgcagcgctgccttgcaggcgcgctggccgcaggcggtcgcgctggcggcgcggctacgccgtcaattcgatctgctggccgactggccggaggtcgagttcgcacgcttggtggcggtggtggagtggctgcaccagcatcgcgacagtggactgttcctgcgccagcttcccatcgccggcatcgacagcaaatggatcgaaccgcatcgcggcgtcatcgccgactggcttgccggcctgcgcggcatcgccgagccgcgcagctttgccagcctgtccggcctgcgcaacgcgccggatcgggtgcgcttgcgattgctcgacccggccctgcgccaccacatcggcggcctggaggacatcaccgcaccgatcgcgcagatcgccgcgctgcgtctgcctgtgcgccgcgtgctgatcgtggaaaaccgcgaaaccggtctggcctgcgaatcgctgccgggcacgctggtgctgatggcgcgcgggtacgccgtcgaatacgtgagcaatatcgggtggctgcgcgaattgccgctgtactactggggcgacatcgacacccacggcctggcgatcctgcaccgcctgcgcacgcacgctccgcacaccaccgcggtgttgatgaatgaggccaccctgcaggccactccgcgcgcgttgtgggggcacgaacgcaggccgcaccgcgcccaacgcctggctgcgctcagcatccaggagcagcgcctgtatgcggacctgcgtggcggccggttcggtccgtcgccgcgcctggagcaggaacgtatcgcctgggactatgcctggccgcgcatccaggccgcattggcggactga

SEQ ID NO: 45599 - DNA, 621 bp, Thalassomonas viridans
atgaccgaccccaacgaaataaaaacgaacctgacggctaaacagcagcaagaaaagtcggcggtgcagatcaaactactcaaaggcccagtttatcgcgccaaacataaagacctatggctatggttagagcgggatctatttcaaattcgtgaatattttcagcaaataggtttgtcgttactgctcgacgacgccgagggttacgcttttttaaaacaacaaagccttgatgaggcgaacgagggcgaacaggacattccacgcttgatcacccgccgtagcctgtcattttctcaaacgctgttaatggtattattacgcaaacgtttggccgaacacgacagcgaagacagctcgccacggttaattgtcgagcggcacgacatgcatcagtggctgacgggtttttaccctgtggttagcaatgaagtgaaacaaaaaaaggagtttgatgccttgatcaaaaagatcgccgaaatgggctttttaagccagctgccaaatcatcaggacgaatttgaagtacaacgcatactcaaagccgtgatcaacgccgaacaaatcagcgagctaatcgacatgctcgcaagccagcataaccaggaggagcaggcataa

SEQ ID NO: 45600 - DNA, 3396 bp, Thalassomonas viridans
atgtcagcattagcagaaagccattttaacaatgaagaccatggcttgcatggttttcggttacaaaacctctcggtcttaaattggggcaccttcgatcacaaagtttgggagttaagccccgagtgccaaaacagcttattaacgggaaacatagggagcggtaaatcgactatggtcgatgggttgacaagcttacttgtgcccacccgaaaattagcttttaataaagcggccggggctgaagataaagagcgttcattagagtcttattttcatggttattacacctcacagcaagacgaattcggcaaagcccgctctattggtttacgcaaagacaagcattattcggtggtattggcacagtttcgcagcggtgcccttaagcagtcaattaccttagctcaggtattctggttaaaacccggcgagaaaaaagtaaaacgcctgtttgtcgtcgcgcaaacggcattgaccattaccgagcatttcagcaactttggcagccaaatcaaccagcttaaaaaacaattgcgcaaaaatgaacagctcgaattattcgacacttttcccccttacgcgcaatgttttagcaagttattaggcttgggcgccgacggcaaggccctggagttatttaaccaaacgatttcgatgaaatccgttggctcagtcaccgactttgtccgtcaaaacatgctggagcagcccgatgtcgaagcacagctgcaagaattagaacgcaattacgatgacctgaaacgcttgcacgatgcggtagtagatgcccgtcaaaaagtcgagttactgacccctgttgatgactatggcaagcaagcactgcttgctgcaaacgacaaaacccacatcgaacaatgccgggagttaaccgaaccttatatggcaaagttagccattgatttatatcaaacccgtttgcataaacgccggcaagcattgcaaaaactaaacattaaactcgctgcttttgagcatgaaaaaacgcaattagacgaaaacctcaatcagttacgggaagacatacgcagcaacggcggcggtcgcctgcaacagctggaaaaagatatccgccagctggctgacaatcgcgaaagtagccgtaaactctgtaataactatcaaaagctggtcggcgaattaggcttgcctgcccagttgagcagcgatgcctttgtgcataatattaacgccgcgaaagatcaggtagaagagtttcagcaacaacgggaagcgatagacgagcagcaatttaccctgaaacaagaacaggccgagcaacaaagccggcaaaaggaactcaccgagctgctaacatcgcttaaacagcgtaagtctaatatcagcctcaaacaaatacatattcgagaacatttatgcgaacacttgggggtaagcgaagaccgtctcccctttgtcggcgagctaatacaggtaaaggccagcgcggcgttatggcagggagcaatagagcgggtactgcataattttgccctcagtttgatggtgccggacgatttatatcaagacgtttgtgactttgttgaaaacacgcacctgggcacgcgactggtgtactaccgcattcgtcaaccgcaaaactactacccggctgccagtgaaagccattcattgctggcaaaaatagaaataaagcccgacagcgaacattacgactggttagatcaagagctgcataagcgctttgactacgcttgttgcgacgacatggcggagtttcgtcgcagcgttaaggcaatcacgcccaaagggcaaataaaatcaggccagttccgccacgaaaaagacgacaggaacaagttgcaggacaaaagccgttatgttttgggctggagcaataaagataaaattcaactacttgctgcacaatacaatcagctagagcaaaaaatcgctcagttgcaagcacagctaaatcaagtgaaatcccggcagcaacaagtagacaacaaagccaggcaggcactgaatttagccgactttaactttagttttgaacaaataaactggtcaagatacagcgaacaaatagcgcaactgcagcaggaaaaacaacaattagaacaaacctccgatgtattaaaagatctacaagttaaattggccgctcaagtagcagcgcaagcggcaatagagaataagctcaagcaaagttatgttgaacggggacagcatcaatcagatattgaaaaggatgaaagcgcattaactcaggcgcaaaaagaatatcaaagcgcagcgccggcatttgttaacaagtgttttccaaccctagatgaattttatcaaaaatacctgggtgatagccaggtccgcatcaatatgctggcaaatgttaccagccagttacgcactaagctcaatgaaagagtacaacatctggaagaacgccgccgtaaaaagcaagggcaaatgattaacgccatgagcagtttcgcccatgattttcctaacgatgtgaccgagctggatcgcagcccggaagccttacctgaatatcaacagatgctgaaacagctgcaagaagaagacttgccgcgccacgagcaacgttttaaagaaatgctcaatcgcgataccatacgcgccatggcgctgtttcgcagctacctggacaaacaggaagaagaaatagatggccggattcgtctgatcaatcagtcgttacacggcttggattatcaaaatggcacctacatcgaaatcgacagcatcaactctgctgacgtagaaataagagatttcaaacaacggctaaaaagctgcgtagaattcagcaccgacgacagcctgtactcggaagaaaaattccagcgggtaaaagacttaatagaacaaatgcgcaacgagcccaaatggacacaaaaagttgtcgacgtacgttactggcacttgttcaatgtgatagagcgttaccgggaagataacaaagaaaaagaatgttactccgattctggcggtaaatccggcggccaaaaagaaaagctcgcttattcgatattggctgccgccatccttttacaatacggactggtcaataacgagcagcaaccagaaatcaaagccaagcgccgctttaacctggtggtcatagacgaagccttcgccaggggctcaaaagacagcacccgttttggcctggaattattcaaaaaactcggcctgcaattgttattagtgacaccgctgcaaaaactcgatgtcattgaacattacgtaaaacatgtgcattttgttgatcaaaaaaataaccgctcgatgctgctcaatatgaccattgaccaatatcgtgaacgtttggcgcaacataagagtattagcaaatatgaaaatatggtcaaacaagtatcgtaa

SEQ ID NO: 45601 - DNA, 1200 bp, Thalassomonas viridans
atgactaaattaaccaccagcgcaacaataaaagccaagctgcaaaaccaatggtcgcagtttaaatttcataagcagtgggcgaataagcagcttaaatttcccttaatactcaaattggctaagcctaccgataaacagctcttgcatgaatattcgcaggtgcaggtttggctggacgacctgcaaaaactctccctgataaaaggcgtggctttacgcaagcagcagattaattacagcaaaatgggcaagcagttaatgcctgttgcgattgaaatcgccgatatggaagccttagcccgttaccttaataagtggcagcaatggcaaaagtttacccaactctttgcacacatttgtcagcagctgccacgaatagccgactggttagcccaaaaccctgcccaaatagaaaaataccaaagcagttggccacagctgatcaatgtttgtttgtactttatcaaacacccaagccccaattgttatattcgtcagctggatattccaaacgtcgataccaagtttattgagcaacataaagctattcttaagcaattgctcgatcaattgttagatcttaacggcatagatcaacaatataacaaattaaccgaacatggctttgaaaagcgttttggtttattgcatgaacaaccgcaaattcgctttcgggttttagaccctcaacttagccaagagcttttgggaataaatgatctaaccattcccatagaacaattcaaccgactcaatttaatggttgatcgagtattcatcacagaaaacaaagtgaatggcttggcttttccggcaataaacaacgctatcgtcatctttggcttaggctatggaatacaaatattaaaacaaactgattggttaaaaaaatgccggatacattattggggggatatcgacactcatggctttgccatactgtcccaactgagaagttacttccccaaaacccaatccttgttaatggatcaacaaacattgctagcctgtaaaacattctggggttgtgaagtaaaacatcaatgccacaaggcagaacagttgccacacctgaccgatgaagagcaaaccctctatcaacagctaaaacaaggcaaatgggcagaacaattgcgtttagagcaagagataattcctatatcgatattattggaaggtttgagcaagtttaaataa

SEQ ID NO: 45602 - DNA, 1530 bp, Rhodococcus sp. AD45
atgaccgaccgggaccgtgcgaacgctccggcccacaaccactctcgtcgtgatcgcaacgttctgaactatgacgaggtcgcctcgctgcgccgtctcaaccccgcatggagactgctgtgcgccgacaacgcaccgttgatcctgtccttcctcggcaaggtcttcatcgacgagaacgtccgcgagatctcggccaccgacctgctcaaccgcctcgacgacgagctctatgcgctcaaccagcggctaggcgagggcaccttcaggtcggccaaggcctatctcgacggctggtccacctctggcacccagtggctgcgcaggtactacatcgacggcagtgacgagccgcactacgacgccactcaggccgtcgaacgagctgtcgcttgggtcagcgccctgcgcgagcgcgagttcgtcggcaccgaatcccggctcaacaccgtcttcgagctgctgcgccagatcgtctacggctccgacaccgacccgcaggtacgtctagccgagctcaagcgccgccgcgccgaaatcgacgaccagatagccgcgaccgaacgcggcgactttgacgtcatggattccctcggtcgcagtgaccgctaccagcagttcgccgagacctcccgtgccctgctgtcggacttccgcgaagtggaggcgaacctgcgcggcctcgaccgccagatgcgcgagaagatcgccacctggcagggtacgaagggtgagctgctcgacgagttcgtcggcacccgcagcggcatcggcaactccgaccagggccgcagtctgcaggccttctacaacctcctgctgtcctcggaccggctgaccgaactgaccgagctcatcgccggagccgagcgcttggacgactccggcgttatcgacgagcggctgagccgcatccactacgactggctgactgcggccaaacgcgctcaggacatcgtcggtcagctctcgcagcagctgcggcgcttcctcgacgaccaggtctggctggagaaccgccgcgtgatggacctgctccacggcatcgagtcctccgctgtagcgctccgcgacgaccgcgccgaagacttctcgtccagtatcgacgctgccgcacccgcgatcagcctgccgaccgagcgtcccctctaccgcaagcccgtcgctgctcagatcgacagctccggtgtcgaatacggtcaggcagaagacattggtgacgccctctacgagcagaggcaactcgacattgcgtcactgatcgccaacgtgcgcacccggctgcgccgcaccggccaggccaccctcgccgatgtactgtccacccgccccctcgaccgtggtctggaggaactggtggcctacctgcatctgagcgaaggcgacttcgacaccgtcgtcgacgactcccggaccgacaccgccacctggaccggccccgacggcaagcagcgcaccgcccgcatggcccgcgtcatctacgttcacaccggctccggcgcccacgacgactcaggagacctcccgtga

SEQ ID NO: 45603 - DNA, 678 bp, Rhodococcus sp. AD45
gtgacccgcaccgtcccgcgtgaccagctcaacctgtccatcccggtgaccgcgcttctcaaaggcgtcctgtaccgcgacaccaatgagattgcctggcaacacctgcagggccttatcgcccaagtcggtgactacgtcgccacaatcggcctcgacgtcgtcgtcgacgacaacgaggggtatgccttcctgcgctcactgcccgacgaggagctcgccgagctcggcatctcccggctgataccccggcgtcggctgtcgaagaacacctcggtgatgctagcgctgctgcgcaagcgactcatcgagttcgactccaccgattccaccgacgccggttcacgactgatcctcggcatcgagcagatccgccggatgatgcagccgttcatgcccaccggcgacaacgaggcccagaccaccgacaagatcgacacgatcctcgccaaagtcgtcgaactcggtttcgcccgccgaatcccgaagcagcacaaccagttcgaggtacgccgcgtcatctcggctttcgtcagcgcggactggctcgccgacttcgacgacaatctcaggcaatacgtggaccacggcggctcgaaccatgccgcgcagaccccactgcccggttcatccagcgttgtcgactccgctgaactgtctctcaaggagtcatcgtga

SEQ ID NO: 45604 - DNA, 3405 bp, Rhodococcus sp. AD45
gtgacagatttactcgcgcaggccgagcagcccgccaccgacaacctggccggattccggctgcaacgcctcgaagtactcaactggggcaccttcgaccagcgtgtctggacgctcgaactcgatggccgcaacggactgctcaccggcgacatcggttcgggcaagtccacgctcgtcgatgccctgaccacgctgctactgccgtccaaccgcatctcctacaacaaggccgccggcgccgagacccgtgagcgcgatctgcgttcctatgtcctgggacactacaagtccgagcgcaacgaggcgaccggcacatcccggccggtgccgctgcgcggcgcgtcgagctactcggtgatcctaggtgtcttcgccaacatcggcaccgaccagcaagtaactctggcccaggtgttctggccaccccccgacgggggccagcccgaacgcttcttcaccgtaaccgagcgacccctgagcatcaccgcagacttcaccgacttcggaacggacccgcgcagcctgcgcaagcgcctgcgcagcgccggaagccgaccccacgaccacttccccgagtacggccgcgactaccgccgcgctctggacatccgctccgaacaggccatggagctcttccaccagaccgtgtcgatgaaggccgtggccaacctcaacgacttcgtccgcgaacacatgctcgaaccagccgacgccaccgactgggtgaccaacctcattgcccacttcgaggcgctgaccgccgcgcacgacgccgtcgtgctggcccgcacccagatcgccgagctcgaaccgatcctgaccgactgcgaccggtacgccgaccatcacgcagaagccaccgctgcccgcgcgcgccgcgatgcactgcgctacttcttcgcccagcgccgctgcgagctgctggcgaaagaactgagcgccaatgagcacaaccgcgccgccgctacgcaaaagttgcgcgaggcagaggaagagctgactgagctacgccggacactgagcgaactggaactgcgccaggcaggcctgggcggcaacgagatcgccgcgctgacccagcgcatcgacgacctgcagaacagacgcaacgagcgcagggagcagttcgatcagtttcagcggctgctggccgacgccggactcgcgccggtgaccgaccacgggcaatactccttccgccgccacgagatcgacgagagccgtgaccagctcgaagttcgcgatgccgagctggagaacaccctcaacgagctgcgcctcacccagcatgagctcggccaggactccagacgtgtcgccggcgagatcgccagcctgcgcggccgcaccagcaacattcccagacacaacctggagatccgcgaaaggatctgcgcgggagcaggactcgacaccaaggagctgcctttcgccggcgagctgatcgccgtgcgcgaggatcaggtccgctgggagggtgccgctgaacgcgtgctgcgcggcttcggtctctcgctactggtgtcgttcgagcactacggtcgcgtctcgcaatggatcaacgacaaccacctgcgcggccgggtcgtctacttcaaggtccccgcgcgctcgatggcaggagccagcgccgcatcgcctggctccgacgccctggcctacaagctcgatgtcaaggagagtccattcgccaactggctcgacaacgaactgcggcgacgcgcacgccacatctgcgccgagaccatggaccgtttccgtaccgaggaatgggccgtgaccaccaccggtcaggtgcgcgcgggcaaccgccatgagaaggatgacacccgtaacgtcgatgaccgccgcaactacgtcctcggctggaccaatgagcagaaaattaccgcactgttggaggaggccgctgcgctgcagccccgcctcaatgaggtcgacgagcagatcgcttacgccgacaagcagcgccgggccgtcaccgaccggcgccgggcgctggacaagctcaccgtcttcgacgacttcgagcgcatcgactggatggccacggccgccgcgctggacaagctcatcgagcgcaggaccgagttggagcagtccactgccgaacttgcgaaggtgaccgaggccatcgcggccaccgagaaggagatcgtcgccgcagaccgcagccgcgttggtgcgctgaatcagatctcccgactacagcagaacgccgagcgcgatcatcgcgacctcgaccgcgccgaaacggtgctcgccgaagacgctgcagccgaggcccgcgcgcacttcgcggccatcgcgccgacagtctcggccaccaccctcgatgaatgcgccgagcaggagaaatcgctgacccaaaccctgacccaggctgccgagaagagcgatcagaacgcgtcgaggatcgccgcgcgcgctgcggggcgaatggccgagttcaaccgcagccaccccgctcacaccaccgacatggacgccgacatcgcctcagccgacgagtaccgccagctacaccagcgactgaccgaagacgacctgccccggttcgagcacgacttcaaggagtacctccgcagcgagaccatcaacgacatcgcactgttcgctgcgacgctgggccaggaggagaatcagatccgccagaagatcgacacgatcaacgcctcgctggccgacatcgagtacaaccctggccgctacattcacctcgaggttcacccgagccccaacaacgagatccgcgagttccgtgccgacctgcgccggtgcagcgacggctccctcgacgccgacaccggcggcaagtacgccgaagagaagttcctcctggtcaagtccctggtcgaacgcttccgcggccgcgacggctacaccgagatcgaccgcaagtggacccgactggtcaccgacgtgcgcaactgggtcaccttcgccgcttctgagcgccgcctcgacgatgacgtcgagcacgaaaactacaccgactccgacggcaagtccggcggccagaaggagaaactcgcctacaccatcctggccgcctcgctggcataccagttcgacctgaaatggggcgccaagacctcccgtgacttccggttcgtcgtcatcgacgaggccttcggccgcggctccgacgactcggcccgctacgcactgtcgctgttccgacggctggacctgcagctgctcatcgtcactccgctgaccaagatcgccaccatcgaaccgttcgtgtcgtcggtcggctacatcgagaacaagaccggccggtactcacagctacagtgcctgaccatcgaggagttccgcgagcaacgcgccctgcgcgcacttcgcgacagcccggcgaacatcagcatttccgacgagagtgcggagtcggcatga

SEQ ID NO: 45605 - DNA, 1179 bp, Rhodococcus sp. AD45
atgagcgactgggccacaccggaggacctgcgcaaccgcctccgcaaacgctgggaccgcggtctttatctgtcggcactggcacgcggcgaccagttcgaggcggtcgacgtcaagatcacaggacccaaggtcgccgacctcaacagccggcgcgccggggtctccgactgggtccagcagtggcaccgtcaggctcagaccgcagggaccgaagtcgtctaccgcaccgtcggcggacgcgggctcgtcggccagaaccgcctgcccgaccgcctgcgcatcggcacgctggcagacctcgaacacttcctgggcaccgcgacgcagacccggcgctaccgcgaaatcctcacgcgcacagtcgatcatccaagcgtgcgcgactgggtcacgcagcgccccatgcgctccctcgagcactacgaccacctcgaaccactgctcgccgcgctggcctggatcgacgccaacgccggcagcggccgcagacttcgcgaaatcgacgcagcaggcgtcgacaccaagttcatcgaacgccaccagcgcatcctgctcgaactgggccgcctcgtcgtcgacgaagacctgatcgacccgaaggcgccgacgatcgcgggcaggttcggcttcgccacccccggccgccgcgtccgccttcgcaggctcgacgacgcgatggcctggccgatgcccgggttcgacgacatagaggtccacgccgaggacctagcagcaatgcccctggccgtcgaccgcgtcttcgtcatcgaaaacctggcgacttacctgtcgttccccgccgccgaactggccgtggccgtcttcggcggcggctacgccgcgaccaccctcggcgccatcggctggctgcgcagggttgacgtcgtctactggggcgacctcgacacccacggattcgccatactcgacaggctccgcgtcgccctgccccaggcccgctcgatcctgatggaccgggacaccctgctcggccatcaccggcagtggggcacagagcccacacaggtcgatcgtgacctgcccaacctcacccccgaagagacccggtgctaccgggaactgatcgacggcgcgcacgggcctgccatccgtctggagcaagagcgcatcccgctctcggcgctcgcccagatcgtcccacctcaaaaaccataa

SEQ ID NO: 45606 - DNA, 1455 bp, Chroococcales cyanobacterium CENA595
atggattacgaacaaattaaatatgagttagaaagctcgccgattttcaagcttttccgcagtcgcagtgccgccttaattttgagctttttacacaaacaatttaaagcaactcagcatatttctgtggcgcaattagagttagaagcaaagttaagtgacgctctagagttgctacaagaagtttatcccgacctttatcatccccgatcgcctaaagagtatctgagcgaatggtgcgacgatgggctgttgcggaaaatctttgatagtagcgatgagccaagatttacattaactccggcggcggagaaagcgatcgcttggctagaagacttacaacaaaaacatgagtttgtaggaacagaatcgcgctttttacaaattttctcattgttgaaagaaatccgcgatcgcagtaccaccgatgtggaggagcggattgctcagttagagcaagatcgcgatcgcctccagcaagaaatcgaccaaattcgccgaacgggagaagtcgctctctacaatcaaacccaactgcaagaacggttctttctagcaaatcaagtcactcgtcaattgattgcagattttaaagacattgaacaaaattttcgcaacctaactcgaactataaaggaagctcaacttcagcaagatgcttgtaaaggtgcagtagtcagcagggtattggatgccgacggggaattgaaagagtctgaccagggacgcagtttctacgctttctggaattttttaatgtcaccaagcaagcgacaggaactcagatccttgattcaagacgtttataaactagaagaaatacagcccctaattagggagaatgggctactgcgccggattgagcgcaatttgattgatgcgggtgaatacatcgtgcaatccaaccatcgattaacagaaaaactgcgacagatgttggatgagcgcaacttaatggaaaatcgacgagtagcggaactaatcaccgatgttcaacgaattgccctacaagtggcagatcgtgcaagcgcagagtcagatttttggcaactagaatgcgaacctgcggtaaatctgataatggagcgtccgctacatcctttagaagagtcggagacaccaactttttctctagattttagcaacttgccggaagataccctagaggaagaaatcgccgaactttatcagcagttttatgtcaatgaggacgagttagcacaacgcattgatgctttgttggcacatcattccgccgtttcgctaacccagttgctccaactctatccagtaagtcagggattgccggaaattgtggcttatctagcgatcgctagtcaaggcgatcgacgacattctattaataccagtacaattgatgagattgcgatctccagcttggagtcagataaacaactgcatctaaaattgccccagatcgtttttcgccgttga

SEQ ID NO: 45607 - DNA, 579 bp, Chroococcales cyanobacterium CENA595
atgcaacctcagccaccgcaaccctacgccccagtaattatcaagctcctacaaggagcaatttacaatgacgatccccattgggaacggttgcaaagctatttgactcccattaaagaatactttggtaagattggtctgcaagttcaaaactatgacacggaaggctttgcttatttagagcaaccagatccagagccagaagagcggacagaacccctgcctagactaactgttcgtcgtcagttgagctttacagtcacagttttttgcgtattgctgcgcgatcaattacgacaatttgatgccagcgacgctattggcaaattaatccttagcattgaacaaattagagatttattacaaccctacctgccggaagaaaataatgaagacagatttcggcgcgaggtagagggattgataaagcaaactagcgaatttgggttcttaaaacgcctgtctggacaagatgaaaattatgaagtgcgtcccatcctcaaagccaaaattgatgcagataccctagaacttctaaaacaaaagctagaaacctatgcaaatcccactgtatcttga

SEQ ID NO: 45608 - DNA, 1161 bp, Chroococcales cyanobacterium CENA595
gtgattaatcctgctcagattctacaaaaagccaatagttgttattctttatttcttcgttcatttctcacacaagaaaactttttcccccttgaactttctataggctctttgcccaaggattaccttgttttgcggacagaattaactcagttgattgataattcaaaacaaaatttatgttatggctataatcttgaactaaagtctcgtaaaactcataaacacgggcaacaatccctccctaaacgcatcagtattgaaactgaggaagattacttaaagctgatacaaaaagagcaagaatttataaaatttaaagcagatgtagaccttatccgtgtagcagtccccgaactcaattggtggctttgtcaaaatcccttagaagtgattaagcatagcgactggcatgatttactcaaagtttgccagtattttcaaagcaaccctaaaattaacttgtatattcgagaattacctattcaagttcacaccaaattcattgaacaaaataaagatattctgcgtaggcttttagaagctatcttaccaattgaacagcttatctccgtagaaggtgaaagagaatgtgtttttgaaaagcgtttttctctgcgttaccgcgaaccaactattcgttttagagtcttagatcgaacaataaaagctagatatagcttgcccttctttgatatcagtacgcccatttctgaatttagacaactttgcttagaatctcaccgattctttattacagaaaatttaatgaattttctgactttccctggtcaaaacaatggtctggcaatttttggtggtgggtatgcgattcaagctttaaaatctgttacttggttatcacagtgtcctatcttttattggggtgatttggatgttgacggatttaagattctttctcaactgcgatcgcactttcctcaaacaatatctataatgatggacattaaaacctttgaaactttccaagaatttgctgttcctgattctagtgggggtactgtaactttacctcacttgactggtgaagaacagtctctatatgcttatctatcgctttatggaaaacgtctagaacaagaacatattagtcaagattatgctaactattatttgcaaaatttggtgcaacttatctaa

SEQ ID NO: 45609 - DNA, 1374 bp, Acholeplasma oculi
ttgcatctttttgaccaaatacctgacaacctatttaatgttttatcttctccaaacaaaaatatctatgtggattgtttgttcatcatttatgatgctacaaactccatagaggattcattccaaggggaaagaagttttgtaattgggaaacttgtggactattttgatgatttaaaagagacttttgaaatcgatgatgaagaaaattcaacatcacgtcaaaaagctgtttctgtcattaatgtattaaagcaaagtggttggttgggtgaagaagaattaggggattataaaacctctttaaatctctttgattattcgataaagattattgatttattaaaacgtatccaagtaggagaacaaacagaatatacaggagagatttatacagtctactctcttttatcatctttcgaaatccaagatggattaaccattattgaacaatcctataaaaaaattgaagatgttttaagaaaacttaagacattaaaggctaacatataccgttattattttgatcttgttaaaagagaaagtaaagataacttgcaacatgttttagaaagactattagtagattataaaacaaacttctttgatagtgcctactatcaattaaaaacaacagactcacttccacgttataaacgaagtatattagaaagtatttctaaaatctatatgcatgatacttacttagatacactcgcaaaccaagcattggttgcaagaaggaaattagagtttaatgaagcatttagctatgttgaagataaagttagatttattaaggattccattgattccattgaatatttaattgaagcaatcgatactaaaaatgaactctatataaatgcagcagcatctaaaataatgttcttaacaaatacctcagaggatttagaaggtttactcaatcgtttatttaaaatcattttaaaagaaaaaacctttaattattcagaaatatttaacttaactcgtatgagaaacttggatgataattcacttcaaaccattagaagaccaagaatagacccaattgttgaagaagtaaattatcaacaagaaatatcagatgaagttaaagaacgtaaaatggcttcactcttaaaagcaaacattttttctaaacaagaaattaataagtatgtttcctacattttaggggacttacaatctattaaagcaagcgatattgaattagaaactaatgaagattttgtaaaactcatattgatattcttatttagtaagtctgtgggtatgatctatgatgttagattactcaattacgatgcaagaattcaagatatcaagtttactgaatttgaaatatttaagaagggttataagaaatga

SEQ ID NO: 45610 - DNA, 639 bp, Acholeplasma oculi
atgatgaataaaaaccaagcacttaaaaaattaaatgatgagtttattcaattaaaagaagctgaaaaacttgttttttcaagaattgttaataaactatttcaagtaaactatataacaagaaaaaaaatagcggatgcaaatgattaccgttttatacttgcatataaagatatttttgatgcatatttggcactttcagattttgaattaacaattgaaaggcacgaagaagttgtatatattaaaaatatttcaaactttaatcattttagattaaagaaagatgaaagcattgtccttttaatcattagaatgatttatcaagcaaaaatgtctttagttacactggatgaaaatgttgaagtttatttatcagatattcacgaagaacttgctaaaatcggatatttagataataaaagaatgactaaagaaaaactaaaacctgcactacaattacttagaaactataacattattgatttcatggatagaaaactaaatgatgatgcaagaattaaaatatatccaacgatattatttgtggttaaagtagattccattaaagaggtattagatcacttagatcagtacttacaaggaggtagcgatcttgaagaaactgacgaagattaa

SEQ ID NO: 45611 - DNA, 3267 bp, Acholeplasma oculi
ttgaagaaactgacgaagattaaacttgttaactggcatttattctcagatcaaacgataaaaatagatggtaataccttaatatctggtgaaaatggtagtggtaagtccacactactagatgctttacaatatctattagtaggcggtaagagtggagctaaatttaatattgctgcaaccgatgaagctaaacgtacattagaaggttacatccgaggaagaattggtgcagaaaataaagaatttattcgaccaaatgatgttgtcacacatgtggcacttgagttttatgatgaacaaagcgatgagttcggaattattggaagtttgttagaacttcctaaattaggaactttaaaagaacgattttatatactcaataatgtaaatattcatgatggaatctttatggagaaaaatttaccaagagattacagatctatgaaggcttacttaaaatcgttacaaattgagtttaatccatttaattcacaaaaagaataccgtgatgcacttgctaaatattttggtattgatgcaaagaaatactctaagatcctaccaaaggcattagcatttagaccgattgatttacaaacgttcgtttttgagtttttacttgatgatgagccaattgatattcaaagtttaaagaataacgttacacagctcaaacgtgttgaaggtcaaattagactggatagagaaaaactagaacgattagataaaatcactacgttaggtgaatcacttaatcaaaatttagagcaaatcacaatcaataaattaattgaccaaatggcatttatcgaaaaaagagaaaacttcttgaataattcagaagatcttttagataaagtcaatgcgaaatatgaagtacttaaaagaaaaaaagaagagcttgatcatcagatagaaacaaatgatgaagctattttagagttagaatcttctaaaatgggtgatgatgttacaagaactttaagtaatttacaggaacaacttaagaagaaaggagatcaatacgaagaacaaaaacaaatcgtattggaccttcaagaaagtttaaatcgagaactcgatttatttaaagattttgtgcaactgaacccaaatacaaatatttcaggttttattaaatattatggttctcatgaagaaaattcaaatgtattagaattatcaagttatttagaaggtgcaacctctgctttaagtggttatcaacaagcattatcgattgaaagatccaatcttgaaaaggatcgttctgaaatattaaacaatttaagaattgcagaagctagactgaatgctttaaagaaaaatgttaaaacttatcctagaaatgttcaacaattaatcgaagcaatcaattccgatttatccaattattataaaaaagaagtccgagtcagacctttttcagatttaattgaggtaaaagacgaatcctggagaaatgcacttgaaggttacctaaataaccaacgttttgacttaattgtggaccctctttattttaacgatgcacttgaagtctatgatcgtgtcaaaacggagttatctatttatggtgtaggtcttgtcaatacaagtaagattggtgaatataattcacatttgccaaacagcttagcatctaagattacaaccgatcatccttatgctaaaaactatgccaatatgatcatgggtcatgtcgttactgttgaaaacttaaatgaacttaaaaattattctagagcaatcactaaatcgtgtatgacttactcaaatcatacagcaagacaaattaatcctagaacatatgacaccccttatattggacaacaagcaactcaaattcaagttgaaatggatatgaacttagttaaagatctaactaaagatcttcaaagaattacagatttacttgaaaagaatcaaaaatcatttagaatactgcaacaatctaaattacaacatatccaatcaagcaatcaaattagatattttgaaacaattaagcaaaccagaaaagagtttattgacttagaaaataaggttcataatttagctaaaaatcctaaaatcactgaacttgatgcacagttacaagatgaaaagaataaaaaacgtcaattaagactcgattatgagcgtttatctgatcagatggctgattgcagaagtgaaaaaactagaatattagaaacgattgatgaagcaagaaatgttctatcagaatatattgaagaacaaaaggattggagtaaaaaatatccaacacttttacctgttgcaagtattcagtttaaagcacttaaagaaaaatatagtgataactatgacttgatttcaagagatcttgcacaatcgagtgtaacgattcaatctcaaaatgcaagagcagaaaatgaagtgattaatctcatgagacaatatatcatgcaatatcattttggagcagctcctgacttaagcgagttaattgaatttgaaaaagaagctgtactcattagagataacaatttacttaaatatgaacaagaagcaattgatttaagacgttcttctgaaattggatttagagaagagtttgttggtaaattaagagcatccattgaggctgctcaaattcaaattgaggaactgaatttagcacttacaggtaaaaagtttggtacagatagttatcagttgataacaagacctgcagaaaacccagagtttaaaacctattatgatattatcatgagtagtgaagcagtttataatcatacattatttactgagaacttaaccaagaaacatgaagttgttttaatggagttattcaataagattgcatcctttgaaccggaaaatgataagtttgcactccagtttttagattatcgatattatatgagttatgatattgaagtcacatctgaaaatggtaataaatcctatttctctaaagtatctagagaaaaatctggtggtgaaacacaggttccgttctacattgttatcgctgcaagtttccaacaattattaaccaagaataaacgaattgattcaggttgtatggttttatttgatgaagcatttaataatatggatgaatccagaattgatgcgatgatgaaattctataactcattaagtattcaactctttatagcagtaccaccacaacgtgtaagtaatattattaactatgtcacaacatccttagcaattgttaaagacaatgattttgcaattgtagaatcatttaaacgagaggttatgtaa

SEQ ID NO: 45612 - DNA, 1461 bp, Pseudomonas pseudoalcaligenes; identical to SEQ ID NO: 43252

SEQ ID NO: 45613 - DNA, 708 bp, Pseudomonas pseudoalcaligenes; identical to SEQ ID NO: 43253

SEQ ID NO: 45614 - DNA, 3375 bp, Pseudomonas pseudoalcaligenes; identical to SEQ ID NO: 43254

SEQ ID NO: 45615 - DNA, 1164 bp, Pseudomonas pseudoalcaligenes; identical to SEQ ID NO: 43255

SEQ ID NO: 45616 - DNA, 1389 bp, Clostridium sp. FS41
atgatacttatgaatgaaataccggaccggttttggagcttattccgctctataaaccggtctacttatattgaagcgctattaaagatcaatgaggaatatgagtacagcaactactttctcagcagggaaatgtgcatccagcttctcagcgaatatttttccagaaaaaagtatgtcctatggcaggacgagacggaagatgactgggatacccttgagcccccagccaccagggtcctgaactggcttttgagaaacggctggctgaggaaagtggatgattatgccaatatgaccgtgaatattgtcatccccgattatgcggctgttatgatcgaagcatttgcaaggcttgcaagggatgaggaagatgagacggaaatttatatccagaatgtctatgccattctattttctctgaaaaatgatccccggtccagtataacccttctcaacaccgcgctggtcaatacaaagaagctgaataagtctctgcaggatatgctccataatatggacaaattcttcggcagccttttggagcagaaaaattatgagagcctgcttaaagagcatctggaccgctatgtggaagaaattgtaaacagaaaataccatatccttaagacttccgataacttttatctgtataaaacagatatcaaacgctggatcacagccatgcgccaggacgaggaatggatcgggcagatgtgcgcaaggcccgctggtttctttgtgcggaaaccctccaatgtaaccgaggcagaagtcatggaaaagctggatcagctggaacgcgggtttgacgacatagagcaccgcattgccaacatggacaaggaacacacccgctatgtgcgggccacggttaccaggctcaactatctcctgaaccaggaggataacatgaagggactggtggtgcagctgctgaaccatttatcggaatatgactgtccccaggaggatgtatcatccattggggccaggatgaacctgtcccaggtaagtattttatcggaacgatccctgtacaaaaagcgcaggacaaagacggattttaaagaacagttaaaggacgaggccctgtccagggagctgtccatggaggaggtcctgaacctgaacaaggtaaagaaccgctacagcagaaaagagatcgaaggctttattgaaacccatatggagaacgggatcatggcagtggacaaggatactgtttccaatgacgaggagtttgaaaagctgatcctggcttacgattattccacccgcttaaaaagcgcctatgaggtggagaaccaggaaccggagatgatacacaacggcagatacacctacccgggctttgtatttgcaaggaggaaaaataatgccatttga

SEQ ID NO: 45617 - DNA, 768 bp, Clostridium sp. FS41
atgccatttgacataccctattatgacggcctgatgcaggaagaacaggcccaggtcacaggatccatacgccttttgctccaccagacatttatcctggagcgcaaatttgacaggcgcaccgggcgtttccagtataaccaggagttccgcgcctgcaacaagcatctggaatttatcaggaactattttgcggtcagcggggtcgaagttcaggagaacagccagctgggccttatctatatccagggagaaaatctcatcggagataagctgcccaagctggccactctctatctgctggtgctgaagctgatctacgatgagcagatggagagcgtgtccaccagcgtcaatatctacactaccctgagggagatccatgaaaagctgggcagctaccgtctctttaaaaagcagccctcccccacggacatccgcaggacagtcacacttctcaaaaaatatcagatactggagccactggacctgctggaggacttaaacagcgacagccgcatgatcatctatccctgcatcaacgtggtgcttatgggggatgatgccagacagctgctggcatcctttgatgagcggcaggaggatgagggcgtacagggaaaagcggaccttccgcttgaggaacctgatgtgacggaagaaagcgaattggaagaaaatgaacttgaggaaaatgaacccgaagaaaatgaacccgaggaaaagaacatagaggagaaaggagcgtcagacaatggaattgactga

SEQ ID NO: 45618 - DNA, 3423 bp, Clostridium sp. FS41
atggaattgactgaaataaaccggacagcccaggaacattcccctgctccacaggaagggaccccaggaaaaagccgcttccttgccctttccaggatctgtctgaataactggcactatatcagcaggcgcaccctctcctttaatgaaaatatcaactttttcaccggccattcgggaagcggcaaatccacggtcattgacgccatgcagatccttctgtacgccaacacggacgggcgtgggttttttaataaagcggcggctgatgactcggaccgaagcctgatcgagtacctgagaggcatggtcaacattggggacaacaatgagttctcctatttgaggaaccagaacttcagctccaccattgtgctggagctgaagcgcagtgatacaggtgaatgccagtgcgtggggatcgtatttgacgtggagacagccaccaatgatatctcgcggcgttttttctggcataaaggccctgtttgggaaaatgaataccgcaccggaaaaaggaccatgtccattgcggaagtggagtcataccttcagtcccactacaacaaagaggagtgctttgcaacctcccacaatgaacggtttcgcaggatcctttacgatacctatctgggcgggctggatcctgagaaatttcctcttctgttcaaacgcgccattccctttcgcatgaatatcaagctggaggattttgtgaaagaatatatctgcatggaaatggatatccacattgaggatatgcaggagagtgtgatgcagtacgggcgcatgaggaagaagatcgaggatacctgtgtggaaatacgggacctggaggagatccgccaggcctttgcgtcctatgaggaaaaggaaaaccagatcaagaaatgcacctattttgtgaaaaagctggagattctggacctccagacccaggtcagaactctggccgacaagctgaatcttgccaaaacagacctgctgcgccaggaggaggcaagggcgggcgtggaaacacagatcgctgacctgacggaacaaagcgatgacctgctgcgccggattgcatccaccgggtacgaggacctgaagcagcaggcggagagcctgaacgagctgctggagcgcctgggaaaaagtgaagccaggtggcagcagaccacacaggcgttaaaatgctgggaggaggaggatatcacctccaatcaaaccctttgggatattgaggaatttgaaaaccgcaccattgatgaacacactctttgccggttaaaggagtccattggctccatgtgcaccgacacggaaaagcagcgccaggaagcgtcctctgtgatccgggacctgaaaaacaaagaaaagcagactaaggatgagctggagaaactgcgctccggaagcaaggcatatcccaaatatctggaaaacgccagaaccttcctgcagcgccgtctgctggaggagacgggaaagggcgtggatgtccatgttctggccgaccttttggaggttaaaaatgcccagtggcgcaatgcggtggagggctatctgggcagccagaagctgagtcttgtggtggccccggggtatgccagggctgccctgaagatctacggggaactggacaaaaaagaatatcacagcgtggccgtgctggatacggaaaagatttcgggaagccagcacgcggtgctgcccaatgcgttgtcccgggaggtaacggtcagggagtcctacatacagccctacatggatctgctcctgggcaaggtcatcaagtgccagaccatagaggacctgcgtgagtgccgcatcggcattacgccggactgcatgctgtatcacagctaccggctgcagtatatcaatccggatcaatacagcaaatttgcctacattggcaaggacagcatgagacggcgcatccgccttctggagcaggaactggaatccctgggcgtccagagaaagccccatgaagaggtggtcagggaatgccagcgcatcctcaccctggagcagctatcactggagcctggagagtacatggagtggcttaaggatatcggttcctggaatgaaaaacagcgcgagaaaaagcggatccttcagaaactggagaaactgaaggttcagaacgtggaccagctggagcaggagagaaaggctgtggtcagcctgtgcgatggcaaaaagagggagcgggatgagctgctgaatatgataagggataaggaaaatgagatcagccgttatcagaatgcggccattgccctgaacgtgaccctgacggaccaggaacggggatgggagacaaaccacgatttcgagtcccagctggccggatacctctcgtccaaggaccaccccagatatgacagggaaagggagagttatgccgccagatgtgttaaacttacggagagcagggacacggccttccaaaacctgatgaccgtacggaccgattacctgaggcgctatcccaaccgaaacttcccggtcaacacaaaggacaaccaggcctatgaccacctgctaaagagcctgtcctgcgaccacctggacgagtacagaaaaaaggcggccgaacaggccagggcagcggtggagcattttaaaaatgactttatgtacaagatccgaagcgcgatccgtgaagccatgctgcgaaaggacgagctgaaccgtatcatcagccgcctggattttggaaaggataaataccagtttgtcattggacgcaacaggggggcggacggccggtactatgatatgttcatggacgagtccctggaggtaaacccctccgagctggcggattcctttgatcatcagatggacctgttcaccgcacagcacgagaaccggtacggggagcttatgggagaactcataagcatattcatccctccggaaaacgccaatccccagcagatggaggaagccaagcggaacatggacaaatatgccgattaccgcacttacctttcctttgacatgcagcagctgatccaaaacgaggatgaggtcatcaaaatacgcctgagccggatgatcaagaagaattcaggcggagagggccagaatccgttatatgtagctcttcttgccagctttgcccaggcctaccgcatcaatctctcccctaagatggaacgcaatcccaccatccgcctggtggtgctggatgaagcgttctccaaaatggatgcggagaaggtggccagctgtattgaactcatccgcggtctgggattccaggccatcataagcgccaccaatgacaaaatccagaattatgtggagaacgtggacaagacctttgtgtttgcaaatcccaacaaaaagtccatctccatccaggaatttgagagggagcgtttcccggagctgataaaagatttggaagaggaatag

SEQ ID NO: 45619 - DNA, 1431 bp, Burkholderiaceae bacterium 16
atggtggattcggattacccgcagttctttcgtccgctgacgctgaagaggcgccggctgatcgctgcctgcatccgcgcattctatgcgcggctttatggttcccatgccgactaccgttccatccttgggcgcgaggacttgcgtgacctgtttgttcagaccatgcagtccgccacgctgccggccgacccggccggggaagatggcgaagacggattcgccgccggtgaccttgccgacgaccagaagctggcaagcgccatcgtgcgcctcctcgtcgcggacggctggctcgaaaccgccgaggatcgcgttcgactggttaccgcctatcgcttcacccgcgccggcaagatcttcgctcaggcgctgacgctggccgaccgtccacgcgaacggacccgccagcgcaacatgcgctcctgcaagaatgctctgggtgccttcatcgagcgccgcgacgtggaggacctgctcgacgcctacgagtatgccgatcgggtcgttaccgacctctccgaggacatcgagctcttctacgacctggcccgcaagatattgctcgatgctcatgtgcagggcaattgggatgggttcatcgagttcgtcgagcgacgttttcgtgatgagttctcgccccggctggtctatgacaatgccgagcgccaccggttggacatcggggcgctgatcgaacgtcttaacgagttgagcgcggccgagatgcaggccattgacgatgacctggccaaccacgcggcatgggccgcgcaggccgcgccggacggggctatcttgagatggatgcttgatcggatcgacgagatggtgaccgcggcctgccggacgaagcagccggaattgttccgggccatggaaagctatgtccgccgccatgtggtcttgttgtcgcagagtctgttcatgggggcatcgggcagcggggccgcgttgtccaccctgatccgccgcctgggggagatgccggagcgggagcagggcgcgtggctggagcggcagggagcggcgctcgcaccggtgagcgtggcgctgtatgatcccgccgcggtgcagccgagaaaggccgccgagcgtaaccgggcgcaggctgtgagcattgttccggagatcacgcgggaagagcgtttgcgtcaattcgtgcggcaagcggaggagcgggccttctccttgtcgcatcacgatgtcgtggattacctgctcggttccatgcgtggcacgggcgtgctgcgcctgtccgagttgccggtcgacgatgccatccaggcgttatcgttgttgcgggccgtcgaggcagcacgggaccatgacggactggaggtggagcggctagacgccgaaccgctggacaatgccatcatgtcgggcaccgactatgcaatcaggaggcgccacatcggccatggatga

SEQ ID NO: 45620 - DNA, 687 bp, Burkholderiaceae bacterium 16
atggatgaaattacgattgggcaactggtggaagcggaactgaaggcggggggcgtcaggccggaggcgttccggcagattctcggccgcctgttcgggctgtccatcctgcaccgggaggacagcgccatcgagcgtcagctctacgacgacgccgtgcgtatcgagggcctgctcaatgcgtacttcgatgtgggcgggttccggctactgcacgagcggcatcagagttattttcggctttacccgccgggggcgcgcgtgccgggactgcccgccgaggacgatgctatcgtggtggacgccgtgcgggcgaagctctccgccgatttcgtggcatgctgcctggtgctgcgcttcctgtacaacgaaagcctgcggcaaggctcgatcaacgagcgcaacgaggcgctcgtcaccgtggaatacctgaatgccacgctgactgcgcaggcgcgccgctcactgccggccaagactgcgcgggagaagctcttcgccgacctgaagcgtgcccgcctgatcgattaccgggcggattccgaggtggaagatgctgacgctctggtcgccattcgtggaacgatcctgcagttcgtcgcggattccgccatcgatgccctgctggccgaaacacggacgcccgtgtcggccgtcacgtcgccggagcctgacgatgaagcttga

SEQ ID NO: 45621 - DNA, 3672 bp, Burkholderiaceae bacterium 16
atgaagcttgagaagctcatcctggtcaactggggtttcgtggtgtcccgggaatacccctttggcgacaccaccttgctgtcgggttcgaccggagttgggaagtcctctttccaggacgcgatccagctggtcatgaccggcggcaagcagcacatcaacgtgttcaactcggcgcaggacgagagcggcgcctcgcgcgcgggcggcaaggtgaggcggacgctggcgtcctacgcggtaggcatgcgcgacaacctctgcgtccggccgtatgggtcgcacacctatgtcgtcgccgtcttcgcgcccgatgccggggagtccgccgagccattcaccgccgtggtggccgtggaagccgccgtgtccggtacgcgcgagcaaggccgcagcgtcgacgtggcgcgcaagctctactttgtgctgccgggcagccgcgcgatggaggcggatttcatcgagtcgcgcaagggcaattcgattacggcggtgaaggtcgaggatatctaccatcggctgcgccagcgctatccgcgcgtcctgccgttcgagaacagcatcgaagactatctgtgcaagctctatgccgagtttcgcggtggcggcaagacgctggtcgggccgcgcgaggccgaagcggcggcgcgggctttcgtccagtccattgcccgcaagaccgtcggctcggtggacgagctgatccgggagcaggtgctggccgagcctgatttctccgatcagatcgggcatatcgcatcgctcatgcagaacgtgcaacgtctgcgcaaaatcgccaccgaattactggcgtgccgggagcggctgggagtgctgaaggcacacgcggatgcgttccttgccgcgttcgaagaggccatggaggccgaactgggcgaagcgctgcgccggcagcaggatgtcgaggaggagatccaaagactggaggcctgccggcgcctcgccttggccgatgtcgaaaagcagcaggcgcttgccgaccggcatgcacaggcgctaaagcgcgccacggaattgcacggcactgccaaggggcggctcaatggcaatccggtggcgcaggatcgtgagcggctcagccgcgagatagccgcggccaccgagggtcgatcccgtatcgcgctggacgtcctggccgccctgacgggcttgcgcggcgtgctggacgaactggctgccctggctaaacagcctgcagggccggcctccgcctacgcaccccatgtggagcggctggttgtcgatgccgcggcgatcgatgccgccgacggccaggccgccgcgcgcgagctggcggcgatgctgacaggcgcgcagatcgacccggcgagcctgcggcgcgaccgcttcgccaggctggatgccgccctggctcccattgcgcagcggttgcacggcgccgacggcctgtatggagcagtggtacaggagcaggcgcgggagtcggatcgcgctgccgccctgcaaggggaaatcgatgacctgcagcggcgccggcaagggctggaagatggccactttgacttgccggcgcatgtggaggccgcggtccgatatctcgaagcccagatgccgggcgccagtcccagggtgctttgcaacctcgtccagccgcggcagggctcacgctggcagaacgccatcgaaggccttctgggcggcaaccgcttcgtgatcctggtggacgcgcagtacgaggcgagcgccatccgggcgctgcggcacgagctgccggcgactaggcaaggacgagaggcttccgtggtgcagggtgaactggccaagcggcgggcggaaaaccaggcgctgtcgcccgatgccgtgctgcaggaactggtgatcgccgatgagaccgcgcgcgcctatctggttgcaagctacggccgttatgtcaaggtagcggatgcgcaggcgctgcgcggcgcgccacaggcactgaccgtggacggcatggccagcggcgggttcaagatgttttcgtcatgggtggaggacggcgaacttgccttcggtgccgaggcgcggcgcaagcgcgtggtgaggcttgcccggcagatcgacgaaaagacgcgggaaagggacgcacatcgcgcaagcgccgcggagttggccgcatggggcgcgcgtctgctcggcctagagctcgtgcctgtcgcgccgatgctggacaagctgggtgagacgcagcgcggactgagtagtctcgcggcgcagctcgccagtctggatgactccgatctcatcgtgctggagcgccgcgtggcgcgtgcggagcagctattggacggccaccaccgcctatccaataccgcgtcacgctcagcgggcgaagcggcgggccgggcgcgtggcttcgaaacgaacatcgctgacgccgagactaagcttgttgggtgccaggacggcgtgaggcaggtcaacgcccgcgtggctgaagtgatccggctcaatccgcacttcgatccgctccggctgggccagcgcgcccgggaagcggccaaggagcagacctccgcgtccttcgatggacggcggcgccagcaagccggcctctaccgccaggagcgcgaggcattcgagcggaaactggaggcacacaatctcttgtcttcctcgctcgatgagcgggtcgactttcagccttgccagtcgacgcagggggagtacgagtggcaagcctatggcggcgtacccgccgcccggcggcagatctcggccatgctcgaacggctcgaccaagtgcgcattctcaacaacaccagcgagctgcggggcgccgagaagagcttcaacaataccttcagtacgcatttcgcgctggccgtacgcaccgcggtggagcagggcatcgatccgctcaagcggctcaatgagaagctcaagcgcctggcattcggcgaagaccgtttcgagatcgaatacgggcagatggtcaaggagtacaagaagtacttcgacctgttccaggaactgaaccggctggccgagacgcaaacgccggtggatctgttctcggcggccgaaggcgtgctgtccgccgacagcgtcgtggcgctggacgacatcaagctgctattgctcgacaccaaccgcgaccacgcgttgcggcgactgaaggacatagcggactaccgcaactatcgccagtatgacatccgcaagtattcggaagatggacgcgaggcgtccttggcgagaatggcgacgttctcgggaggcgagctgatgacgccggcctatctcgtacgggccgcggtgctggcccaggcatttcgccagttcgagaagacgccgagcctgaagctcatgatgatcgacgaggccttcgacaagatggacgagggtcgcaccgccgccgtgatgcgctatctcaatgagaatcttggcctgcaactggtggttgccatgccgtcccgcgcgtccggccccctgctcgagttgttcagtttcgagcatcgcttttccctgatgaaggtggaggggctggccggggaactcgacaagattaccgaggtggacagctccctgttgaaggccgaccggctgcatgccctctggactgagcgccgggaggcggtgcggcgtgaagcgacatggcagttcgacttgcaggaggcacgcaagcagctggtctcggacatggggacatga

SEQ ID NO: 45622 - DNA, 1164 bp, Burkholderiaceae bacterium 16
atgagcgccgacggcattccggggcgccggccggccgcccttaccgcgttgctgaatgcgctggtggaccgcatcgaagcgaagccgtttgccgagaggcgccgcgatatcagcttcccgttgagtgctgggacgtggccggagtttttcgcgatcgccctccacggcgaacgcatgttcgtgtggcgcgccctggaagcgctgcaggcgcagcccggcttggcgctggtgctcgaccagcgtcgcggccagcgggatcttgatatctgggagcgctcaccgaagctcgtcattgccgcgcaagcggaagcgtttcttcgcgacgagacggggcgccaggccagtgccgtggtggcctggatggcgcagtggcggcaggctgtgccggcgcgcttcggcagcgcggcgctgtgcgagcggctgctgtcccgtccgatcctcatcctgccacgttcaccggagcaggtgctggagcgcctcgcgggcatcccggcgcttgccggcgagaacctcatgctccatgaggtggcaagccggcagttctggggcttgtcaaaaattctcaacggccagcaggagaccattgccctgttgcttgacacggatgtctgcccctttccggacaggccggtgcaactgctggtagccgcccgtacagccgatccggctgccccgctcctgtttgtggaaaatgccgcaacgttcgaatcgatggcggcggggaggctgagcgccgccgaaggttttctcctgatatacgcatcaggatacagggcgagcgcgaggcggctgcgccagccgggtggcagctcagtttattttgccccgggcgtgtttgagcggaatgcggcattggcgcgtagctttcttgcatggctgcatggcaccgacgtcatgcgcccggttcatttctggggcgacctggattttgccgggatggatattctcaaggagttgcgcgtggtattcccaggcgcgcaagcgtggcaggctggctacgaggcgctgcttgcacgcctgctcgcggaggagtcccacgcgccggatgaagcaaggaagtcgggccagaccgatccgggccttaccggctgccgttatgcggatgaagtgctgctgccagcactacgcaggttgggccgatttgtcgaccaggagagtctgtag

SEQ ID NO: 45623 - DNA, 1449 bp, Microbacterium oxydans
gtggaagcggcattctcccgcgctgtcaccgcattcagcactccgaccctcgacctcctgcacggacgcttcgcgccgttcgtcgtggcctcgttgtctcttctgttcacggcggacagggcctccatcccgatcgccgacgcccaggctgagctcgcagagatcctcgatgagctcagagatgcgggcgatgatgacgacgatcgccgggtccctgcgggcaccggccgtgacgtcgccaggaactgggtccgcctcgggtggttggtgcagcagatcgacgaagacgtcgaggtgtatcggctttccgcgcatgccgtggaggcactggagatcgcggggcgcaccggcggcgggcgcacgcgcgtctccaactcccgagtgcgcacgctcctcgaggccgtggagcacctggccgacagtgccgaggccgaccctgttcgtcgtctcgcccgtctccgagaggagcgcgccgcgctcgacgccgagatcgaccggatcgaggaatcgggcagggctgacccgctcgacgacgaggagctcttcgaggaagccgagaacgtgctgcatctggcacgcgagctccccgccgacttcacccgggtcgccgaatccctcaagctcatgcagcgtgacgtcgtcgcccatctgcgccgtgatgagcgcccgacgggtgaggtgctgcgcgagtacctgcagcgcgcacaggatgtcatgaactcgacgccggaaggacgcgccttcgccggcgcgctgaagctgatcggcgatccggagcgcatcgacgccctcactgaccaactgcacggtctgctccggcagccgttcgcccggatgctcgacagctcgcaacgcgccgagctggacgcgatcggacgccgtgtggaactcggggtcgaggaggtcctggccgcgcaacgtcgagcctcgcacgtcatcaccggccaggtgaagacgcacgatccgctgcgcgaccgccagatcgacgacctgctgcgcgatgtcatcgccgcgctgcacgtgtgggacggggcgggggcgagcgacgcgccggtgcgcagtctcccgctcgccgacctggggcacctcaggcagaccgtgagcagcatccgtccgcctgcggtccccgcccctctgaccgatgcgggcgatgtcgagttcgccgacgtcgactcccgcgcgtggggcggaccgaggtacgcggagctcgaagagtatgtcgccgggctcggaccggagttcgatctcgcggccgcattcgccgagggcgatgacgacacccgacgccccgtcgacctcgtcgggctgctcgagatcgcccaccgcaacggcatgacggagagcgacacggtgtcggtggtcgaagctctgcgccccgacggatcgacgcgacgattcgcgttcggagccgtcacggcgcgcaaccccaaggaagacgcacatgcctga

SEQ ID NO: 45624 - DNA, 663 bp, Microbacterium oxydans
atgcctgaagagagccccgcgacggaggcgaccatcgaagacccgttcatcgcgcccgtccccatggaagacgacatcgaggagcacttcgcgggagaccgcggcacgctcgacccggagatccgtcgtctgctcgcccacatccttcagcggcgcttcatcgccgcggaacgcaaccgcaaggagtggactcttctgctcgatcatcagcaggtgatcgagtcgcgcctgaacgatctgtacctccgcctggtcgtcgaccacgctcgaggcttcgcgtacaagcagcagctgcgctcggatgagatcgacatgccggtgctcctcaaggattcgccgtacacgcgcgccgagacactcgtgctcgttcatctgcgcaccgtctaccagcgcgagtccgccgccggcgagtcatcggtgcgcatcgacatcgaggatctcgagcagaccgtgctgagctacttcacagacgtcgacggtggcacggcgcgtcagcagaaggcgatcaggaatgcgatggatcgattggatcgcgagggcatcgtgcaggaggagaccagcgggcgctaccggatcacggcactcgtcgaggtcgtgctgagcgcagagaccctgaaggaactccgcgactggctgcggtcgcaggaagcggtgcaacgatga

SEQ ID NO: 45625 - DNA, 3360 bp, Microbacterium oxydans
atgacgatggtcgacactctcttcggcctcatccctgccggttcgcggggacaacagtggatcgcggacgagctgcagctgatcaactggggtggatacgacggcggcccgcatcgggtgcgcttctcaccgaacgccacgctgttgtgcggtggctctggctccggcaagtcgacgctcatggacgcgtacatcgcgctcatgatgccgcacaccacgccgttcaacggcgcgtcgaatggcggggtcaccggccgaccgcgcggcgaggagcagcggaacatcctctcctacgggcgagggaagatcgacgaatcccgtacagaggacggcaccaagctgcgtgtgctccgtggcgacggcgaggacacgtggagcgccatcgccacgacctggctcgaccacgacggctcgcggttcacggcggtgcgcgcctggtacatcccggcggatgcgcgcgtgctggaggacaccacccgtgtccgcgcgaccgtgaacggggcgttcgatctggcacggctggagaaggccgcgacgcagcggctgtccgacgcgtcggtgcgggcggccggcctggagacactcgcgaccgatcgtgagttctcggcccgactgcaggccgtgctcgggatcggggcggccgggtccggtgcgaaggccatcagtctgctggccaggatccaggcgggacagcagatcacgacggtcgacgatctgtacaagaagctcgtgctggaagagcccgagacgatggccaccgccgatgccgtcgtggcgcacttcgacgagttggagagcacgcgcaccaggatgctgaccgcgaagcagcaggtcagcgcactcgagcccatccgcggaatcaaggagcgcatcgcggcatcagccgaacgggtgcgggtcatcgacgaggtcggagtcttcaccgatccgtcgtctctcgccgcgctctggaacgcgcagcgccgcctggatctgctgcgcgaggtcgaggtcgagctgggcgaccgctcgcgggccctcagcctcgccgtgagggagaagcgtgccctcgtcgacgccgcggatgtggaacgggagggtctcctcgacgtcctccgccagtccggcggggaccgtctcgagacagcacaacgggagcttcgggtcgccgagcgccgcctggacgacgtgcggcgggaacgagcgaagttcgacatcatcgttcgggagctcggcgcagaggtcgagaaccccgctcagttcgaggccttcgtcgcgggcacccggggctcgtccccccaggcggggatgcgggaagcgcgcgcggccttcgccgatgccgagacggcgcgcaggacggccgaactcgagatcacgcggctgcgcgaggagcgcgagcgcaccggccgggtgcgcggaagcatccctgcgcacctcgacgagtcacgcgtcctgctcgcagaggcggccggtctcgacccgtcggagctgcctttcgtcggcgagctcatcgaggtgcggaccgagttcgaaccgtggcgcgaggcgttcaatctcgccctcggcggtttcgccaggacgctcttggtcgatgcagagaagctggagcagttccgctcggcgatcaacgccgtgcgcactccggaacggttgacctacgaaggcgtcccgaccggactcctcgaggtgcgcagcgccgacccgaagacccttcccggcagactcgactacctgccgagccccttcgcaggttggctccagcagcgactccaggaccgtttcggatatgtgtgcgtggattcgtcgtctcagctggatgcgcatcagaaggctctcacgatcaacggccaggtgtcgcaggggagcaggggagcccatggcggtcagggacgtgccaacgtgctcggcttcaccaacgaccgtcggctccgcgagatcgacgagcagctgcagacgctgacctcgcgctacgagggtcacgcatccgccgcccaggaggccgagtccgcgctcgaccgcatcgaagcgcggtcgaccgcgttcgcgaagatcgaggacctcacgtgggagcagatcgatgtcgcagcagtcgaggctgaaagggagcgttggctcgccgtcgaagcggaggtcacgaccgccagccccgagatcgcacagctcaagcgtcaggcggaggatctgcggtctcgcgcgagcacgctccgggatgaagaggcgcgtctcagcaacgaactcgctcagacgcaggagcactggggacaggtcaccgacgacgtggatgcctgtcagacggtgatcgactcggcggcggcctccgacgtgtcgctcggcgagacgcatgcgtcgttcctcgacggtcggttcctgcacgcggagacgggcgccaccctgaccgcgtcggagcggctcgcgcacctggacaccgcgctccggaccgccgcccagagactgcacgaggaccgccgcgaggccgcggaagcccacgagcagcagcgcgagagcatgcggcgattgatgacgggtttcctcgagcggtgggacaacctcacgatcctcccggaccctgacgagtcggtgcgcgagttcgagagcatccttgaggccttgcagaccaacggactccatgagctggagaccgagtggcgcgacagtctgctgaagctctccgggaacgacctcaccagtctcgactcgaccctcagccggtcgctgcgcgagatcaaggatcgcatcgacccgatcaaccgcatcatggcggagctgccgttctacgacgacgaccatcgtctccagatcaccccgcgcgagaatcagagcgaggcgcgtaagcggttccgccgggagctccgtgaggtgcggggactgatcgacgccgcggagaccgatggggagcgtgaggccgtctaccgcaagatgagccgtctcatcgggcgcatgcggcgtacggcccccgactacgcggaactcatcgacgtgcgcaaccacgtgcgtgtcagtgcggagcgtgtcaccgcggagacccgcgagcacgtcgcgctctacgaccacatcggcgagaagtccggaggcgagtcgcaggagctcgtcgcgttcatcgtcggagccgcgttgcgctaccagctcggcgacgcgggcgccacccggccgcgctacgcccccgtcttcatggatgaggcgctcatcaaggccgacgcccacttcacgaagcgcgcgatcggtgcatggcgtggactcggcttccagctcgtcatcggcgcacccaacgacaagtacagtgcgatcgagccgcatgtcgacgtcgagtacgacatcctcaaggacacccgcgggcgctcctgggcgaaggcgaaggtgggtctgccggacgcggcagtgtga

SEQ ID NO: 45626 - DNA, 1473 bp, Microbacterium trichothecenolyticum
atggggaacactcgtgccgaggcggcatatctgcgggctctcgcggcgttccgaacccccaccctcgacctgctccacggtcgctacgcgcccttcgtggtcgcagcgctctcgatcgtgttcacggtcgatcgcccgtcggtggagatctccgatgcgcacgccgaggtcgccgagatcctcgacgagctccgagccgcgggctacgacgagggcgatcgcacgctcccggtcggcaccgcccgtgagatctgccgctactgggtgcgggtcggctggctcgtgccgcagatcgacggcgacgccgaggtgtaccgcctgaccgcgcacgcggtgggcgcactggagatcacggggcgcacggccggcgcccggacgcgcgtgtcgaactcgcgcgtgcgcaccctgctcgaggcggtcgagcggctctccgatcacgccgagacggatcctgccgtccggatggcccgcctcatccaggagcgtgacgcgctcgacgccgagatcgcccgcctcgagctcggccagtccgagccgatcgacgacgagcagctcctcgaagaggcagagaacgtcctgcaccttgcgcgcgagctgccggcggacttcacgcgtgtcgccgaatccatcaaggccatgcagcgcgacgtcgtcgccgacctgcgtcgtgacgtccgcccgacaggcgaggtgctgcgtgagtaccttcagcgcgggcagcacgtcatgcagtccaccgccgagggtcgcgccttcgccggcgcgctgcgcctcatcggcgatccggaacgcatcgacaacctcaccgagcagctgcacacgctgctcgcccagccgttcacacgcctcatggacggggaacagcgcaaggagctggacgccatcggccgccgcgtcgagctcggcgtcgaggaggtgctcaccgcgcagcgccgcgcctcgcgcgtcatcaccggacaggtccgcacccacgacccgatccgcgaccgtcaggtcgacgatctgctccgcgacgtcatgtcgggtctgcagacgtggacccgcagttcgtcctctgatgcaccggtcgagccgctgcgcagtcttccgatggccgacgtcggccatctgcggcagtcggtgagcgacatccggcctcccggcgcgcccgctccgcttcccacctcggacgaggacgcggtgttcacggatgctgacacccgcgcgtggggcggaccccggtacgccgagctcgaggcgtatgtcgccggcctcggcgacgagttcgatctgggcgacgcgttccagggggcggacgacgacgcccgacgaccggtggacctcgtcggcctcctcgagatcgcgcaccgcaacggcatgagcgaacccggcggggtgtctgtcgtcgaagccctgcgccctgacgggacgacgcgacggttcgcgttcggatccgtgaccgcccgcaccgcgaaggagcacgatgatgactga

SEQ ID NO: 45627 - DNA, 780 bp, Microbacterium trichothecenolyticum
atgactgagaccgccacacagagcgatctcgacgccaccgacgccgccgtggaggacgctgccgcgggcgaggcgttcatcgcgcccgctgcgatggagaacgacctcgacgagctcttccccggcgaccgcggcgtgctcgaccccgccgtgcggcgtctgttcgtccacgtcctgcagcggcggttcctcatggcggaccgcaaccgcgaggagtggacggtgctgctcgacaaccagcagctcatcgagtcgcgtctcaacgatctcttcgtgcgcctcgtggtcgaccacgaccgcggcgtcgcatacaagcagcaggtgcgctccgacgagttcgagatgccgatcctgctcagggatgccgcctacacgcgctccgagaccctcgtgctcgtgcacctgcgcaccgtctatcagcgcgagtcggccgcgggtgagccggcggcgcgcgtggacatcgaggacgtcgagcagacggtcatgagctacttcgtggacgccgacggcgacaccgctcgccgccagcggtcgatccgcaaggcgatggaccggctcgcgcgcgacggcatcgtcgacgaggagaccaccggccggttccgcatcagcccactcgtcgagatcgtgctgagtgccgagaagctgcgcgagctgcgcgactggctgcggacccagtcggatccggccgtcgcggggggcgcagcatccgtcgcctccgtcgatgtgttcgacgaggccgaagacgacgacgaagacgacctcgaggaggccgcgctgtga

SEQ ID NO: 45628 - DNA, 3354 bp, Microbacterium trichothecenolyticum
gtgacgatgctcgacacgctgttcgggctgatcccggcggcatcgcgcgggcagcagtggctcgccgaggacctgcagctcgtgaactggggtggttacgacggcgcgcaccgcgtgcggttctcacccgaggcgaccctgctgtgcggcggctcgggctcgggcaagtcgacgctgatggacgcgtacatcgcgctcatgatgccccacacgacgccgttcaacggcgcgtcgaacgggggagtgacggggcgtccgcgcggcgacgagcagcgcaacatcctctcctacggacgcggcaagctcgacgagtcgcgcaccgaggagggcacgaagatgcgcgtgctccgcggcgacggcgaagacacgtggaccgccgtcgcgatgacgtggatcgaccacgacgggtcccgcttcaccgccgtgcgcgcgtggtacatcccggccggcgcgcgcgtgctcgaagacaccgtgcgtgtccgcgcgacgacggaccgcgcgttcgatctcagctcgctccagcaggctgcggcgctgcgcctctccgacctctcgctccgcaacgccggactcgaccccgtgagcaccgatcgcgagttctcggcgcggctgcacgcggtgctcgggatcggcgccgcgggcgcgggtggcaaggcgatgagcctgctcgcccgcatccaggccggccagcagatcacgacggtggacgatctgtacaagcggctcgtgctcgaagagcccgagacgatgaccacggccgacgccgtcgtcgcgcacttcgacggcctcgagagcacgcgcacgcgcatgctcacggcgcgccagcaggtgagtgcactcgagccgatccatgaactgcgcgagaagatcgcggcagcggtggaacgtgtgcggctcatcgacgaggtcggcgagttctccgacccggcatcgctggcgacgctctggcgcgccgatcggcgactgggcatgctgcgcgaggtcgagaccgagctgcgcgatcggaagaacgccgccgacaccacgcttcgtgagaagcgtgcgctggccgacgccgcagaggcggagcgcgacggactcgtcgaggtgctccgactctcgggcggcgatcgcctcgagaccgcgcagcgggagctgcgcgaggtcgagcggcggctgaccgcgacgcagagccgccgcgcggggttcgacgcagacttgcgcgccatcggcgaggccgccgccacgcaggcggagttcaccgagctgatggaccgcgcccgcgcaagcctcgcagaccgcgatgcgaagggcagcgtgcgggccgagtatgccgaggcgatctcggcggagaagtccgcagcacgcgagatcgccgagctggaggccgaggtgcggcgcgcgaccgggctgcagggcaacatcccgcgggcgctgcacgaatcgcgcgagctcgtggcgcgtgcggccggcatcgaggtcgaggacctgccgttcgtcggcgagctcgtcgaggtgcgcacggagttcgagccgtggcgcgaggccttcaacctcgcgctgggtggtttcgcgacgacgctgctcatcgacgtggaccatctcgggcggttccgcacggcgatcgacgcggtgcgcacgccggtgcggctgcgctacgagggcgtccacgccggactcgacgaggcggacctgcgcgacacgaccacgctgcccggtcgtctcgattaccagagcacgccgttcacgggctggctgcaggagcgcctcgccgaccgcttcggcttcgtgtgcgtcgactccgccaccggcctgtcgcagcaccgcatggcgctcacgatcaccggtcagatgtcgcagggcagtcgaggtgcgcacggcggccacggccgtgagaacgtgctcgggttctccaacgaccggcggctcgccgacctcgcgcggcagctcgacgacgcccgtccgcggctcgagcgcgcggcggagaaccgcaagcgggcggatgccgcgctggacgccgtcgacgctcgcttcgcggtgtacgccaaggtccgcgatctcacgtgggagcaggtcgacgtcgccgccgtcacggccgagcgggaccgctggctcgccgtgcaggacgacgtgacggcagccaatcccgagatcgcccgcgtgcaggggcagatcgccgcggccaagggcaaggcggcacgcctgcgcgaagagatcgcgcgcaccacggtcgagcgcgagcagatcgagtcgcagtggagcgacgtcatcgacgacgtcgacgcggaccagacggtgatcgacgccgccgaagacgcgggacggatgctgcgccccgagcagatcgcgttcctcgacgaacgtttcagcctgaccgagacatcgcggcaggcgagcgcatcggacgcgctggccggtttcgtcgccgcgctcacgaccgccgcgcagcggttgaccgaggaccgccgggccgccgccgactcgctcgagcagcagcgcgacagcgtgcggcggatcatggtgagcttcctggagcgctggccgaacccgaacctcctgcccgacccggatgagtccgtcgacgacttcgagcgcatcctggaggcgctccgaacgagcgggctccacgagctcgaggccgagtggcgcgacagcctgctgaagctgtcgggcaatgacctcacgaacctcgactcgacgctgagccgctcgatccgcgagatccgcgatcgcatcgagccgatcaacgagatcatgcaggatctgccgttctacgacgacgatcaccgcctgcagatcacgacgcgcgagaaccagtcggaggcgcgccgccgcttccgccgcgaactgcgcgaggtgcgtgcgctcatcgaggcggcatcgtccgacgacgagcgcgagcaggtctaccggcggatgtcgaagctgatcggccacatgcgccgctcggcccccgacttcggcgacctgatcgacgtgcgcaaccatgtgcgcgtgagcgccgagcgcgtcgacgccgcgaccaagcagcacgtcgcgctctacgaccacatcggcgagaagtccggcggcgagtcgcaggagctgatcgccttcatcgtcggcgcggccctgcggtatcagctcggcgatgccggtgcggcgcgtccgcgctacgccccggtgttcatggacgaggcgctgatcaaggccgacgcccacttcaccaagcgcgcgatcggcgcgtggcggggcctcggcttccagctcgtgatcggtgcgccgaacgacaagtacagcgccatcgaaccgcacgtcgacgtcgagtacgacatcctcaaggacacccgcggtcgctcgtgggcgaagcccaaggtcggcctgcaggcccgctag

SEQ ID NO: 45629 - DNA, 1497 bp, Microbacterium hydrocarbonoxydans
gtgaccggtactcgagccgaagcggcctatctccgcgctcgcgccgcgttcaagatcccgacgctcgacctgcttcacggccgctatgcgcccttcgtcatcgcggcgctgagcatcatgttcacggcggaccgtccgacggtcgccgtggcggacgcgcacgtcgaggtgggggagatgctcgcggagctgcgggcagccgggtacgaggagaacggtcgaggtctgccgtcgacgaccggccgcgaggtctgccgatactgggtcaaggtgggctggctcggtcagcagatcgagggcgacgtcgaggtgtaccgatgcacggcgcacgccgtcagggcactcgagatcgccgatctcaccggcggcagcacccgggtctcgcactcgcgcgtgcgcacactgctcgacgcggtcgagcgcctggccggcgatgcggacgaagacccggcccggcgccttgcgcgattgcgggccgagcgggctgctctcgacgcgcagatcgccgcgctcgagaaccgcgaggccgacccgatcaccgatgacgagctgctcgaagaagcagagaacgtgctgcatctcgcacgcagcctgccggccgacttcacgcgcgtcgccgagtcgatcaaggcgatgcagcgcgacgtcatccgcgatctccgccgtgacgagcgccccaccggcgaagtcctgcgcgagtacctgctccgcgggcagcaggtcatgcagtccacgcgcgagggccaggcgttcgcgggcgccctgcgcgtgatcggcgaccccgagcgcatcgatgcgctgaccgagcagctgcacgagctgctcgggcgcccgttcgcgcgcatgctcgacgcggcccagcgcagcgagctcgacacgatcggccggcgcatggaactcggggtgcaggaggtcctcacggctcagcggcgcgcgtcgcacgtgatcgccgcccaggtgcgcacgcacgatccggcccgtgaccgtcaggtcgatgagctgctgcgcgatgtcatctcggggctgcaggcctggactcagacgaacacgccggagacccctgtcgagccgctgcgtcgtctcccgatcgcgagtatcgggcacctcaggcagtcgctgagcgatgtgcgtcctcccgagcctcccgcgccgctcgaagaccgcgccggcgacgcggtcttcgtcgacgcagacacgcgcgcgtggggcggtcctcgatacgccgagctcgagacctatgtcgcgggactcggcgaagacttcgacctcggcgacgccttcctcggcgcagacgacgagacccggcgacccgtcgatctgctcggactgctggagatcgcgcaccgcaacgggatgaccgagggcgaggaggtctcggtcgtcgaggccgtgcgccccgacggcaccacgcgccggttcgcgttcggctccgtgaccgcgcgcacgaggaaggacgacgcaatggcccaggccgcgaaggagcaggcggatgactga

SEQ ID NO: 45630 - DNA, 696 bp, Microbacterium hydrocarbonoxydans
atgactgaccacgatctcgcctcggacggaggcttcatcgagcccgtctcgatggaggaggacctcccagagctgttccccggcgacaggggagtcctcgacccggaggtgcgccggaccctcgcgctgatcctgcaccgccgattcctgctcgcggagcgcaaccggcaggagtggcgcacgctcctcgacaatcagaccgtgatcgagtcgcgcctgaacgacctctacatccggctgatcgtcgatcatgagcacggtctcgcctacaagcagcagatccgcgtcgacgagctcgacatcccgattctgctgcgcgacacgccctacacgcgctccgagacgctcgtgctcgtgcatctgcgcaccgtgtacgaacgtgagaacgtggcgggcgagtcggcgcctcgtatcgacatcgaagacgtcgagcagaccgtgctcagctacttcacggatgccgacggagacatctcacgacggcagaaggccgtgcgcgacgcgatgcgcaagctggcgaacgacggcatcatcagcgaggagaccactggccgttaccgcatcgggccactggtcgaggtcgtgctgagcgcccagaagctcaccgagctgcgggactggctgcgcgaatcggcgctcggccgtgaggcggatgccctcacagagcaagacgcacgggaaggcgttctgtcatga

SEQ ID NO: 45631 - DNA, 3345 bp, Microbacterium hydrocarbonoxydans
atgacgatgatcgagacgctgttcgggctcatcccgcagggctcccgcggccagcagtgggtggcggaggacctgcagctcgtgaactggggaggctacgacggcggcccgcaccgagtgaggttctcgcccgccgcgacgctcctgtgcggaggctccggctccggaaagtcgaccctcatggacgcgtacatcgcgctcatgatgccgcacaccacaccattcaacggcgcatccaacggcggggtcaccggacgcccgcgcggcgatgagcagcgcaacgtgctctcctacggacgtggaaagctcgacgagacgcgcaccgaggagggcacgaaggtccaggtgctccgcggcgacggcgaggacacctggaccgcgatctcgatgacctggctcgaccacgacggtgcgcggttcaccgccgtgcgcgcgtggtacatccccgcgggcgcacggatcctggaggacaccgtgcgcgtgcgggcgaccgtgcacgatgccttcgacctcgcctctctcgagcgtgcggccactcagcgcctcaccgacgcgtcggtcagagcagccgggctcgatccggtcggcaccgaccgggagttctcggcgcggctgcacgcggtgctcggcatcggcgccgcgggtgccggatccaacgcgatgagcctgctggcgcggatccaggccggccagcagatcaccacggtcgacgacctgtacaagcgcctcgtgctggaagagcccgagaccatgcgcacggccgacgccgtggtcgtgcacttcgacgagctcgagagcacccgccagcgcatgcttgtcgcccgtcagcaggtcgcagcactcgagcctattcgcgatctccgcgccaagatcgcgaccacggccgagcgcatgcgtctgatcgacgagatcggcgtcttcgcagatccctcctcgctggcgtcgctgtggcgagccgaacggcgcatgacgctgctgcgcgacgtcgaggaggagctgcgcgaccgcaagctcgccctcgacgcgtcgatccgcgagaagcgggtgcaggcggacgcggcggatgccgaacacgacggcctccgtgaccttcttcgcgaaagcggcggcgacaggctggagacagcccagcgcgagctccgaggcgtcgagcgtcgtctcatggaggccgaggacgcgcgggcgcgcctcgatcaggacctgcggatgctgggcgccgaggtcaccacgaaagagcagttcgacgcgctgatcagccgcgcgcgtgccgcgctcgaggattccgacgccaagggtcgcgcacgcgacgcctgggcgcaggcgcgcagcgccagggacgcggcgtcctccgacctcacccgcctcgagcgcgagctcgcggcatcggcgtcgttcacgggcaacatccccgcagacctgtacgagtcccgcgcccgtctcgccgcagccgccggtctcgagccgcacgagctgccgttcgtgggcgagctcatcgaggtgaagaccgagttcgagccctggcgcgaggcgttcaacctcgcgctcggcggttttgcgacgacgctgctgctcgacgtcgcccacctcgacaggttccgcgccgcgatcgacagcgtccgcacatcgcggcgggtgaactaccagggcgtgcacaccgggcttcgtccaggaggcgggggagcggccgacactctgcctggcaggctcgactacagcagcacgcccttcaccggctggctgcagctgcggctcgaggagcgattcggcttcgtctgcgtgaacagcgccgcagaactcgccgtgcacgatcaggctgtgacgatcaccgggcagatctcccgcggcgagcagggcgcgcacggcggtcacggacgggcgaacgtgctcggcttctcgaatcagtcgaggctccgcgagctgcgcgcctcgctcgacaccgcacgccgcgagctcgatcaggctgaggtgcgcctcgatgtcgccgcggccgatctcgacggaatcgacgcccatcgcgccgcgtacgcgaggaccgtcgacgtcacctgggaccggatcgacgtcgcatcgctgcacgcggaacgtgagcgctggctgtcggtcgaatccgatgtggcggagtcgaaccccgacatcgccgctctgcgcgggcagatcgagaaggcgaagaagacagtgacccgcctgcgcgaggagatcgcggcggcgacggtcgagcgcaaccaggtcgagacgacctggggcgacatcatcgacgacgtcgacgcggggcagaagctcatggatgaggccgccgaggcgggacgggtgttcgacgaggcgcaggccgcctacctcgacgaccggttcgccgcgccgaccggcagctcggcgtcggcatccgctctgctgagccgtttcgacggtgcgctgtccaccgcagggcagcggctggccgaggaccacgcgcgtgccgtcgacgcccaccgcgagcagcgcgagagcatgcggcggctcatgcagacgttcctcgagcgctgggacaaccccaacctgctggcagaccccgacctgtacgtcgacgacttcgagagcatcctctcagccctcgagacgagcggcctccacgagctcgagggcgaatggcgcgacagcctgctgaacctctcgggcaacgacctcaccaacctcgactcgacgctggcgagatcgctgcgtgagatccgcgagcgcatcgacccgatcaaccggatcatgcaggacctgccgttctacgacgacgatcaccggctgcagatcacgacgcgcgagagccaatcggaggcccgcaagcggttccgccgggatctgcgcgaggtccgcggtctcatcgagaacgcgtcgacggatgccgagcgcgagaacgcctatcgcaggatgtcgcgcctgatcggtcacctgcggcgatccgccccggacttcagcgacctcgtcgacgtgcgcaaccacgtgcgcgtgagcgcagagcgcgtgacggctgacacgaagcagcacgtggcgctctacgaccacatcggcgagaagtcgggtggcgaatcgcaggagctcatcgcgttcatcgtgggcgccgcgcttcgctatcagctgggggatgccggcgcagagcgtcctcgctatgcgcccgtcttcatggacgaggccctgatcaaggccgacgcgcacttcaccaagcgcgcgatcggcgcctggcgcgggctgggcttccagctcgtgatcggcgctcccaacgacaagtacagtgcgatagagccccacgtcgacgtggagtacgacatcctcaaggacacgcaggggcgctcgtgggcgaagctgaaggtcggtctctga

SEQ ID NO: 45632 - DNA, 1470 bp, Microbacterium azadirachtae
gtgaccggaagcagggcagagggcgcctatctgcgcgctctcgcggcgttcaagacgccgacgctcgacctgctgcacggccggttcgcgcccttcgtcgtcgccgtgctcagccagatgttctccgccgaccggccgacagtggccgtcgccgatgcgcacgtcgaggtcggcgagatgctggatcagctccgcgcggcgggctatgggcgcgacgaccgccggctgcccgccacgaccggtcgtgaggtgtgccggtactggatcaaggtcggctggctcggccagcagatcgagggcgagagcgaggtctaccgcctcaccgcgcacgccgtgcgtgcgctcgagatagccgacctcaccgggggcggcgcgcgcgtctccaactcccgggtgcgcaccctgctcgaggccgtggagcgcctcgcggggaacgcggacgacgacccggcccggcgcctgaggcgcctgcgcgcggagcgggcggcgctcgacgcccagatcacggcgctcgagagcggggcggccgatcctgtgccggaggacgaactgctcgaagaggctgagaacgtgctgcacctctcgcgagggctgccggcggacttcacgcgcgtcgcggagtcgatcaaggcgatgcagcgcgatgtgatccgagacctccgtcgcgacgagcgcccgaccggggaggtgctgcgcgaatatctgctgcgcggccagcaggtcatgcagtcgacgcgcgaggggcaggcattcgcgggcgcgctgcgcctcatcggcgacccggagcggatcgacgagctcacggagcagctgcacgggctcctcgcgcgcccgttcgcgcagctgctggacggcactcagcgcacggagctcgacatgatcgggcgtcggatggagctgggcgtacaggaggtcttgaccgcacagcgccgcgcgtcgcacgtcatcgcgggtcaggtgcgcacgcacgaccccgcgcgcgatcgccaggtcgacgagctgctgcgcgacgtcatcgcggggatgcaggcctggacgcagacgcggacccccgagaccccggtggaaccgctccgccgcctgccggtggcgagcatcggccacctgcgccaatcgctcggcgacatccgcccgcccggatcgccggcggcgctggtcacgcagggtcaggacgccgagttcgtcgacgccgacacgcgggcctggggtggcccgcactacgccgaactcgaggcgcacgtctcaggactcgccgacgagttcgacctcggcgaggcgtttcaggcgatcaccgcggaaagcacccgccgcccggtcgatctgctcggactgctcgagatcgcccaccgcaacgggctggcagaggcggacggggtctcgatcgtggagaccgtgcgccccgacggcaccgcgcgccgattcgcgttcggatccgtgaccgcccatgcgaggaaggaagaggaacgatga

SEQ ID NO: 45633 - DNA, 729 bp, Microbacterium azadirachtae
atgacctccgatgttgcagagacctccgatgccaccgagacctcggggttcatcgagcccgtcgcgatggaggacgacctcgccgagctgttcccgggtgaccgcggggtgctcgatcccgaggtgcggcgcacgctcgcgctgatcctgcaccggcgcttcctgctcgccgaccgcaaccgcaccgagtggcgtgccctcctcgaccaccagacggtgatcgagtcgcgcctcaacgatctgtacatccggctgatcgtcgatcacgcgcacggtctggcgtacaagcagcagatccgcatcgacgaactcgacatcccgatcctcctgcgcgatacgccgtacacccgctccgagacgctcgtgctggtgcacctgcgcaccgtctacgagcgcgagaacgtggcgggcgaggccgcgccgcgcatcgacatcgaggacgtcgagcagaccgtgctcagctacttcaccgacgccgatggcgacatctcgcgccgccagaaggccgtgcgcgatgcgatgcgcaagctctcgaacgacgggatcatcagcgaggagacgaccggccgctatcggatcggtcctctcgtcgaggtcgtgctgagtgcggagaagctcaccgagctgcgcgactggctgcgcgacaccgccgccgaacgacgtgccgccgcaggcggcgtcgcgctcgacgacgccgccgaggaagccctggaggacgccctgtcatga

SEQ ID NO: 45634 - DNA, 3357 bp, Microbacterium azadirachtae
atgaccatggtcgacactctcttcggactgatccccgaagcatcccgcggccagcagtgggtcgcggaggatctgcagctggtgaactggggcggctacgacggaggaccgcaccgcgtgcggttctctcctgccgcgaccctgctgtgcggcggatccggatccggcaagtcgacgctcatggacgcgtatatcgcgctcatgatgccgcacaccacgccattcaacggcgcgtcgaacggcggtgtcaccgggcgcccccgtggcgacgagcagcgcaacgtgctctcctacgggcgcggcaagctcgacgagacgcgcaccgaggagggcacgaaggtgcaggtgctccgcggcgacggcgaggacacctggacagcgatcgcggtgacgtggcgggaccacgacgactcgcgcttcacagccgtgcgcgcctggtacatcccggccggcgcgcgcgtgctcgaggacacggtgcgcgtgcgcgccaccgcgaacaccgcgttcgacctcgcgacactcgagcgtgcggccgcgcagcgcctcaccgacgcctccgtgcgcgccgccgggctggaacccgtgggcacggaccgcgagttctcggcacggctgcactccgtgctgggcatcggagccgcgggatccggcgcgaacgcgatgagcctgctcgcccgcatccaggcgggacagcagatcacgacggtcgacgacctgtacaagcgcctggtgctcgaagagccagagacgatgcgcaccgcggacgccgtggtcgtgcacttcgacgagctcgagagcacgaagcagcgcatgctcgttgcacgccagcaggtcgccgccctcgagccgatccgggacctgcgccagcgcatcgacaccgcggccggccggatgacgctcatcgacgcggtgggcgtgttcgaggatccgacgtccgtcgcctccctctggcgtgccgagcggcgcatggatctgctccgcacggtcgaggatgagctccgcgaccgtacccgcgtgctcgacgtcctcgtccgggagaagcgcgtgcaggccgaggccgcggaggtcgagcacgagggcctgcgggatctgctgcgcgagcgcggcggcgacaggctggagacggcgcagcgggagctgcgcggcgtcgagcggcgtctcgaggacgctcgagtccttcgtgcgaggttcgacgacgacctgcgcgcgctcggcgcggaggtgcacagcagggcggagttcgacaagctcgtcgggcgcgcccgcgcggtgctcggcgacgcggatgccaagggcagcgcgcgcgaggcctgggccgacgcgcgtcgcaccagggacggcctcaagaccgaactcgcgcagcgcgagcgtgcggccgaggaggccacggcgttcgcgggaaacatccccggcgacctgtaccgttcccgcgagatgctcgccgaggcggcggggctcgaaccgcaccagctgcccttcgtgggcgagctcatcgaggtccgcaccgagtacgagccgtggcgcgaggcgttcaacctcgccctcggcggcttcgccacgaccgtgctgctcgacatcgccgacctggaccggttccgcaccgcgatcgacggcatgcgcactccgcgccgcctcacgtaccagggcgtgcacaccggactctccgtgagcggtgggggagcggagaaccggctgccgggacgtctcgagtacgccgacactccgttcgccgggtggctgcaggtgcggctggccgagcggttcggcttcgtctgcgtcaacactgccgcggagctcgccgcgcacgagcaggcgctcacgatcacgggtcaggtctcccgcggagaccagggcgcgcatggcggccacggccgggccaacgtgctcggcttctccaaccgcgcccggctgcgcgagctcgaggccgcggtcgaggagcttcggcccgctctcgagcgtgcggaggaagccgtgacggcggccgagacggcgctggaccgtttcgatgccgagcgcgcggccttcgcgcggatcgtggacgtcgtgtgggaccaggtcgacgtcgatgccctcgtcgccgtgcaggagcgctggcgcggcgtcgagaccgaggtcgcggagaagaacccggacatcgccgggatcgcggcgcagatcgagaaggccaagggcctggcaggacgactccgcgaggagatcggcgcggccacggccgagcgccagcaggtcgagcgacgttggggcgagatcaccgacgacgtcgacgccggtcaggcgctgatcgacgaggcgaccggatccgatcgtgccgtgggcacggagcaggcgcagtacctcgacgaccgcttcgcctcgcccgcatcggccaaggccgcaccctcggtgctgctggagcgcttcgacggtgcgctgcagaccgcgggcaaccggctgaacgaggaccgggcgacggcgttcgaggctcaccacgaacagcgcgagagcatgcgccgtctgatggccggattcctggagcgctgggagaacccgaacctagtcgccgatccggatctgtacgtcgacgacttcgagagcatcctcgcggcgctcgagacgagcggtctgcatcagctcgagagcgagtggcgggacagcctcgtccacctctccgggaacgatctcacgaacctcgactccacgctcggccgggcgctgcgggacatccgggaacggatcgagccgatcaaccggatcatgcaggacctgccgttctacgacgaccaccaccgcctgcagatcacgacccgcgagagccagtccgaggcgcgcaagcgcttccgtcgtgacctgcgcgaggtgcgagggctcatcgagaccgcgtccagcgatcaggaacgcgagcaggcctaccgccggatgtcgcgtctcatcgggcacctgcggcgcaccgcgccggacttcgccgatctcatcgacgtgcgcaaccacgtgcgggtgagtgctgagcgcgtcaccgccgacaccaagcagcacgtcgcgctctacgaccacatcggcgagaagtccggcggcgagtcgcaggagctcatcgcgttcatcgtcggcgccgcgctccgctaccagctgggcgacgccggggccgagcgcccgcgctacgccccggtgttcatggacgaggccctcatcaaggccgatgcgcacttcaccaagcgggcgatcggcgcctggcgcggtctcgggttccagctcgtgatcggcgcccccaacgacaagtacagtgcgatcgaaccgcacgtcgacgtggagtacgacatcctgaaggacacccaggggcgatcctgggcgaaactcaaggtcgcgttgcccgaggctcgctga

SEQ ID NO: 45635 - DNA, 1356 bp, Enterobacter aerogenes
atcccccttgaggaagcgattcagtctcttaccggcattcttgtcgagcacgtgagtcaggaacagtatgacattaatcaggacaatccgtctcttcaggccagccgtgaactgcgggaatggattaaacgccgtttaattgtcgaacgggatggccgtgtctttgctaccgatgcgcttgaggtcgcgattacgtttgttgagtcgctggataatcgtttcatgacctctacggcttcccgtttgtccaccgtacagcgagaaattgaaaacctggaaacccggcttaatcctaatccggcaaaccgggttacaaccttacgtcgtcgtattgccgaactagaacgtgaattacaggaagccgaagctgggcatattgaggtgctggaaacgcatcaggcggttgaacatattcgagaggtcttcaacttagcttccagcctgagggctgactttcgtcgtgttgaagactcctggcgcgaggccgaccgtgcgcttcggcaatccattattggtgagcaatatcatcgcggcgatatcgtagaacgcctgctcaacgatcaggacgcgctgcttaatactcccgagggaagagttttcgacagttttcagcagcaactccgtcaatcctctgaacttaaggcgatgagtgaaaggctacgtgtgatccttagccatccgtctgcttccgatgcgcttaaccgtctacagcgtcacgatttgcgctggctggttaaacgcctggtagatgaatcgcaaaccgtactccaggctcgcgcccgaagcgagcgcgatgtccgcggttttatgaaaaccggtcttgctgctgagcaccaccgcgttggtcacctgcttaacgaatttctaaaccaggcgttaaaactcgactggcagcgccagattgttcgcaaacaagaggttccgcttcctgctgttggtgtggcggtaacaggcgtccccgcgattgaacgtttacgttttaaagaggtggatgatgaagcggaacaaacgttggatctcagtaatcatgcggcggatttaacgcagattggcgatgatttctgggatgctttcaatggcctcgatcgtgaggcgctgattcagcagacgttgcaggttctggcaaatgaaaatcgccccgttagtctggctgaactggcggcgctgttgcccccggctcacgatcttgaaaccttcgccatatggattggcatggcgagagaagcgggcattgcggttattgattcacagcgcgaatttgctgagcttagtgatggggaaggtcgccgctggcgatttaatctgcccactaccgctctggaaagccaggcattaatggatatcgattgggagtaa

SEQ ID NO: 45636 - DNA, 627 bp, Enterobacter aerogenes
atgcgaacgctgaaaaaaatacgcgaagcggctcaggaattgctcaaatacggcctgctggaagaggccagtaaacccaatctgtaccgcgttgtactggcccatccagaagaggttactcgcattctggaacctctcgatctggatatcggcattgatgagatccgcggtttgctgtatgtcaaagtcaggcttgatgaaacgccagagcaggatgaatggtcccaccctctggtgagacggcaacggcttaacctggaacaatcattattagttgccatactgcgccagcattttgttgcctgggagcaggaaagtggaacaggcgccagccaggcgcagatcgctatcgacgatctcctccctcagctccagatttaccttggcgatccggggagtgaatcaaaagaacgcacccggttgcttaccctattggatcaattaaagggccatgggctggtcacgtcgccggatgcgcatgagcggatcgtgattcgcccgattattgctcatcttgccgatccgatgaatcttcaggcattactggcatggctacaggaccaagttgctcaacaaacctcccctgctgattcgtcagaaaaggagagtagtggggaggaagtatga

SEQ ID NO: 45637 - DNA, 2922 bp, Enterobacter aerogenes
ctgggagctctgctgtggtttgattccaccagctccagcgtgacggatatgaaaaggctttggcttttcagcgataaccccgagcagacgctggagcactggttgaacgtttaccatgacggcggcacacgattgctgcggcaaatggaaaaagaagtgaccgggatctggacatacccgaataaaaaacagtatctggcgcgcctgcgggattttttcgaagtgggggaaaacgcgtttacattgctaaatcgggcggcagggttaaaacagctaaacagcattgatgagatttttcgtgagctggtgttggacgatcactccgccttcgatcgcgcgacggaagtggccgatagttttgatggtctgacagaaatccatcaggaactggaaacggcgcgcaaacagcagcagtcattgcaacctgttgccctgagttgggataagtaccagaagcaagagcgacaacttgctgaaaggaaagcgctggaatcgctattgcccatctggtttgcacaacaggcaagccagctctggagggaaaaggtcagccatcttgaaatcgagtttggtgaggcacagattcgcgaagaacagatccagtcgcagcttgagttgcaaaaaaaggttgtggctgactgcatgcagcactactaccaggctggcggcgccaatattgatgaactgaacgagcgcatcaatgactggcaaaaaacgctcggtagacgagaagcgctggcgcgccagtatcaacagctgatccataatctggggttgccgcttgacctgagtcagcaacagctagaggcgaatcagcatgaagccgaagcccgctgtgtgcagcttgctgatgatataaagctgaagcaggaagaggcttatcaaaaaggcgcgctaagccataacattactgtagaactgcgcgaacgggaaactgaacgcgccgagatcgcacgtcgtccggattctaaccttcccgcccattatcaggcatttcgcagcgaactggcgaaagcgttgaacgttggtgagtctgaactgcctttcgtcgctgaactgatacaggttaaaccggaagaggcgcaatggcgcggagcgattgagcgcgctgtcgggagtaacaggctgcgtattctggttgcgcctgaatctgcacaggaagcgctacgctgggtaaaccagcgcaacaatcgtctgcacgtgcgcctattggaggtcaagttaccgcactctcccgcccggttttttgatgatggttttacccgcaagctgttgtggaaagatcatccgtggcgagaggccgtcaaagcattactggccgaaagcgacaggcattgtgttgacagccctgaactgttgcgtgacacacctcacgctatgacggtgcaggggctaatgtctggtaaacagcgtttttatgacaaacaggatcagaaacgccttgatgaagactggctgacgggattcgataaccgcgatcgtctgaactttcttgccagagaagttgccgcgcttcaggagcagactaaaaccgcaaacgcggcatttgaggttgcgaaaggcgaggtggcgcttttgcaaaatcaggccatttcattccagaaaatacaacagattgattacgatagcattgatgttcccggcgcaaagagccaactggaagcgctcaaggagcggctggagaatctgatccatcctgattccgatgccagcgtggcgaaagcaaaacttgatgaggctcaaacggttgagtctgaatttgataagcagctcagggccgccaataaagtcactaacgggctggatacagagctcacctccgccagggccgcagaacgtaaggcccagcaaaccgcgcaacaaggtatgcaggatgaagagcgagagttgtgtaccttacattttccggcggtgactctggagcaactgcctgacattcgcgatctggaacgtcaccatgagcggggaattcagcaagaaattgagggtgttaaaggtgaactgcatcggctgagtattgagttgaccaaacgtatgtctgaagccaaacgtgtggataccggggcgctcgttgaggcaggggctgatttggacgatatttctgtttatttacagcgtttgcaggagctgaccgaagaagccctgccggaaaagctcaaccgctttcttgactatctgaaccgttcatctgacgacggcgtaacgcaattgctcagtcatattgaacatgaggtgttagtcattgaagagcgtctcaatgagctcaatgaaaccatgtttcgggtagattttcagccggatcgttacctgcgtctggatacgaaaaaagttgtccatgaaagcctgcgtacgcttgaaaaagcacagcgtcagctaaataccgcccggtttgttgatgataacggtgagagccattataaggccttacaggtgctggtggcgcaactgcgggatgcctgtgaacgaaaccgcaccctgggggcgaaggcgttgctggatccccgttttcgtctggagttcgccgtatcggtgatggatcgtcagagcggaaatgtgattgagtcgcgtactggctcgcagggcggtagcggtggagaaaaagagattattgcgtcttacgtgctgaccgcatcactgagctacgcgctatgtcctgcagggagtcgttatccgcttttcggcaccattgtccttgatgaagccttctcccgcagctctcatgccgtggcgggcaggattattgccgcgcttagagaattcggcttacatgccgtatttatcacccccaataaggaaatgcgcctgctgcgtgaccatacccgttcggcgattgtcgtccaccggcgcggtcaggattcaaatatggcttcgctgagctgggaagagcttgaacaacacttccgacgacgggagaacgcgtaa

SEQ ID NO: 45638 - DNA, 1158 bp, Enterobacter aerogenes
atgtattctcctgatgaactgcgtgaaaagcttgcccggcagtgggataacgcaaagctccgggccgagcgtttacttccacccggtaactggccgctttgtctgaccattggcaaaccttccgcgaaaatattcgcagagcagcctcagcgcgttttacaacacgtgcagttatggcggcaagtcgcggttgggcgtgtggactggggagaggtcagttatcgggcgagcgacggaccggtctcaatgccgctgcgctggatcctgaatggcccttctgactggatcagcgccgcggcggatcaggcggtgagccgggagtttcgcttgctggagggaattattgagcaggttgaccctatttttcatccgctgttggtcagtcatcgttcactctggcggcacaaaagcccacaggacatcatcagcgccgccaggctggcttgccgattagagcccggttgcgcaaaagggctgccgttaaggctgctttccgggcaaggggtggataccaaatttattgagaataatatttcattattaacccgactgctggacgtgcgtttttccggcgaagccagcgagcagggattaactacctttcttgatgcttttgatgagtctagccactgggttttggttgtgccattatcgcccggattgctcccttttaaaaaatgccgggtgacaacggcggaactggcggaaacgacattgcccgcgtcgcgtgtgctggtgattgaaaatgaacagtgtcttcatcaacttccagcgttatctgacactatcgcgatcttagggtgtggccttgacgtgcaatggttatccagctctgttctggatgaaaaacgcgttgcctattggggggacatggatagctgggggctactgatgctggcgagagccaggcgctgttgcccgacgcttgatgttctgcttatgaaccgtgagttgtttgagcaatatgccagccatagcgccgttcctgaaccggtaaaagcgcagcaagcaatacctgatggcttgcttaatgaagaggccgatttttatcgttacttgacccgctcgccgcgtggtcgtctggagcaggaatttttgcctgcggggatagttgaagaggcattgctcagatgggcaaaatctgaggttcacatataa

SEQ ID NO: 45639 - DNA, 1413 bp, Mycobacterium neoaurum; identical to SEQ ID NO: 43377

SEQ ID NO: 45640 - DNA, 672 bp, Mycobacterium neoaurum; identical to SEQ ID NO: 43378

SEQ ID NO: 45641 - DNA, 3372 bp, Mycobacterium neoaurum; identical to SEQ ID NO: 43379

SEQ ID NO: 45642 - DNA, 1008 bp, Burkholderia pseudomallei 406e; identical to SEQ ID NO: 44263

SEQ ID NO: 45643 - DNA, 672 bp, Burkholderia pseudomallei 406e; identical to SEQ ID NO: 42091

SEQ ID NO: 45644 - DNA, 3633 bp, Burkholderia pseudomallei 406e; identical to SEQ ID NO: 42092

SEQ ID NO: 45645 - DNA, 1134 bp, Burkholderia pseudomallei 406e; identical to SEQ ID NO: 44028

SEQ ID NO: 45646 - DNA, 1008 bp, Burkholderia pseudomallei MSHR840
atgcgcgggtgccgcaatgcgctcgaggctgcgttgtccgaacgaggcgacgcacatgacttggtggatgcctacgaatacgccgagaaggttatcgaggacctcgcggacggcatcgattactttcaagaactggtccggcacttgatgcaagccgcgtctgctcatacgcaatggaacgaattcgttgactttctcgacagattccagcgggactactccaagcaacttacagcggataacgcgacgctgaaccgccaagccattcggcaaaagcttgagaaactccgggccgttccggaggcgaagttcaatcgaatggatgcgcagttgcgcgatatcgcgcactggatggcgaaggagtacaccggaagctcgctctatgattggctgctcggtcgtattgaagacatcgtagacgcggcgtgcgagtctaagcagccgggctttctcaaggccatggagacttatctgaagcgtgtgaacggcctcgctttgcagtcgatgatgctacgctcggggcagactcggcatgcctacttagcagccgttcagaaagtggccgagtctcccaagttggaacaggaccgcttgctgaagcttgttggccagttcctcgcaccagcggaggtgcgcgtcctagacccagctagcttcaagctgaagactgcaacgcagcgccgcagagcagtaaccgtgtctattcgaccgcgcccgacaagggaagagcggctcgctgcggcgatggcgcgagcagaggccgaagtgttctcaataccgaacgaggatgtcgcgcaggggctgcgtgcggacctgcgactcttccaacatccaatccgcgtttccgcaatgcctacggcaagtgcccgcgacgtcattcgcgcaatgcaagcggtggaagccgcgcgaagcgccatcggcggggacctcatcgtcaagaagctgccgacccgtttggagaatgagttctacggggccaacgactacgaaatcgacctgaaaaaatga

SEQ ID NO: 45647 - DNA, 672 bp, Burkholderia pseudomallei MSHR840
atgagcctatccaatctaattgacgaacagctcgccatcgcgaatgtcaagcgcgagcggttccgggaaatcttggtgcgcctgatggcctacggggtcatcgtgcgcgacgaagacaaaaccgaacaacttctgtatgacgatgctcggcgcgttgagagtctgttggatgagtacctcgatttcgcgggcttccgccttcatcacgaccgcgacaaccggttctacaggctgtacgccgccggcgcggtcgtagacggcttgccgccggacgtttacgaacctgccccatctttacgcgcgcgcgtgtcccccgatttcgttgcgctggcgcttacgttgcgtttcctctatcagaacaagttgaatgccggcgacatccagcctcagggtgaggcgcttgttaatttcgaggaaatcgccgcgacgatgcaaacgcaattgaagcgagcgcttccatccagcatgggcgacaagatggctctgctggccgagcttaggcgtcataggctgctccggtatgccccagaattttctatctcggatgaggacgcactacttgcgattcgcccgaccatcctgggtgttgtctcaaacgatgcactgaccgctgcgctcgatgcagacggcatgcttgaacaacagaccaccgttgaggagaaggacgcatga

SEQ ID NO: 45648 - DNA, 3633 bp, Burkholderia pseudomallei MSHR840; identical to SEQ ID NO: 44971

SEQ ID NO: 45649 - DNA, 1134 bp, Burkholderia pseudomallei MSHR840; identical to SEQ ID NO: 44350

SEQ ID NO: 45650 - DNA, 1455 bp, Burkholderia sp. 2002721687
ttgcccctcgactactcaaccctcgacacccttcgcacgcaccatccagcatggcggctcttacgttccgaccatgccccgctggtggcgagcttcctgcatcgcgttttcgtggttccgaacgtgcgcgtgatgtccgccgctgacctcgccgaagtgctcgaagacgaactttacgcattgcgtgatcgactgggcacggacgcctatccaaaacgcgcgctcgactacctcaacgactgggcaagcccggaaaaaggctggctgcgcaagttttaccgccaaggctcggacgaaccccacttcgaccttacgccagcgacggaaaaagcgatcgtatggctggacgcgctaacggaacgcagcttcgtcggcacggaatcgcgcctgttgacgttgttcgagttgctgcggcagatgagcgaaggcagcgaatccgatccgcaaaagcgcatggtcgaattatataggcgtcgagacgagatcgatgccgagatcgcgcgagtgaattccggggaccttccactattggacgacacggccctcaaagatcgcttccagcaattcatgcagttggcgcgcgacctgctgaccgattttcgcgaggtggagcagaacttccgcatgctcgaccgtcgcgtgcgcgagcgcattgcgctatgggagggttcgaagggcgcgctactggaggagatcatgggcgagcgcgacgcgatcggtgactcggaccagggcaaaagtttccgcgcattctgggatttcctgatgtccagcactcgccaggaagagcttaccgaacgactcacgcgagtgctcgcattgcccgtggtagccaacctgaagcccgacgcccggaccgctcgtgtgcattacgactggctggaagcgggcgaacacacgcagcgcacggtcgcgcagttgtcgcagcaactgcgccggttcctcgatgaccaggcatggctggagaaccgccgcatcatggacattctgcgcggcatcgaggccagggcgctggcggtacgcgacacgccaccggtcggcgagataatgaatcttgccgagtcgtcatccgacgtcgagcttccgatggaacgtccgctgcatacgcccgtgcagaagccggttatcacggatgtcgcgctggaaatgggcgacgtcgatctggacgatacggcgctgtattcgcaagtggtggttgaccgtgcgcagctcgcgggtcatatccgccaggccttgcaggatcggtcgcaagtgacgctgcgcgagctgatcgaatcgtacccgctgcagcaggggcttgcagaactggtcgcgtatctgcaactgggcagcgccgcgttcaagacggtcgtggacgaagacacgcacgaagtcatcgcgtggcaaacaaccggtcgcgacgagacgccgaaggcacgacgcgcccggctgccacgcgtgatcttcgtgaggtga

SEQ ID NO: 45651 - DNA, 624 bp, Burkholderia sp. 2002721687
gtggcggggaacgccgatctgtcgacactggcgatcacgctgctcaaaggcgtgatctatcgtgagggtgatgaacgtctgtggggcgcgttgctcgacctgcaggcgcgtgtgcgggactacgtgtcggtactgggcctggaactggtgctggacgaggccgaaggctacgcgtttctgcgcagtcgtcccgagccggctgaagacggcgcggcgccaaagctgccgcgtttgattgcacgccggccggtctcgtttccggtcagcctgctgctggcattgctgcgcaagaagcttgccgaattcgatgccggcggcggcgatacgcgcctggtgctgtcgcgcgacgacatcgtcgagctcgtcagggtcttccttccggacagcagcaatgaagcgaagctgatcgatcagatcgaaacacacatcaacaagatcgttgagctgggcttcctgcgccggttgaaggttgcgagcggctcggccgccagtttcgaagtgcggcgcatcctgaaggcgttcgtcgacgcgcaatggctgtcggacttcgacacccgcctcgccgcgtaccaggcgcaactgacgggcacgacggcagggccgggaggtgatgtcgatgaatga

SEQ ID NO: 45652 - DNA, 3378 bp, Burkholderia sp. 2002721687
atgaatgagccgaacgaggcgattccacaactgctggagctggattttctcgccgacgacacgctctcaggctttcgcctgacccgcctggaagttttcaactggggcacattcgacgggcgcgtatggacgctgcagttggacggcaagaacggtctgctgacgggcgacatcggttcgggcaagtcgacgctggtcgacgcgattacgacgctaatggttccctcccagcgtatcgcctacaacaaggcggcaggcgcggacagcaaggaacggacgctgcgctcgtacgtactcgggcattacaagtccgagcgcaacgaggtgaccggtgcagccaggccggtttccctgcgggaccgcaacagctactcggtgatcctcggcgtgttccacaacgctgggtatgaccagacgatctcgctggcgcaggtcttctggatgaaagaggcgcagagccaacccgagcgtttttatgtgggtaccgagcggaatttgtcgatagcgacggactttgtccacttcggctccgatatcgcgcaattgcgcaaaaagctgcgcggcctgggtgcgcaaatcgaagacacctttcccaaatatggcgcgtggtttcgccggcgcttcggcatcgacaatgagcaggcgctcgagctgttccatcagacggtgtcgatgaagtcggtcggtaacctgaccgacttcgtgcgtagccacatgctcgagccgttcgacgtcgcgcctcgtattgccgcgctgatctcgcacttcgacgatctgaatcgcgcgcacgaagcagtgctcaaggcgaagcgccaggtggagctgctcaagcccctggtggtggactgcgaccagcacggcgcgctggcggtggaactggaggcttcgcgcgtatgccgtgatgcgctgaagccatacttcgccgaattgaagctgggcctgctggatcgacggttgcagttgcttgcggaagatcatgcacgcctttctacgcagagggagcggcgcatcgagcagtgcgaccaggatcgaacgcaggccgatcgcctgaagcgtgcgattgccgagcagggcggtgaccggctggagcagcttgctgtcgcgattcgcgacgaggagcgcgagcgcaatcgacgccagcagcgcgccgaacgtcacgcgcaattgcttgctgcgatcggtgaggccgctgttgccaacgagcctgatttcatcgcgcagcggcagcaggtgaccgatctgcgcgagagcgtgagtcagcgggaagccgatctgcagaaccagatcaccgagtggggcgtgtcgctgcgcgagggcaagcgcgaacatgacgtgcttggcgacgaagtcgcgagcctgaaggcgcggcgcagcaatattcccaaggagcaggtcgccatgcgtgcggcgttgtgcgcggcactcggtttcgacgaagacagcatgccgttcgccggcgaactgatccaggtgcgtgaagaggcgcgcgaatgggaaggcgtgatcgagcgggtgctgcataactttggcctctcgcttctcgtgcccgatgcgcactattccgatgtcgccgcctgggtggatcgcacgcatctcgcgggacggctcgtctatttccgcgtgcgagccgcgcgcgaccaggacatcgccgagctgcatcgcgattcgctggtgcgtaacgtcgcgatcaaaccggattcgccgttttacggctggcttgagcgggcgctggcacagcgcttcgattacgcgtgctgcgcgacgcaggagcagtttcgtcgcgagtctcgtgcgctgactcgcacaggtcaggtcaaggcgcccggcgaacgccacgagaaagacgaccgccatcgtctcgaagaccgcagccgttacgtcctcggctggagtaacgacgccaagatcgccgcgctggaagggcaactgcgtgcgctcgagatgcgccttggcggcatcgctagccagatcgccgaagcgcagggcgatcagacgacgctgcggcggcaactggaggtgttggcggcgctcaatgagttcaacgatttccgtgaactggattggcagagctgctcggccacgatcgctcgcctgcgggatgagaaagcgcgtctggaggcggcctgcaatgcgttgctggaactggccgcgcagctcgagtcggtgcaggcggcgctgaaggagagcgagagggcattgtcggatgtcaaccgggagttaggcgggatcgacgcgagacgcgaagcggccgaagcattgcgggagcaaaccgcggcatggctggccgggatcgcccccgatacccgcgagcggctagacgtgctgcgcgcgcagattctgggcgagcatcagctttcggtcgagtcatgcgacaaccgtgaacgcgagctgcgtgacgcgttgcaggcacatatggacgccgaggccaagcgcctggatcgcctcaccgagcgcatcatcaagagcatgtcgacgttcaaggaaacatacaagctcgatacggccgacttcgacgccagcctcgaagccacgttcgagtatcgcgagctgctggctcgcctgaataccgacgatcttccgcgcttcgaggctcgcttcaaggagctattgaacatcaacacgatcaacgagattgccaacttcaacgggcaactcgcgcgggaacgcgaaacgatcaaggagcgcatcgcccgcatcaatgaatcgctggctcaaatcgactacgacccaggtcgttatatcgtgctggagtctcaggcgagccccgacgcagacatccgcgatttccaggcggagctgcgagcttgcacggaagggacgctgaccggttcggacgacacgcagtattccgaagccaaatttctgcaggtcaaggcgattatcgaccggtttcgcggccgcgaaggcctgtcggatcaggaccgccgatggacggcgaaggtcaccgacgtgcgcaactggttcctgtttgccgctagcgagcgctggcgcgaagatgatacggagtacgagcactattcggattcgggcggtaagtcgggcgggcagaaggaaaagctggcctacacgattctcgcggccagcctcgcgtatcaatttggtctggaatggggcgcggtacggtcacgctcgttccgcttcgtggtcatcgacgaagcgttcggacgcggctcggacgaatccgcgcaatacggactcaagttgttcaggcagctcaatctgcaactgctgatcgttacgccgctgcagaagatccatatcatcgagccgtttgtttccagcgtcggtttcgtgcacaacgatgaggggcgtgcttcgaagctgcgcaatctgacgatcgaggagcatctcgcgcgcaaggcggagggctcgacgtga

SEQ ID NO: 45653 - DNA, 1248 bp, Burkholderia sp. 2002721687
gtgagctggacaaccgccggtgacctgaaagcgcaggtgcgccgcttgtgggagcgaggtgagctgttgcgcagcatggttagcgacgacgccgacgcggtgccgaataccgtgcttgccgctcgcggcgaactgaaggctggcctgcgctccggctgcgcgtttccgctgcgactcgtcctgaagggaccggcttcggccgaactcaccgaacgtttccaggctgtgcgtgaatggattgctgagcttgtcactgtcgcgcagatccggatcgaatggcgcgagttcaatcatcgcgtccttggtgttcagcgagtgccgcaggcagtctggattgatgatcttgacagtgcgctggcgatgatcggcaagcgtggcgatgcggcacacttcggccgcttgctcaccctcgtgggctcgcggcagccggcgctgctggtatggtttcgccggcgtccgctgcaggcgcttgagctggctgacgaatgtgaacgtttactggcagtggtcggttggatcgtacggcatccacgtcccggcatttacctgagacaagtggacattgccgatgtacacagcaagttcatcgaaaagtggcgcggtgtgttgtcggaatggctcgatctcgtacttcccttggaggccgtcgcggtagaaagaaacggcggtgcgcatttcgcggcccgctacggcttcctcgaaaagcctgaccgtatccggtttcgcgtgctcgacgcgcaattgcccatgttgcccggtcctgcgcttcccgatatcacagtcgatgcagacagctttgccgcgctggccgtgccgatccgccgggttttcatcactgagaacgagacgaacttcctcgcgttcccgcctctagccgatgcgatcgttgtcttcggtgcaggctatggatgggacgcgctgtcgaaagcggcatggctttcccgctgcagcatccactactggggagatatcgacacgcatggcttcgccatcctcgaccagttgcgcagccgctttgaccacgtcaagtctttcctgatggaccgggcgacgctgatcgcccacgaagctcaatggggcaaggaacatgatcaggtgctccgcgacttgccgcggctcgacgatggggagcaagcgctgttcaacgacctgcgcgataaccggattcgtaaaaatttgcggctcgagcaagagcgtatcggctttcagtgggttgaaaccgcgctcgccacgactgcaagacagtga

SEQ ID NO: 45654 - DNA, 1512 bp, Gordonia sihwensis; identical to SEQ ID NO: 43472

SEQ ID NO: 45655 - DNA, 600 bp, Gordonia sihwensis; identical to SEQ ID NO: 43473

SEQ ID NO: 45656 - DNA, 3405 bp, Gordonia sihwensis
atgaccggactgttcgcgcccaccgaactcgagaacgccgattcggcacggtcgggattccggctccagcgcttccaggtgctcaactggggcaccttcgaccagcgtgtgtggacgctggtgctcgacggccagaacggattgctcaccggcgacatcgggtccggcaagtcgacgctggtcgacgccctggccacgctgctcctgccggcccaccgggtggcctacaacaaggccgcgggcggcgagtcgcgcgagcgcgacctgcgctcatacgttctgggctactacaagtccgagcgcaacgaggtgaccggcgcgtcgcgtccggtggcactgcgcgggatgtcgaactattcggtgatcctcggcgtcttccacaacgaaggccacgacgaaacggtcacgctggcgcaggtgttctcgatgcggcacgacagcggccagcccgagcggttcttcaccgtcaccgaccgcgccctggacatcgccaccgacttcgccgacttcggctccgacctgcgcgccctccgcaagcgcctcaaagacggcgacacccgcatccacgagcacttcccggagtacgggcgcgattaccggcgggcgctcgccatccgctccgagcaggccatggaactgttccatcagaccgtgtcgatgaaggcggtcggcaacctcaacgacttcgtccgcgaccacatgctcgagccgttcgactccagcggatgggtcgacacgatggtctcgcatttcgaggacctgaccgccgcccacgacgcggtggtcctggcacgcactcagctcgaggaactcggaccgctgctcgccgacgacgaccgctaccgccgtcacgtcgagatggccgccgagctcaaggcccggcgcggcgccctgcgccactacttcgcccagcagcgccacgaccttctcgccggtgaactggagaaccacaaccgtgacctcgcggccacccgcgcggcgctcgaagcggtcgaccgtgatctggccgacctgcggatcggcctgcgggagctggagctgcgccaggcgggtctcggcggcaccgacatcgcggcgctcgaacagcagatcgtcgacgctgcgcgccaacgcgaggaacgcgccgcggcacacgagcggtacacccggatgatcgaggacgccgggctggcgccggtctccgaccgcggacagttcgaacagcgccgcaccgaggtcgcggacgccgtcgaggcgctggacgccgaggccgcggaggtcgacaacgcgctcaacgaggtccggtacagccgcaggcagttggacggcgaggggcggcgcgtcgccggcgagatcgccagcctgcgcgggcggaccagcaatatccccgaacgcaatctgcggatccgcgagctgatctgccagggcgtcggccttccgcacgacgagctgccgttcgtcggcgaactcatcggcgtccgcgcggacgagagccgctgggagggcgccgccgaacgggtgctgcgcggcttcggcctgtccctgctggtcgccgccgacctgtacgacgaggtctcggcatggatcgacgcgaatcatctgggcgggcgcgtcgtctacttcaaggtgtccgatcacgtctcgtcgaagggtgcgccgacgccgccgccgaccgcgctcgcacacaagatcgacatcaaggagggacgcttcgagacctggctggaacgccggctgttcgagcgggcccggcatgtgtgcgccgagacgctcgaggagttccgcgccgcggactacgcggtgacggtcaacgggcaggtccgctccggcggcgggcggcacgagaaggacgattcccagcgggtcgacgaccgtcggaacttcgtcctcggctggagcaacgagcagaagatcaccgcgctcttcaccgccggccagcgggtgcaggacgacctcaaccgggtcgatcaggagatcgccgatctcgaggatcggcggcgagccctgatggaccgccgcaatgcgctcaccggtttggacgcctacccgagcttcgatgtcatcgactggatgagttcggcggcccggatcgccgaaatcaccgagcgcaagaccgagctcgagcattcctcgaccgaactcgcggaagtcaccgacgccgtcgccgccacgcgcgaacagctgtcggccgccgacgcgactcgagacggattgcgcgacaaggtctcccgcctggagatggcgcgcgatcaaggagagaaggcgcgcaatgcggcgcaggcggtgctcgccgaaccggagttcgccgaggccgaagcctacttcgaagcgatcgccgaggcggtccaggcctaccgagccaaggtcgacggcggtgccgaccaagtgctcaccgtcgccgaatgcgcagagttggaggcgtcgctgaccgagaagctcacggacgaatccgagcagcacacgagccgtgcgggaacgtacgagacgcgtgtggtgaaccggatgtcggagttcaaccgcaaccatccggttctcaccacggagttcgacgcggacatcgcatcggccgacgagtaccgcgagttgcatcgtcggctggcggaggacgatctcccccgcttcgaatcggagttcaagaactatctgaacaccaatgcgatccgcgacatcgcgatcttcgccgccaagctcaacaaagaagtccaccagatccactcgaagatcgacacgatcaacgagtcgctggccgggatcgagtacaacccgggacgctacatccggctcgacgtgaatccgacggccgcgcaagacattcgggagttccgcgccgatctgcgcaagtgcagtgacggttccttcgattccggcggcgacgatcagtacgccgaggagaagttcctcctcgtcaaggctctggtggagcgcttccgcggccgcgagggtttcaccgacctcgatcgcaagtggaccgagcaggtcacggacgtgcgcaactgggtcaccttcgcggcgtcggagcgatacctcgacggcgacggggagtacgagaactacaccgactccgacggcaagtccggcggccagaaggagaagctcgcgtacacgatcctggccgcatcgctcgcctatcagttcgacctcaagtggggagccacccgctcgcgcgatttccgtttcgtggtgatcgacgaggccttcggccggggctcggacgattcggcccgttacgcgctgtcgctgttcgcgcgcctcggcctgcagttgctgatcgtcacgccgctgacgaagatctacacgatcgaacccttcgtctccgcggtcggatacgtggagaaccgcggcggcagctactcacagctccagtgcctcaccatcgagcagtaccgcgagaagcgtgcggtgcgggagttggtgcacgaggcctga

SEQ ID NO: 45657 - DNA, 1524 bp, Nocardioides luteus
atgagtgacactcgcgtcgaggcggcgtacgccggggctctggccgccttcaagaacccgatgctcgaccttctgcacggccggttcgcgccgttcgtggtggcggtgctctcggtgaccttcacctccgagcgggcctcggtcccggtggtggacgcgcacgccgagatcggcgacatgctggaccggctccgagcaaccggccacgccgagggcgagggtggcgaggtgatgctcccggtcggcacggcccgcgagctgtgccgccagtgggtgcgcgccggctggctgctgcgccagatcgagggcgaggacgaggtctaccggctctccgcgcacgcggtgggagccctggagatcgccgggagggccagcgggtcgcgggcgcgggtctccgagtcgcgcgtgcggacgctgctggaggcggtcgagcggctcgctcaggacgccgaccctgatgtgctcacccgggtggcccggctgaccgaggagatcgccgagcggcgcgccgagatcgcccgcctggaccgcaccggggtcgtcgacaccgtcgaggacgacaccctgctcgagcaggccgagaacatcctccacctgacccgcgagctcccggccgacttcgcgcgcgtggtcgagtcgatccgggcgatgcagcgcgacgtggtgaccgacctgcgccaggacgtacgcccggccggcgaggtcctgcgcgaatacctgcagcgcggcaaggacgtgatggcctccacgccggagggcaaggcgttcgccggtgcgctgcggatgatcggcgacccccgtcgcctcgacgacctggcggccaacctgcgcacggtgctgcgccaccggttcaccacggcgatggggccggccgagcgggccgagctcgcggccgtcgggaggcggatcgagaccggcgtcgccgaggtcctcgccgcccagcagaccgcgtcccacgtgatcaccacccaggtgcgtacgcacgacccggcgcgcgaccggcaggtcgacgacctgctgcgcgatgtcatggtcggcttccaggcgtggatgccgacctcgcggcccgccgaggccgtcgagccgctgcgccggctgcctctcgccgacctgggccacctgcgtcagtcggtcagcgagctgcggccgcccgagccaccggcaccgctggcggactggggcgacgtggagagcgcggtcgaggacaccaaggcctggggcggacccggctaccgggcgatcgaggcccatctggacgcctatctcgccgctcacgcgggtgaggggccggtcgacgtggccgaggtcttcgcggcagcgccggaggagatccggcggccggtcgacctgctcggcctgctcgagatcgctcaccgccgcggcatggccgagacgggtgagatctcgaccatcgaggcggtccgtgcggacggggtgcgccgcaggttcgcgttcggcggggtgaggatgacggatggcgatgcaactggcgaaggaactggcgaaggggccgacgttgactga

SEQ ID NO: 45658 - DNA, 741 bp, Nocardioides luteus
ttgactgagaccgagaccgaggcggtcgcctacgggagcgagccggagggcttcatcgagccggtctcgatggaggacgacccgaccgagctcttcgtcggcgaccgcggggtcctggacgccgacgtacgccgggtgctggtccagctgctgcgccggcggttcatcaccgctgagcggagcccgcgccagtggcgtacgttgctcgaccatcaggccgtcatcgagtcgcggctccatgacctgttcgtccggctcgtggtcgaccacgaccgcgggatcgcctacaagcgacaggtgcgctcggaggagctggacgtgcccgtgctcctcaaggacgacgcctactcccgggccgagacgctcgtgctggtgcacctgcgcaccgtcttccagcgcgagcgcggcgccggggagagctcggcacgcgtggacgccgacgagctggagcagaccgtgctcacctacttcgacgtcgccagcggcgacgccgcgccgcgccgcgagatccgccgggcggtcgagcggctcgcccgcgaaggcctgatcgaggaggagtccgaggatcgttaccggatcacgcccctggtcgagatcgtgctgagcgtcgagaagctgaccgagctcaaggcgtggctgaaggacccgaccggtacgtccggggtcgaggtcatcggcgacgacgcggatgatccggatggtccggagagcgacgacgaggcggaggagaccgagcggtga

SEQ ID NO: 45659 - DNA, 1168 bp, Nocardioides luteus
gtgaacatgatcgacagcctcttcggcctcatcccggcccgctcgaccggccggcagtgggtcgcgagcgagctgcagctggtcaactggggcggctacgacggcgcccaccggattcgcttctcgccgagcgcgacactgctcaccggaggctccgggtcgggcaagtcgacgctgatggacgcctacatcgcgctgatcatgccgcacacgacgcccttcaacggcgcctccaacggcggcgtggtgggccggccacgcggccaggaccagcgcaacatcctctcctacgcccgcggcaagatcgacgaggcgaagaccgccgagggcaccaagatccgggtgctgcgcggcgacggccgcgacacctggtcggcgatcgcgatgacctgggccgaccagaccggcgcccgcttcaccgcggtccgggcctggtacgtccccgcgtccgccaagaacctcgacgacgtgaccaagcttcgtgccgtggccgaggcgggcttcgacgtacgcgacctggagccggtcgccgcccaccggttcacccgcaccgcggtctccgagatcgggctgaccccgatcgacaccgaccgcgacttcaccgctcggatccactccgcgctggggatcggcgccgccggcgacggcgagaaggccgtcaacctgctgggaaggatccaggcgggccagcagatcaccaccgtcgacgacctctacaagaagatggtgctcgaggagcccgagaccctcgccaccgccgacggcgtcgtggcccacttcgacgagctctccgcgacccgcgaccggatggtcaccgcgcagcagcaggtgcgggcgctgacgccgatccgcgagcaccgggcggccatcgaggacgccgcgtcccggctcgaggtcatcgacgggatcggtgtcttcggcgacgaggcgacctccgccgggctgtggcgggccgggaagcgcgtcgacctgctgagcgagctcgaggccgacctcagctcccgcaggggcgccgcggagaaggcggtcgccgagaagcaggcgctcatcgacgccgccgagtccgagcgcgacggcctcgccgtcacggtcgcggcctccggtggtcgccgcctcgaggaggccacccgcgagatcaagtccgccgagagccgggccgatcaggtac

SEQ ID NO: 45660 - DNA, 1470 bp, Xanthomonas citri subsp. citri; identical to SEQ ID NO: 41638

SEQ ID NO: 45661 - DNA, 702 bp, Xanthomonas citri subsp. citri; identical to SEQ ID NO: 43556

SEQ ID NO: 45662 - DNA, 4023 bp, Xanthomonas citri subsp. citri; identical to SEQ ID NO: 41640

SEQ ID NO: 45663 - DNA, 1470 bp, Xanthomonas citri subsp. citri UI6; identical to SEQ ID NO: 41638

SEQ ID NO: 45664 - DNA, 702 bp, Xanthomonas citri subsp. citri UI6; identical to SEQ ID NO: 43556

SEQ ID NO: 45665 - DNA, 4023 bp, Xanthomonas citri subsp. citri UI6; identical to SEQ ID NO: 41640

SEQ ID NO: 45666 - DNA, 1470 bp, Xanthomonas citri subsp. citri; identical to SEQ ID NO: 41638

SEQ ID NO: 45667 - DNA, 702 bp, Xanthomonas citri subsp. citri; identical to SEQ ID NO: 43556

SEQ ID NO: 45668 - DNA, 4023 bp, Xanthomonas citri subsp. citri; identical to SEQ ID NO: 41640

SEQ ID NO: 45669 - DNA, 1470 bp, Xanthomonas citri subsp. citri; identical to SEQ ID NO: 41638

SEQ ID NO: 45670 - DNA, 702 bp, Xanthomonas citri subsp. citri; identical to SEQ ID NO: 43556

SEQ ID NO: 45671 - DNA, 4023 bp, Xanthomonas citri subsp. citri; identical to SEQ ID NO: 41640

SEQ ID NO: 45672 - DNA, 1470 bp, Xanthomonas citri subsp. citri; identical to SEQ ID NO: 41638

SEQ ID NO: 45673 - DNA, 702 bp, Xanthomonas citri subsp. citri; identical to SEQ ID NO: 43556

SEQ ID NO: 45674 - DNA, 4023 bp, Xanthomonas citri subsp. citri; identical to SEQ ID NO: 41640

SEQ ID NO: 45675 - DNA, 1470 bp, Xanthomonas citri subsp. citri; identical to SEQ ID NO: 41638

SEQ ID NO: 45676 - DNA, 702 bp, Xanthomonas citri subsp. citri; identical to SEQ ID NO: 43556

SEQ ID NO: 45677 - DNA, 4023 bp, Xanthomonas citri subsp. citri; identical to SEQ ID NO: 41640

SEQ ID NO: 45678 - DNA, 1470 bp, Xanthomonas citri subsp. citri; identical to SEQ ID NO: 41638

SEQ ID NO: 45679 - DNA, 702 bp, Xanthomonas citri subsp. citri; identical to SEQ ID NO: 43556

SEQ ID NO: 45680 - DNA, 4023 bp, Xanthomonas citri subsp. citri; identical to SEQ ID NO: 41640

SEQ ID NO: 45681 - DNA, 1470 bp, Xanthomonas citri subsp. citri; identical to SEQ ID NO: 41638

SEQ ID NO: 45682 - DNA, 702 bp, Xanthomonas citri subsp. citri; identical to SEQ ID NO: 43556

SEQ ID NO: 45683 - DNA, 4023 bp, Xanthomonas citri subsp. citri; identical to SEQ ID NO: 41640

SEQ ID NO: 45684 - DNA, 1470 bp, Xanthomonas citri subsp. citri; identical to SEQ ID NO: 41638

SEQ ID NO: 45685 - DNA, 702 bp, Xanthomonas citri subsp. citri; identical to SEQ ID NO: 43556

SEQ ID NO: 45686 - DNA, 4023 bp, Xanthomonas citri subsp. citri; identical to SEQ ID NO: 41640

SEQ ID NO: 45687 - DNA, 1470 bp, Xanthomonas citri subsp. citri; identical to SEQ ID NO: 41638

SEQ ID NO: 45688 - DNA, 702 bp, Xanthomonas citri subsp. citri; identical to SEQ ID NO: 43556

SEQ ID NO: 45689 - DNA, 4023 bp, Xanthomonas citri subsp. citri; identical to SEQ ID NO: 41640

SEQ ID NO: 45690 - DNA, 1470 bp, Xanthomonas citri subsp. citri; identical to SEQ ID NO: 41638

SEQ ID NO: 45691 - DNA, 702 bp, Xanthomonas citri subsp. citri; identical to SEQ ID NO: 43556

SEQ ID NO: 45692 - DNA, 4023 bp, Xanthomonas citri subsp. citri; identical to SEQ ID NO: 41640

SEQ ID NO: 45693 - DNA, 1470 bp, Xanthomonas citri subsp. citri; identical to SEQ ID NO: 41638

SEQ ID NO: 45694 - DNA, 702 bp, Xanthomonas citri subsp. citri; identical to SEQ ID NO: 43556

SEQ ID NO: 45695 - DNA, 4023 bp, Xanthomonas citri subsp. citri; identical to SEQ ID NO: 41640

SEQ ID NO: 45696 - DNA, 1470 bp, Xanthomonas citri subsp. citri; identical to SEQ ID NO: 41638

SEQ ID NO: 45697 - DNA, 702 bp, Xanthomonas citri subsp. citri; identical to SEQ ID NO: 43556

SEQ ID NO: 45698 - DNA, 4023 bp, Xanthomonas citri subsp. citri; identical to SEQ ID NO: 41640

SEQ ID NO: 45699 - DNA, 1470 bp, Xanthomonas citri subsp. citri; identical to SEQ ID NO: 41638

SEQ ID NO: 45700 - DNA, 702 bp, Xanthomonas citri subsp. citri; identical to SEQ ID NO: 43556

SEQ ID NO: 45701 - DNA, 4023 bp, Xanthomonas citri subsp. citri; identical to SEQ ID NO: 41640

SEQ ID NO: 45702 - DNA, 1470 bp, Xanthomonas citri subsp. citri; identical to SEQ ID NO: 41638

SEQ ID NO: 45703 - DNA, 702 bp, Xanthomonas citri subsp. citri; identical to SEQ ID NO: 43556

SEQ ID NO: 45704 - DNA, 4023 bp, Xanthomonas citri subsp. citri; identical to SEQ ID NO: 41640

SEQ ID NO: 45705 - DNA, 1470 bp, Xanthomonas citri subsp. citri; identical to SEQ ID NO: 41638

SEQ ID NO: 45706 - DNA, 702 bp, Xanthomonas citri subsp. citri; identical to SEQ ID NO: 43556

SEQ ID NO: 45707 - DNA, 4023 bp, Xanthomonas citri subsp. citri; identical to SEQ ID NO: 41640

SEQ ID NO: 45708 - DNA, 1470 bp, Xanthomonas citri subsp. citri; identical to SEQ ID NO: 41638

SEQ ID NO: 45709 - DNA, 702 bp, Xanthomonas citri subsp. citri; identical to SEQ ID NO: 43556

SEQ ID NO: 45710 - DNA, 4023 bp, Xanthomonas citri subsp. citri; identical to SEQ ID NO: 41640

SEQ ID NO: 45711 - DNA, 1470 bp, Xanthomonas citri subsp. citri; identical to SEQ ID NO: 41638

SEQ ID NO: 45712 - DNA, 702 bp, Xanthomonas citri subsp. citri; identical to SEQ ID NO: 43556

SEQ ID NO: 45713 - DNA, 4023 bp, Xanthomonas citri subsp. citri; identical to SEQ ID NO: 41640

SEQ ID NO: 45714 - DNA, 1419 bp, Burkholderia pseudomallei; identical to SEQ ID NO: 45557

SEQ ID NO: 45715 - DNA, 672 bp, Burkholderia pseudomallei; identical to SEQ ID NO: 44291

SEQ ID NO: 45716 - DNA, 3633 bp, Burkholderia pseudomallei; identical to SEQ ID NO: 44292

SEQ ID NO: 45717 - DNA, 693 bp, Burkholderia pseudomallei; identical to SEQ ID NO: 44293

SEQ ID NO: 45718 - DNA, 1407 bp, Peptococcaceae bacterium BRH_c4b
atgcaattttttgatctggtgccggaaaaactattctccgtacttacatccaaaaacaaggatatatacctggaagccctttttgtcatacataggtattaccatcaggaattgctcatgcgcaaggccgatttgatagcaatgtttattcatcatctggaggacagaatgatggatcttagcgaagagataggggacgagcccatcgggggaaaaaacctgtccggccgtgctcattttttgttgcgcaaattaatcggctccggctggctggagaaggaataccaccccaattcatttgaggaatacctggtggtgccggattatgcggcagacatactcagcgttttatacgggataacggatgacagcccgggtgaatacaattcgctggtatattcaacatattcctgccttaataccgccgatgccgaacgggatgattttatgctggaagccttgctgcagtcccacggggccacggtaaagctgagggaaaacctgcgccggctgtacaacaatatgcgccgttattaccagcgattgcaggacaaagaggagatcagggagatcatgaaagagcattttgacaattatcaggtgctcgtactggacaggatttatcaccctctgaaaacatttgacagcatcccccggtacaagaccaggattttgcgtatattgcgcaactggttgactgatgtaagggttattgaaaaaatttccgccctgatggtaaggaagggctaccgtgccgtccccgaagaagccagggccgatgttgtaaggatactgggtgaaattatagacatctatgaaaatatcgaaaatctgctcagggaaattgataaaaagaacaccagttacaccagggcttcggtggagagaacacggtacctgctcaacaccgaccgtgatgcccggggcaaactggtggaggtgctaaaaggactacctggccttaagcaaagtctacctgccggaaccgaaagtttgttgcaggaaggcctcaacattttcaggcagcaatttatagacgaatattcactttaccgggagcgccaaagaaaaactgccggtgaagcccaacccctggcggttaccccgcccggacgccgcaaggagatggagagtgaatttaatcgctttgagcaacgcttgcgggatagtcttacccacaagaaaatagtacaatttataagcgcctacctgcaggagagggagacggtaaccagtgaggaattacagttggaggaaacggaggattttgtgaagctcattatggctgtactgaaaaataatgaagaggacatcccttatcaggtccggtttctggacgggtacgtttttgtaaacggttaccgcataccggacatggttttctctgtcaaaggggtggttcgttaa

SEQ ID NO: 45719 - DNA, 651 bp, Peptococcaceae bacterium BRH_c4b
atgtggtacaaggactgggcattgcttaccgccgaggagagggagcatttttccaggattatcaatatactgctggctaaaacgtttatgctgagagaccggcttgagcacagggaaaaatccctggcggcggacagggatttccgttttatagaaaggcaatatcaccttttcagggattacctggcggtggcagggtgggagcttacgctggaaacggactacggggtggcctgggtttccaatcctgccggtttcagtcgccggcagctggacaaggttaccacttattttctgtatgttctgcgtttgatttacgaggaagagcgggaaaaactgtccattcgcaaggaagtcatcaccacggtgatggaggttgtgcaaaaactgggctaccttgggctgattgaccgccggataacggataccctgctggcggatagttttgcgatcttaaaggattttaatattattgataaactggacggaagctggaccgacccggaggccagaatattgatttatcccaccatactctttgtaatcagtaacgaaagaattaattttctgtaccggaatctctgcggggaaaatggtgcgggtaattatgccggtaacggcaatacccaaaagggggaacaaggggattga

SEQ ID NO: 45720 - DNA, 3345 bp, Peptococcaceae bacterium BRH_c4b
ttgaagctcctgaaaaaactgttgttaatcaactggcattatttcagatatcaattggtagattttgacagaattaattttttaaccggggttaacgcatcgggcaagtccacactcatcgacgctttgcaattgcttatgctgggcgacaccgccggcaattttttcaacaaggcggccaatgagaaatccaggcgcaatttgaagggatatttacggggggaagtggcggagaatgaagaaaagggtctggtttatatccgctcgggcaatttcaccagctacatagtgggtgagttcgaagataccgtaaaggaaaggcggttttgcctgggggtagtatttgactgcaatgccgccggcgactacaaccaccgttttttttccctggaacatgccatgccggacaatcattttcttaaccacaggacgcctttttccacagaatctttgaaggcgttcctgcacgaaaattatggccggcaagcagttgatttttttgattccaaccagaggtacagggaagtgctgaggggccgcatgggcaatcttaatgaaaaattcttccgtctgttccggaaggcggtacccttttccccgatcatggatatcaagggctttatcagtgaatttgtatgcgatgttggcggcaggctggatgtagaggatatgctggagaacatccgtcattacaaacagctggaaggcgaactggagactatcaaaaagaggataaatgcgctggaggacattaacggctgccatctaacctatgcaggggaaaaaatgcgtctcaccacgcagcaatatattatcgccagagccggactggagcagacaggcaatgagattaaagccctgtacggggaggctgataaagctacacaaaaaatcaataaagcagaccaggaactggcgggagctgatacagccattaatgagctggaagtaaaaagaagcggatttattgatgaaaggaacgcttctgacgttacaggcctggaacgccgcttgaaagacgaaaaggacaggcttcaactgcaggtggacatgcgcttgaaaaatcgggagcgcataaatagaatccttgtcgacatgtccgccgtctggggcagtcttgtcaagcaattggaagatgccggtgcggatcgcccggacttgtctgctctgattcccgggcttaaatttatccgcagggcggccggtgacgccgggctgcttgccagagaagaactgaaggcggtcagtggcgccatgagggatttccgcagggaactggcggatgtctttgctgatgccagggaagaactatccaggacagtaaatagaataaaacagattgaaaatgaaatcagggaactggaaaggggtataaaaccttataccaggcagttaaacggcctgagcgcggccattgctgcggaaatccggaaaatctcagggcgggacataatgccccgggtattcgccgatttaatggaaataagggatgagcagtggcgtaacgctattgaggggtatttgcatacccagaaattttatttgctgttagacccggattttttcctgccggccctcgatgtttatgaccggcttaaatttcaaagggaattctatgatctgggcattgtggacgtggctaaaattttgtccaggaacccggtggtactgccgggaagcctggctgaagaaattattactactgacggctccgcccgggtttatgccgactttttgctggggcgggttataaagtgcgggacggctgaagagttgcgcagttacgaaacggctattacccccaccggaatgctataccagagatttgtggtccgccagattaatccctcccgttaccggcagccgtatatcggccggggggctgtggctgagcatatcagattaaagactgaagaggcggctgctttaaaaaggaaactgctgcattttcagccccggcatgatttatacagccgcctgagggaaatacagggattaagcgataacgatgtcaacaacctgctggaatgggccgcctcactgtcagacctgcaggaactccagcaaaggctgcaggaaagcataaacaggtacggcagcctggatttggactacctgcaccgcctggacggggaaatagaagctatcgtgttgcagattagggataaaaataaactcagggactccctgatcagggaaaagggcagggcggagaaccgcctggagagcattaacggggacttggccccgcgccttgaggaacagtgcctgcagaaacagattgaaatcgacaaaatgttccaccgggagtggcgggaggaaaacggcgaacccgatttcacagaagcgttaaataggatcagcggactgggtgagattgtagattattatgtaggccagcttgaagaaacctccagggtcgcaggattgcaccgggacgaactgctccggttaaggagcaattacaaccgcgattataaatcttccctggacatcagccgggagcataaccaggactgggaaaatgaagcggtccggctgaaggagacaaggcttaccacctatgagcacaaaattaaaaaggccagggagaaagcccagctgcagttccaggaggattttgtcagtaaattaagggaaaacattgaaacagtggaaaggcagctttttgaactgaacatagccctgaaagatgtccccttcgggcacgaccgctaccgcttcagcgtagttccgaacaggcagtaccagaggtattatgacatggtaatgagcgatttactgattcagggccataatgtcttttccggggaattccagtctagataccgggatgtggtggatgagctttttcgccagctagttgatgccgaaaacggcgagctttccccggaaaagcgtgtggaaatggagagaaacctggagcattttacggatttccggacttacctcgatttcgatttaatagtatccgatggtgaagggaatgaatcccgcctttcgaggatgatcagtaaaaaatccggtggtgaaacccagactcccttttatatatcggtactggcctcttttctgcaaatatacaggctgaaacagcaggggttcaacaacaccctgcggcttatcgtttttgacgaggcctatagcaaaatggaccaccagaggatcaaggagagcataaggctaatcagggatttagacctgcaggtgattatatccgcacccacggaaaaaatagctgacatagcgcccctggtggatcgtaatttgtgtgtaaccagggtggatggggagaccttcgccagggctttcgatcccagaaaactaaatgaagaaagagcctga

SEQ ID NO: 45721 - DNA, 1497 bp, Desulfatitalea sp. BRH_c12
atggatatccaacaactattctttaaggacaggacttttcattttttcggcccgcttaccggtcgttaccgggaaatggcggtgtcgtgtatccgcaatctttatctgcgtctgaacggaccagaggcggactacagctaccatctgacccgcggggatgtgctcgatatttttggtgccagtatccgttcggcgccggcgcttgatgacgatgtgccgggttccgcggcggctaaaatgtcgcttcaggaccggacggcgtggatgcttaaaaaactgaccgatgcaggttggatcgaagcgtacatggattcgggaaccatgcagacggcctaccgtttcaccccccaaggccggcaattcgccgcgccgtttgcccaacggcattccgagattattaccaacacgcagcacacccgcagcaccctttcccacctccagagctttgtaaccaagatgcagagcggtgtattatcggtcggagacttgatgatcgccgccaaattgtccggggagattatcagcgatttcaacgaaatcatcgaggagatcgtggaacaacgccgggcgctgatcgcctcggtcaaccgggaaatactggcggccaagcaggccggggataattttttcgaattcatggaaaaacgctttattcccgatatgtgcgtccggttcagccgggattcggtagagcgttaccgcaatgaaattctggacctgctggatgcgattcggggacaaaccgacgataccaaggccgccatagaaaaggaacttcgcaatttttatccgcacctgttaagagccggtcggccttcgatcctgatatgggttctggattcgatcgaacagcgcctgacggccgcctgtgatgtaaagatacccgagctgcgcgcccagaccgaaaatttcattcggcgcgcccaggttctgatcaaccatctggccagcctggcctttggcgaaatcgataccgattcagtgttctctttggttaaacggctgtccggtttagacgaggcggatgtgcgggccattctcgaagatgaacgcagccgtccggcacgcgttgccatcggcttggtcaatcccgcaaaagtgaaactgccggggaaaagagcgatgcggcacatacacactgctttggaaaagcaagcccaggtccggcctgaagagcagcgcaaagcctatatccggcaggaacttgccctggcgtttcgtatcgataccgccagcatcaaggattttgtgatccagcagttgctggggggacataaaattcgggcatccgattttattattcacgatgcagcatcccttttgggagccatccatgcacccatgataggcagtgccggaaggagcgggcagctgtttcgcatcacgcccatcgatgagacgattgaaaacgattatttcaccagcaatgattttaccattgaatacttgggcccgatcgtcggcgccgagaacaaggacggtaaggatgtggactga

SEQ ID NO: 45722 - DNA, 696 bp, Desulfatitalea sp. BRH_c12
atgtggactgagcatctcgcgcaggaactgaagaaccgcaatctgagcatggctgagtttcgggcggtgttgctgcgtctgctggacaaacaggtcatctaccgtcacgaaagtcaggttgaagccgaattgtacgatcttttcgtgcgcatgcaggcggtggtggaaacctacttggatatccttggcatcacggttttttataattcgcagctcaattttgttatcgcttatccgccgggcagtgatattcccggggttgcgatcggagatgccggccagaccgcgctgcaacgacggatccatgccgatgaagctggattgatgatcaccttgcgcttgttgtacgaagaaaagatccgcgaaggtgacatcgatgagcaagggtgtgtttttgttccgttggagaccgtttttacgcgctatctgagcattaccaaaaaagagatgccggccgctgaagccgagcgtcgttcccttttcaatgcccttaaacaacttcgcatcgtgacctattcggatctggccggcgccgagcaatggataggcatccgggagatcatcatgcatttcaccttgaacgggattgttgaggccctgtcggaccgggaaattcggcccacaggcgtgcaagatgccgaaccgatcgaaccggatcgggccggaatacaaataccggatcaggaggatgcatga

SEQ ID NO: 45723 - DNA, 3618 bp, Desulfatitalea sp. BRH_c12
atgaaacttaactcaatggggttgctcaattgggccaatctgcccaaccgcgattatgacttcagccagatcaacatgatcaccggtgaatccggggccggaaagaccactttgctggatgcccttcaaaccatcctcaccgggaccacggccggtctttttcagtacaatcccggtcaggaggaagccactcagcaaagccgtgtcaaagaggtgcggaccctggcctcctatattctgggctgtgacgatgcctcctacgcgcgtccacagggtgcccatggttaccttttcgccaactgggtccctgaaatgggtgataaatcccagccgttcaccgccctgatcggagccagcgcctatctggacagtgccggcaacaaacgcacggccaaggaagaggatcttgtcctggcggtggtacgatccgccacgttgtgcgtgaaggacctgctgctatcccccgatcagggagaagagcaggcaggggagcagattatccccgtggccatgctggccaaccatttaaaaacgaaccatcccggcatgcaggttgaaatcgcccggggcaaggaagattacctgtgcctgctgtacggtggactgcgcggactgtccagcgtcagccgtgtggaagcccgcaatgccgccaaggcgctctcccgtttcatggtctataagcccctcaaagatctggatgaattcgtacgcaccgaaatcctcgatccccacgatattaccgacgccatacgccaggtatcagcgatgatgcgcagcatcaacggcatggagcacgaagcggccggcattgaaaaagggatcgcgcttcttgaggccgccgaaaaggggatggcgctttttaccgcaacggccatagacgagcagttggcgcggtatgagcatcttgatcgcaaggcggcgcaattgcagcggcagtctgaaacagcgaagcaagagcgcgcggagctggtggaagccacccggattctgacgcgggagaagaacaccctgacccatgatgaaaaacagatggccgaccaactcagtcttttggaggcgcaacgactgggtgttccggtgctcaaactcaaagacgatcttgaacgggagctgggccgtctcgctcatgaattaagcgaacgtgcccatacgctgatccagtccaacgcagtgcgaaaaaacaaccgcgacgtgaccgccaggctggggcaattgctggcccatgcgcagacttccccctccgcgctacctgaaacgttgcttgaacccatggaaaccgttatgtccatggacgatctggaccaactgcctatcggaaaattgctgtccgagcaacgcttccaggaactatccgagatgacgccacgggttgaacggatcgacaatgcccaccgaactctggtggaacggtttgcgtctgctgcagaaattttgagccgcaagcacttccagtgtcaggaacaggccgaacggacgctggaccggatcaagcggctcaaagagcagattgcccgacttgaaaatgccaatcaggtcgcttatccgcaaaccgttcggcgggccatatccctgatcgccagccagtttcccgaagcagcaccctgcgttctgtgcgatcatgtggaactggccgatccatcctggcaactggccatggaagggttggtaggacataaccggtttctgattcttgtggatgcggcctatgaagaccaggtcatggccttgatggcgcagcatgggttgcaaaaagtcgctattttgcaagggcgcaaggccatggcggatgccagccgattgaccctgccggcgacctccatggtccatttgctgcgttttacccatcatcttgccgaaagttattttaaagcgcgctatgggagcgtccgtctgctggcggacaccgacgatatcaccatggcggccaggggcttgaagcaaaacggcctggcatgcctcagttatcgcattttcatggcatcggtttccgaagcagacctggtgttcggtgccgaggcgcgtgggcgggcacttgcggcacagcagcatcaattgacggaaatggaacagcaattcgaagtggagcggaccgaacgccacttgtcccaggctttttacgatgccgtccgtcagctatctccggtggatatggctaaaaacatagtggccatcctggaaaccgcgtcggcgcatcagcaggtcaatgaacgcctgaacgccttggacctgaccgaatgcgaagcgctggacagcaaaattcggggcgccaaggccgctttgtcggagatatcggacaggcgcgaacaaaccactctggacattgggtccaataccaatgccatggaggctataggccgcaaaatcaaagagtttgaagccggaatcgaagataagaagcggcacatggccgcatgccgcaatgttctggatcgctatgccgcgcaatggcccgattttcatctaacggaacacatcgaccgcattcaggccaaccgttccgccgcccaggcgctgaatacgcttgatgccgataatttcggcgccaggatgaaccagggggccagggacgccgaagtcgccctggaagattgcacgcgcatggggttgcggggaaccggtatcgactatcatcatttcagagccgcaaacatggtgcgcgatgcccatacggaaaatttgatcacctgtttcagtctggcctgcgatctggcacgtcagattcgcaatgggctcaactttttgcgcaacgacatcttgtccaggcataaagaaaagctcaccgagatgaccggacgtttcaacaacacatttgtatttcatatctgtcatacattgcacaatgccgtacgccagggcaaagaccgcctggaaaccttcaaccgcaagttgcgcaaccattttttcggggaagagtactaccagttcgaataccaatggattccggaatttcgcgcgtattacaaattcttcgaagaagccgcgttgatcaaaccggaagtggaaaactcccttttcggcaatgccgacctgagcgcgcaaagtcaaaaaatattcgacgagatctgtgccaaactgctcgacgacgacatcgagcggtcggtcaaagacctgcgccggatcgcggattatcgcaattaccgtacctatgacatcaaaaagtgtctgcccgatcgggccatctccctgaaaacgtacggcgccggttccggcggtcagatggaaaccccttcctatgtcatccgcagcgccggcctggcgtcggccctgcactttggtgaaggcgccagccatctgcgcacggtgatgatcgatgagtccttcagcaagatggacgaagcccgctgcaaagccgtgttggattatctttccggcaccctgggattgcaggtcattttcgccgtacccaccaaaagtgccggtgccctgcacgaccatgtggaccaggttctccaagtgacgaaatttttgcaggatgcgccccgcggagagttgaaaaccgcagtgatggtaaccccaacggtgttaaaaaagaacactgtggccgaattgtggcaacggcagcgcgttgccattgaaaatagggcgcaccagatgacattcctggaactaatggaataa

SEQ ID NO: 45724 - DNA, 1419 bp, Desulfobulbaceae bacterium BRH_c16a
ctgttgcgccggactcatcctgcctggcgcttgttacgttccgatcacgcgccgctggttgcgagttttctccatcgggtctttatcgagccgaacgttcggcagatggggcaggcggatctggcggaggccctggaggatgaactgtttgcgttgcgggacaaatacgggccggatgtttttcccaagcgtgcttccgagtatctcaacgactgggcggacaacgacaaaggctggctgcggaagtactatccgaccggttccgatgaaccccactttgatctgacttcggcaagcgagaaagcgattgcctggcttgccgggctcactgatcgggcttttgtcggcaccgagtcccggttgctgactctctttgaactgctcaggcagatgagcgaaggaagcgaaaccgaccccgaggcaagaatttccgagttggtccgccgtcgaaacgagatcgatgccgagatagaacgcgtccgtgacggcgacattctgctgttaaacgatacgtctttaaaggaccgctttcagcagtttctccagttggcaagggatcttcttagcgattttcgtgaggtagaacagaactttcgaaccctcgatcggcaggtacgagagcggatagccctgtgggacggcgccaagggagagctgctcgaggagatcatggggcagcgggacaccatcgccgattccgatcagggcaagagtttccgggcgttttgggattttcttatgtcgcagagccgccaggaggagttgagccggctgctggagcaggtgctggccttgccgccggtggtggagatgcagccggaatcacgtctgcgccgggtccattacgactggctggaggcgggcgagcatacccagcgcacagtcgcccggctgtcgcagcagctgcgccgctttctcgacgatcaggcctggctcgagaatcgtcgaatcatggatatcctgcataatatcgaatcgcaggccctggccgtccgcgaggatgcgccgtccgacaacttcatttcgctggccgaggctgttgccaccattgaactgccgatggagcgcccgttgtaccggccgccgatcaagccgcaaatcgtcgatctcgagcttctagagggggaggaagatgcggatgtcgcagcgctcttcaatcaggtggtggtggaccgggcggaattgtcccgctttatccggcaggccctgcaggaacgttcacagataagtctggccgagctggtggcgatccatcccttgcggcaggggttgtccgagctgctgacttacctgcagctcgccggtggacgtaacgatacggtggtggacgaggagactgtcgatataatcgtctggcggttgaaggacggcagctgccgtcgcgtccgtttgccgcgtattatttttgcgaggaaatga

SEQ ID NO: 45725 - DNA, 636 bp, Desulfobulbaceae bacterium BRH_c16a
atgaacatgaacgaactggaactccaggcagcagctgctgaaaagaacaacgatctgtcggtgattgtcgtgtcgctgctgaggggcgtattgtatcaggaagaaaaggtcgaggtgtggaacgccctgctcaaccttcaggccgcggttcgtgattatgtggccgttctcggcctggagttgattctggacgaggccgaaggctatgcctttctgcggtcccgacctgaagaggaggagaataccgtacccgccgttccccgtctggtgcggcgtcagcctcttgccttcccggtgagcctgttgctggccctgctgcgcaagaagctggccgaattcgatgcgacgggtggcgagacccggctcatcctctcccgtaacgacattgcggaattgatcagggtgtttctgcctgccggaagcaatgaggcgaaagtaatcgatcaggttgatacccatctcaacaaggtcgtcaagctgggatttctgcgccccctgcatggccagaagcaaatgtttgaagtacggcgtatcctcaaagcctttgtcgatgcccagtggctgacggagttcgatcagcggctggcggcgtatcgtcgggagctggaaaaaaaggaaggagaatccaatggctga

SEQ ID NO: 45726 - DNA, 3366 bp, Desulfobulbaceae bacterium BRH_c16a
atggctgagcctctgccgctgaatttcgagagtgacgaccggctggccggtttccgcctgaagcgcctggaagtgttgaactggggcaccttcgaccagcgggtgtggacgcttgaactcgatggcaaaaacagcctgctcaccggcgatatcggttcgggcaagtcgaccctggtcgatgccgtgaccaccctgctggttccggcccagcgggtcgcctataataaggcggcaggcggcgacaccagggagcgtacgcttcgttcatatgtactgggccactataaatcagagcgggcagaggtcggcggcagtgccaagccggttgcgctgcgtgattataacagctactcggtaatccttgccgttttccataacagcggtttcggcaagacggtgaccctggcccaggtgttctggctgaaggacggccaggggcagccgacgcggttttatgtcggctgcgagcggcaactttccataaagcgggactttggcggtttcggccgtgatatcgccaatcttaagaaacggttgcggggcgaggagatgaagatctttgaaagcttcccgccctatggcgcctggtttcgccgacggttcggcatcgagaacgaacaggcgctggaactctttcatcagaccgtatccctcaaatcggtcggcaacctgaccggttttgtccgaacccatatgctcgagccgtttgaggtagcttcccgcatcgatgccctgatcggccatttcgacgatctcaatcgggcgcatgaggcggtcctcaaggccaaagaccaggtagagcggctcgagcccctggttgccgactgtgaccggtacggcgagctggagcaggctgtccggcagctgcgcggttgccgggacgccttgcgcccgtggtttgccggtctcaagctggagttgctgggccagcggcttggcaggcttgaagaagaacttaaacgtcacaacgccaggatcgaaggtctggtcgaagagcggcgactgctgcaggggcgggaacgggaactgagacgcagcatcgccgaaaacggcggcgaccgcatcgagcgaatcggcgaggagattcgccggtgcgaggcggaactgcagcgaaaacgccgcaggttcgagcggtatgccgagctgatggaggcccttgcgatgtatgccgccgacagtgtcggtgcttttctcgttcagcggaagaaatgtacggccatgctggaagaagaggcggcgggagaggcccgggtgcagaacgaattgaatgaagccggtgtggagtttcggttaaagcgtgaggagcatgatcggctgcagacggaaatccgaggcctgaaagcccggcgctccaatattgacgaaaagcaggtcggtatccgccggaccttgtgcagggacttggggtttgcggaaaacgacatgccctttatcggtgaattgatccgggtgcgggaggaagaacgcgactgggaaggtgccgccgagcgactgctgcgcagtttcggcctgtcgctgttggtgcccgaaaagcattacagccaggttgccgggtgggtagatgaaaataacctgaagggacgactggtatattaccgggtgcggccggcgcgcatggccgagctgccgcagctgcatcccgactcgatggtgcataagctggccgtcaagcccgactctccgttttttgcctggctggaaagcgaggtctatcgacgctttgatctggcctgctgctcaaggccggaacagtttcggcgggagacccgggccatcacccgggccgggcagatcaaggcgcggggcgagcggcatgaaaaggacgatcgccatcgcctggacgaccgcagccgctatgtgctcggctggagcaacgaagcaaaaattgctgccctggcagataaagcaaggctgcttgaagcgcaactggcagggaccggtgcggaaatcgccaaacttcaggacctgcagaaaacagccaagttccggctcgagatgctctccaaacttgacgaataccatgattttaccgaaatggactggcagccgtcggcggtgaagattgccaggctcgaggatgagaaagaccggcttgaggcggcatccgatatccttaagctgttaaccgaccagttgcaggcgacggaggaaaaacttcgcaaaattgaacaacagcttgaactcaatcgcaacgtatgcgccaagactgagcagaaaataaccgatgtgacaacactgcagcagcaaacccgtgaggttgtcgataccgcacaaccggaacacaccggccacttcatcctgcttggaacgttgcgcgaggaggcgctgggcgagcagcagctctccgtcgagtcctgcgacaaccgcgagcgggagatgcgggactggcttcaggtaaggatagacaatgaggacaggaaaattgcccggttgcgcgacagaattatcgatgcaatgcgcacctacagcacaatctatgatctcgagaccagggaggtcgatgtttcggttgaggcggcggccgattaccggaccatgctcctgcaattgcaggccgatgacctgccgcgctttgaaatgcgattcaaggaactgctcaacgagaacaccatccgggaggtagccaatttccagtcacagctggcccgcgagcgggagactatcaaggagcgtatcgggcggatcaacgagtcgctgaccagaatcgactataatccgggtcgatatatcgtgctggaggcggcaccggtcatcgatgcggacgtccgcgtttttcgggaggagctgctggcctgtaccgaaggcagcctcaccggctccgacgatgcccagtattcggaagcgaagtttctccaggtgcgccggattatcgaacggtttcgtggccgtgaagggagatcggagctggaccgacgctggacggcgaaggtgaccgatgtccggaactggtttgcctttgcggccagtgagcggtggcgggaggatgagtccgaatttgaacattacaccgattcgggcgggaagtccgggggccagaaggaaaagcttgcctacaccgtattggctgcaagtcttgcttaccagttcggtctggaatggggtgcggtgcggtcgcgttctttccgctttgtggtgatcgacgaggcattcggccgcggctcggatgaatccgcccagtacggactgcagctgtttgcccagctcaacctgcagctgctgatcgttacccctttgcagaagatccatgttatcgagcctttcgtctccggcgtcggctttgtccataatgccgacggtcaggcctccacccttcgcaatctcacaatagaagaataccggcaagagaaagaggcggagcagacgtga

SEQ ID NO: 45727 - DNA, 1152 bp, Desulfobulbaceae bacterium BRH_c16a
ttgcggaagctgtgggatcagggcgcgattctcgcttcactagccggtggggaggagtgtttcccacggcggatgaccttgaaaaaaccaaattcggcggaaatggccgaacggtttaccgaggtcagggcctggataagtcgcctggatcgcgaggcaaagcattaccggctggtctggcgcgagataaggcatcggactctcggggccaacgccgtcccggccgagatctgggtcgacagcctggaagattgcctgacgctgctcggcaaacgccaggaggccgaccgcttttccgccttggtccagttgaccggcaggcgttacccgcagcttattccctggctggtcaagcgccccctgtacggcttgtctctgtctgccgactggccgcgcctgctggatatagtatcctggctggatgatcatcggtgtcccgaaatctatctgcggcaggttgacattcccggcgtgcacagcaagtttatcgagagtcatcggggagtccttacggagttgttcgatctggtattgtctccggacagaatcgaggtaaccggccggggagctaacggattctgccgacgctacggctttcgcagcaaaccgagtcgagttcgttttcgtttactggatcgatctcttgctctgttgcccgggccggcagatcaggatattacagttaccggagaaatgtttgcagggctcgaattgccggttcaacgcatatatatcacggaaaacgaaatcaactatctggcttttccgtccatcccgcaaagcatggtggttttcggcgccggctacggcttcgagacattcgccgaggcggcctggctgcataactgcaacattcagtactggggcgatatcgatacccacggctttgctatcctcgaccagctgcgcacgcttttcccggcggtgagttcctttctcatggatcgcaagacactgcttgcccatcgcctccactggggggaggagccgcaaccgatgcgaggcgagctggccagactgacccccgaagaacaaatgttgtacgacgacttacggttcgatcggctggctgtgcggctgcgccttgagcaggagcggatcggttttagttgggttgaaaatatggtttgccaaccggaccctctcccttga

SEQ ID NO: 45728 - DNA, 1470 bp, Streptomyces rubellomurinus
atggaattcgatgacgtcactggtctactcgaccatccggcatggcggctgctgcgggcggagaacgccccgctggtgctggggttctgcggcacggtcttcgtcgatgagaacgtgcgaggcgtacccgagaacgtgctggtctcccgcctggacgatcagctgtatgacctcaacgaacggggaatgggctcattcccacgccctgccgccgcatatctgacggagtggaccaacagtggctggctgcgtaagtactacccgcccgacgaggacgaggcccatttcgacgcgaccagcgccctggagaaggccgtcgcctgggtccgggggttgcccgctcgttccttcatcggcaccgagtcacggctgagcaccatcgtcgccctgctgcggcagatgacattcggcaccgagaccgatccgcaggcgcgtatcgacaaactccgtcgcgaacgtgatcggatcgatgagcagatcgcgcagctcctcgcgggcgaagtcgatctcctgtccccggtggccctgctggaccgctaccagcaggtcgaaaacacggcggtcgagttgctgcgggacttccgggaggtcgaggcgaatctgagggaactggatcggcggcttcgtcaggacgtggcaaccgcggagggaagcaagggcgagctcctggcctcattcctcatggaccgggagatgatcgccgaatccgatcagggccgcagcttccaggcgttcttcgatcacctcctctcccctcaacgccaggaagagctacgaggcctcctggagcaggtacaccagttgccgcagttgggcggcagagccaacaggaacctgctgaagatcccattcgcatggctggaagcggcggagagcactcaggacacagtgcggcagctcaccgagcagctccgccgattcctggccgaccatggccgcgaggaggaccgcagggtcgtggcgctggttcgctctgtgcagcgccacgtggcagccctcgacggccgaagtgatcttcccggcatcgagctggaggtcccccaagtggagctggctctgccgatggagcgccggctgtacatgccggtcgaacgggtggagctggacagcactgccgtcgaagcgttcgacgactctgaggtggatgtctccgaactgtttgccggcgtccatgtggaccacgaggccttggtcgcgcaggtactggagctgatccaggccagcccgagtggtcaggcgaacctgcccaccgtcgtcgaaaagtacccgttgaccctgggactcgcggaactgctggcgtacttccaactggaccaggtgggcctggacatcgtgatcgaccccagccacacccacgacctggtctacgagcgagtccactctccagggcactccatggccaccgtcccgcaggtgacgttcgtgctcaacgagggcggcgtgaccgccggagaggtagagcaggcatga

SEQ ID NO: 45729 - DNA, 588 bp, Streptomyces rubellomurinus
atgaatgacgctctgaccgtacccatcgtgaacctgctgaaggcaggcgtgctctaccagagcgacgtgcccgcgatctgggaccagctcacagcccaccaagcagccatcggtgactacctgcgtgtgatcggcctggacgtcgtggtcgaccgtgccgaaggctatgcctacacgcgccagctcgacccggatacccgcgatgacggcgcggccgtaccccggttggtgacacgccaccggctctctttccccgtcagcttgatgctcgccctcctgcgtgggcgactggcggagagcgatgccacctcatcggacccccgtcttcttctgactcgtgacgacctcgtggaaatggtccgtagtttcctccctcctcgcagcaacgaggcacacctggtcgaccagatcgacagcaacatcaagaagttgtgcgagctcaaggtgctccgtcagaccaagcagccgggcctgttcgaggtacggcgccacatcaaggccctcgtggacgcccaggttctcaacgacttcaacgagctgctcgccacctaccgcagcaccatcgcgacgccggaggacaacgaatga

SEQ ID NO: 45730 - DNA, 3396 bp, Streptomyces rubellomurinus
atcccgaagcagtcaggtccaagcgacgacaccctcggcatcggccccggcttccggctcacccgcctggaggtgctgaactgggggacgttccaccgcagcatctggtctttcaccatcgacgggcgaagcgctctgttgacgggcggcgtcggatccggcaagtcgacactggtggacgcgatgaccaccctgctgctcccagctcacaagatcgcgtacaacaaggccgcaggcgccgaagcgaaggagcgggatctgcgctcgtacgtgctgggccactacaagaacgagcgtgtcgaggcgaccaacagcacccgtccggtcgggctgcgcaacgcctcctcgtacagcgtgatccttggcgtgttcagtaactacgtgctcgatacccacgtcacactcgctcaggtcttctgggttcccgacgccaacaccgggcaacccgaccggttctacgtcacggccgacaccccgatgtccatcgacgccgacttcaccggcttcggcaccgacatcgcggacctgcgccgacgcctgaagcagaggaaggcgacggtctatggccactacccgcagtacggaaaggccctgcgtcgcagcctcggtatccccagtgatcaggctctcgacctgttccaccaaaccgtctcgatgaaggccgtcgggagcctcgacgagttcgtgcgagaccggatgctcgagcccttcgacgcacgagcagcggtcgacaagatcgtcgcgcacttcgacgcgctgaccgccagccacgccgaggtggtccgggccagggagatgatcgacgggctcgggccgatcgtggatgcctgcgaccggtgcgacggcatccagcgagacatcacgatgctgcagcagcgccgtgaggtcctacccgtgttcttcgcccaacatcgacgccggcttctggacctactcagccaggacctgaagtcgcggatcaccgagctcgccgatcagcagacgggccgtgagtcggaactggagcggctccgcgactccgctgacaccttgcgccgccgcatcgacggcgccggcggcgagaagttggtggaactggatgcccggatcaaggaacttggccgcgaccgcgagcggcgtcgcgaccaggcttccaagtacgacggctggcttggtcaagccagcctggcacccgtcacggatgcggtgtcgttccgtgaacgctccgaccagatcgcccaggtccgagctcggatcgagcagcaggagcagcaagcccgcgaggaactcgatgcccttgccgtgcagcgggacaagaacaacacggcaacgcaggacctccggagggagatcaccagcctgcagagtcagcgctccagcatcccctcgcggctgctgagcctgcgccaggacctcgccgccgctcttgaggtcgtcgccgacgaacttccctttgccggtgagctcatccaggtccgcgatgacgaggcggcatgggctggcgccgccgagcgtgtcctgcgcggcttcgccctgtccctcctcgtacccgaagtccactacgagaaggcctcggcctgggtgaacggcagacacctgggattgcggctggtgtactacaaggtcccggcccacacaccggcacaggaactgccgaacgatcgcgacctgcttctgggcaagctcgaactcaaagacgactgctgggcccacgactggctcgccatgcaactgcggaaccgagccgactacctgtgtgctgcggatctggacacattcacccgttcctctcgccccgcggtcacgaggcaaggtctggtcaagggcgggggtggtcgccacgagaagaacgacgcctcccgcatcgacgatcgcagctcctgggtgctcggctggtccaaccaggccaagctggaggcgctccttgcggaagcggccagcttgaccaaggagagcgcggcgatcaccacccgcacagcagagctgaaagaacagcagaagggtcgcgagaggatcagctcggccgtgacgctcctcgccaacatcagcgagtacgttgaactcgactggcaggcgtgtgtcactgaacttgagcaggccgagacgcagaagaaggcgcttgtggcggaggccggcctggacaggctcacagccgagctgaaagacaccaacgccagtatcagccactacgacaagctcgtgcgcactggcctggaggcacttggtggccttcgacgtgacagcgaggacgtcgcatctcagctgaagcaggccgagggttccattgaacgggccgacgtcgaagcggtcgccaagcacgagagcgcgctgaggctcttcctgccgtccccggtcgcagacgtacaagtccacttggacctgctgaagacggcagagaccgaggccccggcaaagctgagtcgtgatctcgatgggcgaagcgacgcccttcggcgcgctgcgagccaggccacctcgaagatgacagcattccgaagcacctacccccagtacacaaacgatctcgacgcttccctggagtccgcagccggatatcgcgcgctccacagccaactggtcagcgacgacctaccgcgattcgaggcccagttcctgctgtacctgcgcaccaacgtcattcgagacatcgcgtccttccaggccaacctcctcaagcaggaacaggagatcagcgagcgtatcgagctcatcaacacctcgctggcgggcatcgactacaaccccggccggtacgtccggctcaacgccgcgcccaccaccaatgtggagatccgcgacttccgccagagccttcgcgagtgcacgagcgatgtgctggccaccgagaccgacgacgcttacaccgaggagaaattccttcaagtgaagcgactcctcgaccgcttcaagggccggccggagcacacccgtatggacgccgactggacagcccgcgtcaccgacgtacgtcgctggttcaccttctcggcgagcgagcacagccgggccgacggtgccgagcacgaggtctactccgactccggcggcaagtccggcgggcagaaggaaaagctcgcctacaccatcctcgccgcttcgctcgcctaccagttccgcatcgacccgcaggccaagaagcccaagacgttccacttcgtcgtcatcgacgaagcgttcggacggggagacgacgcctcggcccacttcgccttggacctcttccaccgcctcggactccaactcctcgtggtcacccctttgcagaagctgcacgtcatcgagccccacgtcacgcgcgtcggctacgtcgaccgtcccgacaagatccgttcgcggctgaccacgctcaccatcgaggagttccgcgcccacaaatcgtcccgccagccggctcctcactccgaggcccagcagtga

SEQ ID NO: 45731 - DNA, 1173 bp, Streptomyces rubellomurinus
gtgacccgaacccagtggacgaccccggaccaggtcgtcgaagtactccgtcgtaaatgggacggcggccggttcctcaccgaagccgcccaaggacttccgttcgagcccatccgtattccactcaaaggccctgccgcagccgacgtcatcagccatttcgacaaggcgctggcctgggcccagtcctgggccgccagccgacatccccacctgcgcatccagaccaagaccgtcagaggacgcggaaacactccgacgaataccatccctgaccgggcctggatcgacacccgcgagaacctctgggcccttctcagcgtcgacacgcaggtcgacctgttccacacccttcactcccgggcaatcgaccacgatcaggacctcgcccagtggatggccactcaccccatgaaggtcctccaagcccatgcccactggcagcgcgtcgtcgacactgtctgctggatccgcgaccacgtcaccaacccgatctacttgcggcagatcgacatcccgggcgtcgacaccaagttcatcgagaccaacaaggggctcctcagcgagatcctcgacgtcgtcctgcccgcgagccggatcaatgccgacgcgccaaggacggatttcgccgcgcgctacggcttcctcagcaagcccgtctatgtacggctgcgctacctagccgaccagccgggcccattcagcgaactcatcgttcgggccgatgagctgaccgcccagccctccggcgtccgccgcgtcttcgtgctcgaaaacgagatcacctacctgtcgcttcctcccgtgccgaatgccatcgccatcctcggctccggctacgccgccacactcctgcgccatctgccgtggcttgccgacgtcgatctcaggtactggggggacatcgacacgcacggcttcgccatcctgagccaggtccgccgccatttcccgcacacccgatcgctactcatggatcggagcactctgttgacccacaagtcgcactggggcgaggagaagacccagaccatcgaaacgcccgaccatctcacgccggacgagagcgaactggaacgggatctgcgaatgggtacctaccagccgcgccttcgcctcgaacaggagcgcatcccgatcagcactgtcgaacgggctcttgcggggccgtga

SEQ ID NO: 45732 - DNA, 1485 bp, Acetobacter orientalis 21F-2
gtggcgcagatgaaatttgattttgcaacgctgaatggtatgcgccagcacaaccctgcttggcggctgctctgctcagaccatgcgccccttattcttagctttttgcatcaggtgtttgtccggcccaatgtgcgcaacctagaagccgagagtatggctgaagcgttagaggacacgttgtatgctatacgccagcaccttgatgacacagccttccccagaaccgcacgcgagtatttggaagagtgggcctctcctgacaaagggtggctaagaaaattttatcagccgggtaaggacacggcgttattcgacatgacgcccaccacagagaaagccctttcgtggctggagcagttggcagaacgtagctttgttggcacagaatcccgcctgagaaccctgtttgacctgctccgccagatgaatgaaggtacccagagcgaccctgaccagcgcctagcagacctgctgcaacgccgggctgacattgatgctgaaattgcccgtattcaaaacggcgatctggccctgatggacgataccggcattaaagagcgctttgcacagtttacccgtatggcgcgtgatctgctggctgacttccgggaggtggagcataattttcgccgccttgaccgcgcagtacgagagcgggtggccttgtgggatggcaccaaaggggcgttgctggatgaaattttaacgcaacacgaccttattaatgagtctgaccaagggcgtagctttcaggctttttggaactttcttatgtccaacagcaggcaggaggagttgtcgcagcagttggagcatattctctccctgcccgttattgcggccatgcaaccagacccccggctacgccgtatccattatgactggctggaagcgggcgaccacacacagcgcgtggtggcacaactctcccaccggttgcgccaatttctggatacccagaaccggcaagaaacgcggcgtattatggaaattctgcataatatcgaaacgcacgcttttgcgctgcgcccctacctagctgacagcccgcctcatgaggcgctaatagagcttgatgccatggcggctaccccagaccttgtgatggaacgccccctttatgcgccaccccacccaacggttctatcccttgagcctatgttggaagaaatagcggatgatgcagacccaacggccctgtacgaacaaattgtggtcgataagctgcgcttaaccgaaaatatacagcaggctttgaccgaagccccgcagattaaccttgccgccctcctgcgccgccacccgctagaacaagggctttctgaactggttgcttatcttcaacttagcagtgagcgctttgagagcctcattgatgaaaaaaccaacgatcatgtaagctgggatattatgaccgcagacgggtcgagtataacgcggcatgccaccctgcaacgcgtcatttttgtgagatcggtatga

SEQ ID NO: 45733 - DNA, 765 bp, Acetobacter orientalis 21F-2
atgagccagactgttaataccccagaaagcacacaggctacggcacaaactccggcctctctttccacgctggcaattactttgctgaaaggcgtgatctaccgagaagaagatgaaggcgcttgggggcacctgctccacttgcaaaaccaggtacgagactacgtctctgtgcttgggctggtgttaataatcgacccgactgagggctatgcctacctacgcagcgtgccagacacagaggaagaagacgcagcagccccccgtatgccgcgcttaattgcacgccgcccgctttcttttcatgtgagcctgcttttagccttactacgccagaaacttttgcagtttgatgccataggcggtgaaacacaccttattctcagccgagatgaaattgcctatatgctccagacatttttgccagaaagcagcaacgaagtccggcagcttggccagattgaaacctatattcgccgcgtggcagagttaggttttttgcgccttataccccctacaagcccagaagcccctaatgcgacaccccattatgaggtgcggcgtattcttaaggcgtatattgatgcagactggctggccacgctggacgaacggctagaagcctatctggcacatgcccgcagcctagagcaggcagagagaccgctacttacccccacaacgaacctgcacgaccccgccccccagcacgaccccgattttttttgtgaccaagccgatacaggactaaccaaccgtgactga

SEQ ID NO: 45734 - DNA, 3393 bp, Acetobacter orientalis 21F-2
gtgactgacacccagcaagccccgctcgactttgcggtcgatgaccgtttggccggtttccggttacaccgcctagaggtgctcaactggggcacgtttgataaacgggtatggcgctttcaacttaatggtagaaacgccctgcttacgggtaatattggctcgggcaaatctactctggtagatgctatcacaacacttttggtgcctgcacaacgcattatttacaataaagccgccggagccgacacgcgcgaacgctctttgcgctcttatgtaacaggccattataagtctgaacgtaacgatgccaccggcaccactaaatctgtcagcctgcgcgatacgcaaagctatactgttattttgggtgtttttaaaaatgaagggtatttgcaaactgtaacgctggcgcaggtcttctggattaaaaaacaacaagtacaaccagcacgcttttttgtttgcgcagaaaaagaactctccattcaagagcattttaccgggtttgatgccgatattttacaattacgcaaaaacttacgcgcattgggggctgaggtagaagacagcttcaaccggtatgctgcatggtttcgccgccgttttggcattgaaaacgaacaggcgttagacctctttttgcaaacagtctccatgaaatctgttgataatataacagattttgtacgcgaaaatatgttggcacaatttgacccgacagagcgaattcatgctcttatctcgcactttgaagacttggacgattcataccaagctgtgctgaaagcacaaaagcagataagcctccttaccccccttactgaagactttgccgcttacaaagacagtgaagcccaaagtgaaacattaaaagcctgccgccaagcgctgcccggttattttgcaagccagaaagccaccttactggacaagcaaattgccaaagagcaagaggtctgtgcaagcaaccagcaacaacttgcaacacaagagacaacccgcacaaccagccagcaccaacttgaagagattaaacaagccatttacgccaatggtggcgaccggttggagcagttggctgttgctatacagcaagcagaaaaaacgcacgaagagcggcgtaaaaatgcatctcattacgcaacgctgatagaaaaactgaactctaaacccgctaactctgccgaagactttcaggagcaagtgcagcacctgaaaaaacagaaaacagaatggaaaaagcaagatacgtggcttgcaaaagacctgactgaacaaagcattctgtttcatgaagaaaaaaaccagcacgacgaaattgttagcgagctagatggcttaaaaaagcgccagagtaatattgatgaacggcaaatccgtatgcgcaccatgttgtgtgacgcattgggtgtctctgccgaagagctcccgtttgcgggggagcttattcgtgtaagagatgatgcacgggaatgggaaggtgctgcagagcgcctgctgcacggttttgccttatctctgcttgtgcccgagcacctttacacacaggtggtagactgggttgagcgcacccagctaaaaggccgtttggtttattaccatattcaaaaaaaccgcacagggtcatctgctgcgcaccaccataatacgctggcgcagaagttagaggtgcacccagactcttccatgcgcctttggttagaaaatgaacttgcgtaccgttttagctttacctgctgcgaaacgcaggacgatttccgccgctccagcaaagccataacccgagccgggcaggtaaaagaacccggtggacgccatgaaaaagacgaccgccaccgtattgatgaccgcagccgctatgtgctggggtggaataacgcaataaaaattgccgcccttgaagaacggcagaagaaacagcaagcccttattcaaaaacatgctgaggacattgcacaggccaacaacacccgcaaaatgctgcttgagcggtttgagactttaacacgcctagagcgttaccccgattatacagaactagactggcgcagcgctgcacaaactgcggcccagcttacagcagagcgagaagcgctaacggcgacatctgacgtgctacgtgagcttaaacagcaaaaagaccacgcagaacaaaccctacaccaagcagaagcagactatatgcttttgtataaaaagcaggctttgttagaacagtccgtaacaacactgcaagcaaacctagagcaatgccaaactgtgttaagcacttacacgctaaccccacagtatgagcaagaacttaaccgcctgcaaaccgcacaaaacactgccgaactggccagcctggatgcctgcgttattgctgaaacgcagctgagaaatacgttagacacacaaattgaccaccaacaacggacactcgatagcctgcgtgacagcattttgcgcgacatgcgcgaatttaaaacaacgtacccggtagaagcgcaagatattgacagcacactaagggccgggccggaatattgccatttactggcacaactcaaaaaagatgacctaccgcgttttgtcagccggtttaaaagccttttgacagttaatacgattaatgaaattgctaattttaatgcacatcttgcacaagagagagaaattattaaagagcgtattgccgttattaatacgtctctgacccaaattgactataacccagaccgctatattaggcttgaagcacaccagacactcgaccctgaaattcgcgattttcaagccgctttacgcgcctgcactgaaaataccgtatcgggcgatgagagcgagcactactctgaacagcgtttttctttggttaaaaccattatagagcgtttccgtgggcgtgaaggccgggcagagctcgaccgccgctggacgaataaagtgactgatgtacgcaactggttttcttttgcggcaagcgagcgctggcgtgctgatgaaaccgagtttgaccattacacagattcaggcggtaaatcaggcgggcaaaaagaaaaactggcctatactattctggccgccagtttggcctatcagttcgggctagaatggggggaagtacgctcacgctccttccgctttgtggtgattgacgaggcctttggccgcggctctgatgattcgacacaatatggcttacggctgtttcagcaacttaatatgcagcttcttattattacacctttacaaaaaatacacattattgagccatttgtctcaagcgtaggctttgtagataacaaagacggtaattattcacgcttacgcgtactaagcattgaggagcattttgccaacaaaacggccttgcaagagcctggcactgaacacgagagagcatga

SEQ ID NO: 45735 - DNA, 1464 bp, Enterobacter cloacae; identical to SEQ ID NO: 44659

SEQ ID NO: 45736 - DNA, 606 bp, Enterobacter cloacae; identical to SEQ ID NO: 44660

SEQ ID NO: 45737 - DNA, 3381 bp, Enterobacter cloacae
atgactaatgcactggagctcgattttagcagcgacgagtcatctgccggttttcgcctcgaacgcctggaaatttttaactggggtacatttaacaatcaggtctggacctttaacctggagggaaaaaatgctcttctcacaggcgatattggttccggaaaatcaacccttgttgatgcgataaccacattattggtgccatctcatcgtattgcctacaacaaagccgctggagcggaaaataaagaacgctctctccgatcgtacgtgctggggtactacaaatcagagcgcctggaaaacagcatggggggaaaacccgtcgcactccgtgatcatcgaaattattccgttattcttggtgtttttcgtaatgaaggttttggtcaaaccgttactctggcgcaggtattctcgttaaaagaaccggcaggaaaaccggtcgctttttacgtcgttacggataatgatctctctatcgcacaagatttttctggtttcggttccgatattaataacttgcgtaaaaaactcagaaaaaacagcgcagagatatttgattcattcccaccttacggtacctggttccgtcgccgctttggcataaacaatgaacaagcactggagctgtttcatcagaccgtttcgatgaaatcagtcggtaatctcactgagttcgtccgtagccatatgctggagccgtttgatgtggcccagcggattacgcatctgattgaacattttgacgatctcaatcgcgcgcatgagtcgatactgaaagctcgtcgacaggttgaccaattaaggccacttgttgatgagtgcgacaggcatgcgcttttgattcaggaaacagagaccatgcgcgcctgccgtgatgccctcgcaggttggtttgccagtttgaagcaaacactgctcgaaaaacggctgcttaacctcaaagatgagctacagcgctatcaaaatacgcttgcggtaacggctgaacaactgtacgaaaaacgaagccaggaaaggcagttacgtgctgatattgccgctaatggcggcgatcgactggaacaactgcgcctgaacatcagccatcgcgagcaagagaaaaatcgtcgtctgaaggcggcagataactataacgagctattaggtaaagttaatctctcagcggttaaagatcatgatgaatggctggcgacacgccagcttttgcaaattcattctgatgagcttaccgaccgcgaagccgagttgcagcaacaaaaacacgagttacatttcaaatttactcgcaaacgtgaaatacaccagcaactgagcgctgaaataaacaatcttcgttcacgacgcagcaatatcgatgcccgacaaattacgctacgcgccgctatctgtgaggcgctcgggctcaatgaagaacatcttccctttgtcggtgagttgatcgccatacgtgaagaggaaaaagcctgggaaggggctgcggaacggcttttacacggctttggtctctccattctggtctccgacgaacattacccccaagtctcgcagtgggttgaaaatcaccatctcaatggtcggttaagttacttcagggtaaatgctggtatgcatcatgctgctttatccccgcttcctggcgcgattagcgaaaagctacagataaagcccgatactctctggtatgactggctggaaaggcgactactacaatttaaccatatctgttgtgacacgctggagcagtttcgtcgtgagactaaggcaattacccgtagcggtcagatcaaatccccaggagatcgccacgaaaaagatgaccgtcataatattaatgaccgcagtcgctatattctgggatggagcaacctggagaaaatcgccgtactggaaaaacaggcaggggatctggagcaagagctagcagagctcggaaaagagataacatcaattgatgtaaaccttaaaaacctgcaacaacaacgcgatatttataatcgcctcagtgaacataacgattatcaggctatggactggcagccgctggcgcaggaaatcgcccgactggaaattgaaaaacgcgaacttgaagcgacgtccgatcacctggcggtgttaagccaacaactgaataagatcctgacggaaatccagacgctggagacaacccatgcggataaaattgatttacgtggacgcacgcaggaaaagatcgatcgcgcagaggagagcctaaaggaagcacaagctgtgcaaataacagcaaatgaacagaacatgcctcgctattatcctcagctggagcactggcgtggagaggctctcccaagcaggcaaatcaacgtcgagtcttgtgataattgtcagcaggagatgcgcaactggttgcaggataaaatcgacaacgaagataaaaaaattggccggtcccgtgacaaaattatcaacagtatgacgggttataatcatcagtatccgcttgagacgcaggagatcgacgcaaatattgaatccgcccatgaatatcgtcaaatgctaaacgcattgcaggctgacgatctcccccgtttcgaggctcgctttaagcagttgctaaatgaaaatactattaatgatatcgccagttttcaaagccatctcaaccgggaaagagagaccatcaaagagcgtatcgaaaaaattaatgattctctggtccctattgattacaaccccgggcgctatatttcactggtggctcaactcagcgctgatgcagatattcgtgattttcagaatgaactacgcgtctgcacagagggtgcattgacgggctcagaagatgaacagtattcagaagacaaatttttgcaggtgaaacgtattattgaacgcttcaggggccgggaagggttaagcgatcatgacaagcgctggaccacgaaggtgacggatgtgcgtaactggttcatcttctcagcttccgaacgctggcgagaagatgataccgagcatgaacattattcagactctggcggtaaatccggcggtcagaaagagaaacttgcctataccattcttgccgccagcctggcttatcagttcggccttgagtggggtgaaaaacgctcacgctcattccgcttcgtcgtcattgatgaggcattcggccggggttcagatgaatctgcggagtatggtctggagctctttaagcgcttaaatctgcaattactgatcgtcacaccattgcaaaaaatccatattatcgaaccgtatgtcgccaacgtggggtttgtgcacaacgaggccggaaagatttctcggctgcgtaacatcagtattgacgtctatcagcaggaaaaagcagagaaaaaacatgagctggacaacgcctga

SEQ ID NO: 45738 - DNA, 1152 bp, Enterobacter cloacae; identical to SEQ ID NO: 44662

SEQ ID NO: 45739 - DNA, 1497 bp, Bifidobacterium angulatum
atggaacgtctccgcccggtatatgagaccggtgtgctgcgtctgctgatgcgtgccaattcgcagctgtacgtggcgctgctccgctcctcgttcgatccgctgaccggggaactgcccagggaagtcctcgaggagcgtttcaccagggcactgtcgcaactcgtcgaaagcggtgactacgcgttcaaagacgatcagacgctgcccgatgccgcgcatcgcattcttgtggagctttcccgcgaaggcgatggcgactatgcatggcttgcgaattccctcgacgtggcctcgcaccgctacctgtaccgtctgaccgcacgcgcacaccgggcgatcgaggcgctgtcccatcttgaagacaccacgcaggcattgtccggcgcccaggccaacagcatcatcatggagatcgaacatgcgcgcatgcagctcaccgccgacccgcataaacgcatcgaactgctgaaccgcgagatcgaggaacggcagaaggagatcgaacagcttgaacaggacggggctgtggaacagctgtcgtccaaacaggtcgaagacatcatcaacgtggtgcacaacacgttgcgcggcgtacctatcgacttgcgcgaactggcgctcgcggagcgcgacaacggcgatgcgcttcgccgccgcatgcaggccggcgcgatgtcggtggagaacatcctgagcgcataccacgacgaataccgcaggtccttccgcgaatccgacagcggcaggcgtttcgaggacgcgttccaggtcatcgtcaccgaggaaggccgccgcgagatcgacgacgccgtgcgcgatatcgccaaaaacccatatcttgatggcgagccgggcgtgctgctcaatcaggtcagggccgagcttgaacgcatctacgaaggcatcgaggatgtacgccgccagatgcgcgcctcggacgaggcggtgagccgtctggtgcggcagcagaccgatacgcgctaccgcaccatgttgggcaagctcaacgcgctgttcgccaagatcagcggcgaggcgaaggccaatccgaacagtgcctccaggccataccataccgataccggcgccgtgcagttggcggtattgcccacgcgcccggcaaagccgatgattcatgcggccccgccgagcctgcaggagcgtgaaagcgttccgacagtggattcgccggatctgaaagccatgatcgaggtcggcggtccgaggcttcggcacatgatggatgtgatcagacgctcgccgcgcatgcttgccgatggcagggtggaccttgccgccagtttcaatgcattgcccgaacgggaacgcagggaaagcgagatcgttggtttcctcagcgcgctgcatgcgcaaagtgacgcgcagtacgtgcaatggcattgcgtatctcttgacggtacgccgcgagtgtggcgcaccaagccgatcgcggcaagcatgcagaccctcgacgaaatcgtgggggatgagtga

SEQ ID NO: 45740 - DNA, 3498 bp, Bifidobacterium angulatum
atgactgacaacgatatgcatatcattgcggaccggtggatgctggaaagccgtcaggtgattaactggggatcatatgagggctaccacgagttcaagccgtccatgagcgacaagatgccggtcaccctgcttgcgggagccagcgaatccggaaagtccacgctggtcgacgcgcagatctccctgctgtacccgaccggtacgccctacaacaaggcttccaattccggtcgttccgagcgtaacgattacacctacctgcggggcatgctcggttccagcgacagcgagaacggcgagaccccgatctatctgcgcggccggagcgaagacaacgccccgcaggccgtgtggggcgcgatcgtggacacgtatctgaaccgtaccaccggggcggtgctttcctgcggcaaattcctgtatcttgcgtccggcgatggtcgtggcgaggttcgcaggcagtacatcgcatggaacaggaaaatcgatccgcgcaagatggatcgcttccgcgatacgccgttcaccgccaccatgctgaagaaaacgtaccccgaatgcgattccttcccgaacgcggaaggcttccatgcgtacatctggcatgaaatggggctgagcccggaggcttgcaggcttctgcacaagatccaatccgcggatgcgccatcgcgcctggacgacatcttcaaacagggcgtgcttggtgtgcccgaggcgttggaactggcccgtaccaccgtcgacgattacgaacggtacgacgagaacttccgcagcatggaggagaaggccaagcgtatcgccaaactgcgcgacattcagaaccaatatggcgaatacaccgaagcattgcaagccaggcgtgaattcgacgcggtcaacccggacgatgaacagggcaatgccacgctcggtgcctgggcgtattcccgtatggccggcgaagtgcgttccggtctgccgatcgcacagcgcaaatgcaaggagtacgagcgcaagcttgaggccgcaagccgggaaagcagcgacttggagatcgaactgaacgaggtcagggatcagatcagcggcatcgacgacggctcgctcgcacggctcgaaggcgatctggaacgtgcgcgcagggacgccgaggagacacgcaaacaacgcacgagcgtgcaggcccgcttccagcaggccggcgaaaccatgccgaacgatgaggaaagctggaacgccaaacgtgacgccatcgcccaggcgctcgactcctacgatatcgacaaggcgcagcgtgagaaccagcgtgatgcgatgtatgacgaggtgcgtgactgccgcaaggagcgtgaaagcctgcaggccgacctgaaccgtcagcgcaatcagaaaacccgtatcacgcaggccatggacgaggcacgcgccatgctggccgatgcggtggggctcgatcccaagcatttgccgtatgtggccgagctgatggacgtgcgtgaggattccgaggcctggcgtgtggcgatgaacgtcacctatgcgccgatcgcgcagaccattctggtcgacaagcgctacgagcagggcttcgccaagaaggtcagcggcatcgacccgcgtctgatgatccgccgcacctggcagttcgtggataccgaagcctcgtacgacaccgcgagcaccaaggggtggctgtccagcaagcttcgcttcaaagccggttcgccgttcacgggctggctgagggaacaggtcgcgtcggaacgcttcgacgcgaaatgcgtgcagaccattgacgacgataaccgtgacgaacgccaggtgcagacggatggccagctgaaatccggtgcgcatggcttccacggcatcaagaacacgcatatgatcatcggtttcgtcaacgaacggtatctgaccgagttgcagcgcaagcttgagaaggccgtcgagcagctggccgaggcgacgatccgtcatgaacgcgcgaagcgccaggtggatttgctgcgagaccagaaggaactggcgaacttcatctccgatatggattggagcaaggtcgatgtggtcggtgccgagcatgcggtcgaagacatcaagacacgcatcgaggagattcgcagcaatcccgaactcgccaagctgacggcgcggcgcgacggtctgctcgctcaggtcaatcaggccaatatggccaaggcgcaggcgcaggtcgacgtgaacagcgccttgcatattgtgcaggccgagcaggattggcttgacgcctatggcaaggccgagttcgacgattcgcggttgccaagcgtattgtccaaccagctcaccgacatatacgaggcgacctatggcatttcctccaacgtgaaccgtgcggagatcatcaccgcgaatgtggtcggcggcagcggcgtattcgccgaccgtgtcctgcacaacatggccaatgagatccgcaagcgcatcacgtcgctgaacgatcaggccggtgtgatgcgtgccaacgtcgagacccgtatggcggattatctgggctcctacgctctcgacgacaatatggtcactgcaagcgtggaggaataccggttctatgtcgaggagctgaaaagcctcgacatgctcagcacgcggaaggccacggacgaggaatacgtgaacagccttgacaagctgcgcatgagcttcatgcagatcgcccgtgccgtcgataccgataagaaacgcatcgacgagcagcttgaccgtatcaacgcgatgctgaaagggcagcagttcggcccacgtcacggcagcctgtcgatcagcgccgaagtacataatccggagcatgagttcgtgggactgatgaagaacaccatcgccgatctgaacgattggaaacaaagcgatcaggggaatccggccgccacacgcaagcagttcgagcgctgccgcgcgctggtggagcgattgcggcaggagctcggccaggtgcgcgacgcgaatggcattaaaagctatggtgcgaagaatctcgatccgcggtgtcgctgttcgttctacgcgctggtcaagcatgaggacgggccggacgaacgcatcacctcgaccggcgggcgctccggcggcgctttgcaggagctgacgtcgttcatctatggcgcggcgttgatctacctgcttggcggcgatgtgaccggtcaaccgacctacaccacgctgttcctcgatgaggcgctgatcaaggcggatggccgctatacgcagcgtgcattgggcgtgctgcccaagcttggcttccaggtgatcgtgtcggcgccggaaagcaagacggccgagatcctcgaggtggcgaccaaggcgtatgtggcgtacaaggatgcgtccaacgggcgttcctatctgcaggagatcacctccgacgagatcacccggcttgaatccgagatcgcggccgatatggacggcgagacgggtgaagggcggactgacggcgacgccgaaagcggggacggctcggacaggtag

SEQ ID NO: 45741 - DNA, 456 bp, Bifidobacterium angulatum
gtgattgtggagaacaaggacacctatcaggagatgccgcagatcgaggattgcatctgcgtcttcggttgcggaagggcagcgaatcgcatggtttcgctgcttccgtggcttgccgatacgccgcatgtcgtctattggggtgacatggatgccgacgggcttgagattctttccggcatacgtgaatcgggaatcgactgcgattccatattgatgaatatggacgcctataggcgttaccggcggttcggcaccgaatatacggaacagggcaggaggatcgagccgcgcaaagtgggtgcggtgccggggctgcgtgccgaggaacgcgaactgtacgaggcgctgtgcaccggcgaaggcgtggggtatctgcgcgtcgaacaggaacgtatcccgatcgtggatgccgttgccgagctgtgcgcggctggtttcccgattatcgtctga

SEQ ID NO: 45742 - DNA, 1386 bp, Marinomonas sp. S3726
atgctctttaagcatttacccgatgagatatttcaggccttaagtggctcaaacaaacagctagtggaagctgtactgtttgatttatcagatgttttttatgattacgcagaagacccaataaaagataaatcaaccattattgaagcaatcgaagatagtttgcataaggttgatatcttatcttggcaagaagatcaaaaagagtcgtttgaatcccctaaaaccattcatgattatgcgctgcgtatctatcatagattagttaacacgggctggctggttgaagagcaagagctttaccgcgttagtgtgctgatgacaccccaaatctctatgctgttgaaatctctggttgaaataagtcgtcacggtaaacgtaattatggtgctactgtattaagtattttaagtaatttagaatcagtggcattatcaccgttagagcgcggtgtaacgttaaatcaggctgcagcagctgctcgtgatttttctgctcacctcaatcaaattctcctaggtattcgttctcttcagcgagagctttttgctagccgagacccaaaagcgatagtatctggtttcttcgaattatttgtcgaagggatcttaatcgcagactataagacccttaaaacaagcaacaacccctttcgttttaggcgtcaaattttagagttagtacaaaacttcttggcagacagtgattctctatatgcaatttctcaatgctatagcgagcaacagcttatatctattgaaaaagctcaggcgcttgtagagaaagactgtcgtgcaattttacaaacctttaataatatcgagcagcgattagagcgaattgatgagtataggtaccgtctagaaaagcgtgccgcagataccgctcgatatatggacagctctcgacctggtatggcaacaaaaattgctaatataatcactaatgttgctcgtcatgagtcggtacccgttttaaagcaaatgttaggcgttaaagtgttaggtatggagtcggccgcgacaccaagccgaagaagagaaccgccagcacctagggtggtaacacctgccagtgtgtcagagaatgcaattaagatacgtgatgcacaaagacgcttccatgaagctaggcaagttacggttgcaaaactacaaagttatctgcaacgccaaatgacagaactagcagaaaagcatattactgaatttagcattaattctgttgaagattttgtgtgctttgatcacttgcgatatgtaggttctttgggtgttaatgccaaaataattgagaatgaattcgaaataaaatttagtgaacagtatctcgatgtgcaccagtttgttgagtgccgagagtttgttgtggttcgcaggagatag

SEQ ID NO: 45743 - DNA, 639 bp, Marinomonas sp. S3726
atgttaagagaattaaaaaaagttgttgaagagtctggtaaagacgctcaagagtttcaacaagctgcgaactacttgttatctcatcagtttgttagtgcttataagcacggacagcgtaaatacttcttattagtagaagcatatcaaaattatttctcgaacgtctttgatgctttggggatgaaattatatgtaaacgaaaatgaaagactgttaggtttgttgccagttgaaagagaagcatttgtgagacttaaaactgatgagacattgtttcttttaatcttacgtcaaatttatgaagagaaaattgaaaactttgaagtcgataatggctttgtagcaactaatactcacgctatcttagaaagatacgtgcaattagttaagcgtgaaattcctaccgaaacacgctttaaagatattttaaccttgttaagtcgccatggtgttttgataaaaggtaaggcgtacgaagaagatagtaaaaacctagctgtgcatgtcacaccagtagttcgacttgttgtaacagaagcttatttacgtcagcttgagtcttttaatggttctgatcatgaacaagacgaagaccaagatgaatcgattcaactagatgccacaagtgaagagtag

SEQ ID NO: 45744 - DNA, 3414 bp, Marinomonas sp. S3726
atgaaaaaacttagcagaattgtattagttaactggtacctactcggcgcagaagaaatcgaaataagaggaaatacagcgattattggaccaactggttcaggtaaatcttctttattggacgctattcaaactgtcttaacgggtgcaagtaaaaggcacttaaattacaacgctagtgccaatgatggtaaagcaagtggtcgaagtattcgttcttatatcttgggtatgattgattctggccaacaagatgcgaaagtgtttggtacgtcgccaagacaagatgcagtgagttatttaggtttggtatttactgattcaaatacaggtaatgaatcaactattggtttaagtttgtctgcctcattatcctctcctgaagaggacgtattaggtcgttttgttttatctaattatggtgtggtgaaaggcgactttattgaagagcttgaaggtagaagcttcaaagcaaaaccctggttagatgttcgtgaggctatgaaaaaggtctgcttagatccatttattaagtcaggtagtgcctctgcaactcaatatattaatcgctacctcgaagagttaagtccaagccctgatcaactaataactttagatggctttttgaaaaactttaaaaatgcccttaaatttgtacctattgcttcaccaactcgttttgttcaagactttgttttagctgagcagccattgcaggtgagtgcttatcaaaagtctttaaatgaatacagacaacttgaaacaaaaactcaagaagttgcaaaacgaatagacgacttaaacttgatagcggttgattgcgagaaaaaacgccaacaagaaaaagcgaatatcaattatcaatgggtagcaacagaggcgcgttttgatgagttaggtagtaagcaagatgaaattcaggataaatatgaggttcatcaagagcgtgatgatgaaattcagcttgagctaggcacgcaaaacgatttatcaaaacaacttcaaagccaacttgttaggcttgagcagcagtatgaacattcagatgttggtttaaagttacagcagcttgagcaaagtcgtaaattactagatcttcatgggcaacaagataagaagagtctgttgcaatgcaagcagatgctgacccttttggcttctttgtacgattatgaagatttactttctaatgagattcttggtttatcagctcgagctggtgacttatacaaaaaaataaacgatcagggacagcttgaggttgaatcgcaccagtttgataaggttcttgcggaattatctaacttactagatagagaaaaaacagaactctttagacaaagatctgagcttaaccggaccattttgaatctaaaggatgactgcaagcagttagagtcagacgtttcttccttaaaagggggttcaagtcctttatcaggtaataccaaaaaacttatttctttactgaagcaaacaggtattgaagcaacccctttgagtcatttagcagaagtaactgaccataaatggcaggatgcgatagagggatatcttggacagcaaagggaagcgcttattgttaatcctgaagatgctgaagaggcgattagggtatttagggctcaccgtaagcagctcatgggttgtcgagtaatagatacaactcaaactagactttggttgaatcgtggtgatagatcatccttgttacaatacatacgttgtaataatgatcatgctcaagcttacttgaatcgtcgccttggtggtattaagcctgtcgatacagaaaggcagttgctgcgtgaagatagtgctatgacatatgatggcatgctgaagctttcaggaacgatttctacaattcgtttcacacctcatatgatggttggtatcaatacggatggaatgcgccaatcacgtgagtctcaattgcaaaagttgagcggtgagttgatggacctgttgcagacagatcaaagattagagaaggctgatacattattaagccgtgttgtggcgaatcatcatgttgatgcagatgctttaaaacaacatagtaatgctttaaataaacagcagcatgatattagtttaattgatgatgaaatccatttgttgcaacaaaaagatgacactgaactgcaagagaaaatcgacctgcttaaagaacgtattgcaacagttgagttggaacaaaagaaactggacagagagcgtcaacaaattgctgagcaatacggtagtttaaatacgcaaaaggctcagttaagtgccgcgctatccacattggatgaagatagaacgcgtcttaaaaatcatcaattctatcaagctgagtttgcaagtgagcgttatgagcttcttgaatcaagtatggtcaatggtgctgcaatctacaaagaagccatgagtagggctgaaaaagcacaagaaaaagctcgtaattttgatcaaaaagtcagaaaagaagtcgcagaccactacgctaaatatcataacgctgatatcgattctgatatacaactagactatttggagtctcgttttgaagagtttgaaaactacattcagcatcaagtaaaagtactatctgaaactgaattagctcgttacgcaaaaagggctgagttagcgagaaaagaggctgaagaaacatttagaagtgattatgtttcaaaactgaaagattctcttgatcaggttgctcatataatcagggaattgaatcatagtttaaaacgccgtccatttaactcagaagtgtatcaattcagatactatgcaaatggtgatatgaaggatattttggacttggttgaaaggtttagtagccaagaccaagccaatgttggtggactgtttgacccagcaagtgctgaaaattctgatcatgcaaaagcaatagagtctattcatgaattaatcagtaatgaagataagcagcaagatttagctgactaccgtaagttttataactttgaagttgatattctggatcaagagggtaataagaaaacaactttgagccaacgaattcaaactggttcaggtggtgagcaccaaattccattttatctagccattgctgcagctctatctacaacataccgactacatgaaacggtagaaggcgatatagttggcggattttcattagctatgtttgatgaagcattcaataagattgatatggcaaaaacatcaacttgtatgggctttatgaaagacattggcttgcaagtaattgcagcagcaccagatgataagcgagctgtaatggcggcaaacatggataccattataagtgtttggcgagaaggtggtgctgtttctctagatgtatcttatccaaaatctaaaggacgaaaattgttaacaggccaagttgaaaatttggaaataagttaa

SEQ ID NO: 45745 - DNA, 1407 bp, Marinomonas sp. S3726
atgggctttgacacaattaatacagatctatttaagccgatctcaggtgagacggggcgtttaatgctcgcattgcttgtagagcttgataaatttttagatccagttcagttggttgatgaaccgaatccgcagcaggttcgagtgtttctgagagactttatttctaatacagctctaaatcttggagtggagtctggagaggatgtggctgctggttcagcccctgaacagtatgtatataaccgcttaaaagatactggatggattcgtgaagagcgggaaagtggtttccgatacgttgtttggatgccacaagatgctcgtaggatacttcattttttaggtagcatgggggctgagcatccttcactaggggtagtgtgtttgtcggttcgctcaagtttagctgaagtagtaaaagatccagccagtggttcgcttattcgaaaagccgctgatgatatggaaagctttttaaatcggctacgagccttggtcggaaacatacgagaaattcaccatgtcatcagttgcggtacgtcccactcagataatgattttaccttctattttgaagaatatttgggtgagctctttttacctaatattgagaagttggcactgaaaggaaatccaaacctccatgctagtgtcattcgtaaacttgtaagtgaaattcggtttagtccagagcgtcttgaagagtgtgtcaaagcctataaacgagatgaaatttctcacccttctatcgatcttgttgaagcagatcttgaacgattaagtagttcattcgatggtatagcccctctgtttaaaaagactcaggagtatgctcgacgtattacacgacgaatgtatgaaaaaattaaatacactgttcatacgcctagtaatatggggcagcaaatacagacattgcttaaccgtattggcagtaattctgatctagatcgcttcccaagtcccattataggtgaagaactactttgtgactgccgcatgtcccaacccaaagcaagggcaataacgccagttaagactgaacgaaggcaacaaaaacccttgtgggaaaaacgtgcatataatcaactcaagcaagaacatatccactttcagaaatgcaatccaaataggcttgaacgttttatagagtcaaatctcactaatagagattacatcacgacagatgatctgaaaattaacactcctgacgacatgatgtcggctctacatttacgccttttggcgcagcgcgtatcaaaaacacatatcctctatgagcttcaatccagatatcgtgtagatttcgtcgagggagagtggactgatttagaacagatggcagggcgtcgtttgataatccgcaagaatacttcaatggagaaatactcatatggccagtga

SEQ ID NO: 45746 - DNA, 669 bp, Marinomonas sp. S3726
atggccagtgaaatcacgctcaaagaacttaaagatattgaatcgaaaacgtctgcagattatgtagacagtcttcggaatacaactgcttatctactgcaaaaacagtgggtgtggaaaggaaagcgtggtcaaaaagagcacttcacaatgtgcgaggaaaaccagacctatttccataagatctttgatgctcttgatatggcctggtattacgatagaaatttcgggtttgcaggcatcttaccgagaggttctggtaaacagctagatataacatctactctgtttttgctcattttaaggaaaatgtacgatacagaggcgtcaatgggacgaactgaatatggacgggtgaaaccgcctacagcagaactgcttgatcagtttgaacggtttaaaggagataaaccactcgtcactgataccaatgcagcattagataatttgcgtagaaaaggaattattgaactgggagaaaaagaccctgataccaaactgcacgagattatagtcctccctaatatcacccgtgtagtcagtccagactacattgggacactgaatcgatttatagatagttacctgtacacacaggagtcaataactgatgaagccgttatagaagaagccgattccatagagaatgcagaggtgtcagatgactga

SEQ ID NO: 45747 - DNA, 3405 bp, Marinomonas sp. S3726
ttgatatctggtgaaaatggagcaggtaaaacaactattttcgatgctattcaatttgtcctgatggggggagatcagagaaaagtacgttacaacgccgcatctgatgccaaaacatctggacgatcagcaagaagctatgctctgggggagtttaaagaaaatgataaacaaagctgccagagggaaaatgctaatacatatatattcctgaattggtatgacgatttacagaatccttattcatttgggttatctatttacgctagcagtcaaaccgccaacattgaaactcgggggcatttcatgaaaggccggcatattagtgaggcggaccttttagcgggtgatgatactttcttaccttggcgcgagtttgtagaccgaatgaagcatatcgctaaagatcaacggggggccgtaagctatgagatgatcgatagtgctagagttatccgcgagaaaatatctgaggcaatgtctgctaatcagactcgtagtgcgaaaattgaacctgaccttttagttaaaaccttatcaaacgcattacaattaagaatggatagtcccatcgatctatttatcaggaactttattcttcccccttatcctattgagactgatcaactacgtgaagatcttattgagcatcagcgaattgaagaagaaattgctcgtacagaaagccataaaacagcacgtgagaacctgattacagaggcgaataacgtcacaaaacacagaactaacgctcaccataggctttgggtatcccaagaagccgaagctgttcgacttgatgaagagcttgatcgtaagaaagatgcttatgaagcagtccaaaaacgctttaaaaaggcagaacgtattattgaacaagaagagccacgacttactggactgcaacagcaaagtgaaaaaactctcattgcttggcaaaactcagatgcggctagcttaagtatagcggtgcgaaacgctgagacagaggtttccttatctgagaccgatctaaacaagaaaataaaatcattgcaggcttccgttagtgaagttattgggcggcaattctccaacacactgggcatacaaaactttgaacttttagctacccattggaatgcgttagcaaatattctcgatcaagctaatgttgatagtctttccacatcaaatccagcgaatacgcataaggtaatctgtcaactaaaagactctaaaaaacatcttggagagattacaaagcgcgtagaagttgtggacaaagacctagatcaagagattaaacagttaaagttggaagggaattctctacaaagccgtatagaacggctcaagcaaggtttatcagacattaattcggcaaccagcgcgaccatagagttactaaaacaaaaaggcatcccgtcgactcccgtatgcgatctttgtgaagttaatgacaaagattggcaggaagcggtggagtcgtatctgggacaaaatcgagaagctttagtgatcagtgcacatgattttgatgatgcacttgaggtgtatgaaactgctcggaaacaagatcctcgaataggacgagcacgcatgatcaaccctgatcatgctcttcgagcaaacaagctacctactgatcatatggtttcaacccttgttgaaactgataaccccatcgcaagaggctttatgaacattgtcctcgacaacactaagaaagcggctacacacaatgatctccgaagagagcgaaaagcactaatggcttctgggttaacaacagggggaggtacagtaggtggcactgctcggattagcggattattgattggtaagtatgctcaagtcgaacagcgtcaacggttagagaatgatttagatcggctggcacaacgcctagccagtatcaatacaccagcagctaccctgagtaagcttaaccgtaaatgggcaggaatatctgcatctatccttgacagatcagaggatgttcaagcacagagcgaacaactggagattcataaaaaagcattgtctgtagctcaggagagtttgaagcctctgacctcggaagatgagcgtttgaagaacgccaaagaacaagctcaaaatgcttatgagaagtgtaaccaagcagtcattgaagcaggtagtgagcgcaagcaggcagagttagacatcgctgctttaggtaaagaaatcgaagacctttctaagctaaggggggaggcagagaaagaacgtagcaaaacagaaagcttacctttacatgatgcaattaaagctgacgaggcttggcaggcctacgaacgtaagtttgagagccaacaagatcagtattcactgattagaaatgaagctcataatgagtcacagacggcaaaagagaaggcaatccacgctcgcggaattctgcgagaaaaagtcattgagttcaccaatatctttgcggaggacatagcgaatcgactggagttgcttgaagctgcgaaaacagataattctaatgaagatgcgtataccctcatcacaacggattcctctgattgggtaactcgtatcctagcagttcagcttatagagcatcgtcaggcagctcaggatgcggctaagcagatggagaaaaacttccgaggcatcattgtcggtgagttacaaaaccgttttgagcagatgaaatacacgtttaatcagcttaagagtctgcttaaaaagattcctttccacgactacatctacagttttgattataaggaagtgcaatcggaaagcctcaaaatcatctatgaatatattacaactgcagacaaagaagagactgaactggttggaacaatgtttgagacagaatcagagcatcctgcaatcgacctattaaaagaggctctcatcaacggagacgatctaattaatgagattagggattatcgtagtttctttacctacgatatgaagatgcgaaaccctgatacgggtatagagcgtcgtgtggcagatatgcaaagcactggctcaggtggtgaacagcaaacccctgcctacattgcacttgcggccagctttatgaatgtttacaaaatacaagggcgctcacctagaggtgcatcgctggtactcttggatgaagcttttaataatatggacggtggtaatgcgagtgctgcggtttccttcctgaaagaaatcgggcttcaacttatgattgctgcgccaccagaggttactctgaaaatcggtaaagaaatggatcagatatataccatttgccgcgaaggaagagatgtcgtgatcgatcacacacagctttttgatgcaggacagtctcttattgaccaactgaatcctgaataccatccagagcttgttacagagcgagcagcaatattgaaatctcaagctgaagtggttacttga

SEQ ID NO: 45748 - DNA, 1533 bp, Oleispira antarctica RB-8
atgttttttgaacaggaaagggggcagtttttccgccctttaacgagtaaataccgcgctcaggtcttggaatgcctaaaagaactgtatcaacgcttatacagcagtagtagtgctgactacggtcaggctttgcagcgggatatcgtcattgaaatttttcaagaagctttagttcgagctcctattttagcggatggagatgatgccgatgacttaattaaggtatctgttaaagacgggcagaaagacagcgctaaagatagtcgatttcgtaatagccgggaacaagccggttgggtgttgaatcaactcattgagtttggttggatggaaaaacaggttgatgaagcgaccttgcaaagcacttttgcttttagccgttatggccgtcaatttgtagacccgtttatttcagaaagtcgtgcttcagcgcgtacccgtcatcgaaatacccgaaatactcgaaattctttggaagcttttttggaacgcggagaagtctacgatttgctggatgcttttgaatactccgagcgaattatcagtgattttaccgatgttatttccgagctagaagagcgcaagcgagacttggtgcgtgagatggaagatcaaatgctggtacagcgcgccagtgaagaatttttcgactttatggagaagcgctttcagcctgatttagcggtacgactgtcagcggataacgttgaaaaacatcgtgatcgaatcaatgaattattggaccaagtccgtaataagaataaagcgtacaaagcgaaagccgaagcccgtttgcgtgatttattacccgaactcatacagccaggcgcttccgttttatggaccatactggatggaatagaacagcgcattcgtaatgccagtgaagtcatgctgcctgctctgcgtaaagcattacaaggttttactaagcgcgcggatattattattcgccaaatgagttatctcgcatcacagcagcataatgatgtactcagtgtatgcaaacgactggctgaattagaccccaaagatcagaataagcagctaatggccgcaggtcggttaatgagtgttcccgaggtagccttagttgatcctgcccaagtacgcctagcccctccgcgtaagcgtcgtattattgaagctgatttggatgaaggtaatgaagcctttgacatggatgcacgtaaagatatttatgtgcagcaagtacttgatcaggcctttttcattaataacaatgctttgcgcagctatatgcagaaacacttgttggcaggaaaagttatttcaactaaagacctacccatcgagagcgcaaaagacttcttagcagttgccaatgcgattggcttagcatcaacgagcagtttgtcatcagattttgaatttgttatgacgtataaaaataccgagcgagatgatgtagaaagtgttgcgaacggaccacactacttcagccaaaaagaccactttaccgtggaacttattaacagcgaccctagtaagcaagctggcgctcaatag

SEQ ID NO: 45749 - DNA, 909 bp, Oleispira antarctica RB-8
atgttgcattttattgagcaaaaattagagaaacaagggctagaccgtcgtgagctgtctgaattattaattcgattattggattatggggtgatctgccgtgacgagagtcaggttgagcagcagctgtatgatcgttatttacgcttagaagaaataattgccgattatcttgaattaattggagtacgagttcagcacgataaacgttttcagtttattcgactatacccacccggcgcacaaattcctggcgttcaggatgagccgaatgcaattcaaagcccaggcttgcgcatgcgtttaaatcaaaatgaagttgccttgattttggtattgcgcgcgcaatacgacaaagccttgcgtgaaggtcaggtggatgagcaaggctgtgtgatggtctcacttgaatcactcagtattgcgattaaaaatttattaaaacgtactctgccagacaatatgaccgagcgtaaacaactttttcgacgcttaaaacaattacgtttgatccagatagcgaacgaagatcgcttagatgatggcgatatgtggatgcgtattcgtccgatgatcatgagttacgtaagcgaacaagtattggccgacttaattgaaaatgagcaagcctcggttgatatggctgatgaagaaagtgctgaggcagaaagctcggatgaagcaagtacggatgacgaaacgactgagataaaaagctctgatgatgaaagctcccatgcagaaaactcagagatagaagactcagagatagaagactcagagatagaaaatgtagacataacagaagaagcacaagctgaagataaagaagtcgctgaaaaagcggtggctgataatcagactaaagcagagccgaaaagtaagacaaccagcttgtttgcggaataa

SEQ ID NO: 45750 - DNA, 3642 bp, Oleispira antarctica RB-8
gtgtttttaaagaaatttgtatacgtaaactggggtaatatcccagcgctagaatttgattttggtccgatcaatttactatccggtggtaacggctcaggcaaaacaaccgcagcggatgccatccaaactgttatgaccgcggctcacgatacgttattccattacaatccaggtcaagatgaagcgacacagcgtgggcgcggtaaaaacgtacgaacgttagcttcgtatgttctaggttgtgatgacggtagctatgctcgtccaaatggtgccgtcggatatttagccgccatatttcatcccactgaaggtgagtctggagaggcatttacggccgtactcggcatcagtgcctcgatggaaaaatcgggcaaccaaaccactgcgcgccaaaatgatttacagttttatattgtcgcgggtgaacagctaacgctgtccgattttttgcaggaagatggcgaaggcaagcgtcaggttattgctttagataaaattaacaatcatcttaaaagtcgcatggacgctaataatatcgaaaagtacgatactaaaaagcaatacctacgtcgtttatacggtgccttacgtggtcgacacgatgcggtgtctgagcgcgaagcaatgaacgctgctcgtactttctctcgttttatggcgtataaaccagttaaaagtattaatggttttgtggcgaatgaaattctagaaaagaaagacctcggcgatgcgattcgttcggtttcagatttaatgaaaaccatttattccatggaatctgatgccaagcgtctgcaagaaacgatcaatgttttaagttctaccaagcaaacggcaaaaacttacatcgaccagtggatagattataacgttcttgaatataccgccgctaaaagtcgttttttaaatgaccagcagatttatttaaaagcgaaagaaaaacagcaacatttgcgcgatgatttatcgaccgcagaacaagatcgcgaacagtcccaagaccgacgtagccagttacgcgaacaacttattgccatggaagcacagcgtttaggcattgatgcgttgcaagataaagatcaatgcgaacaaaaagttgaaagtggcaaacagcagctgcagcagcaagcgatgttgttattagagcaagataaagcatcacagttttcgttacaggccactgaatctctatataagtcattacagaaatcaaccatttcagttgatttaccgtcattaggccagcgcaaactgattgatatggcgaaaaatgtcgccgctattgcgaccgacggtgctgtcgattttccgaccctgctgggtaaggattgggttgatctaagtccgttagaagcccacttagaaaccgcacagcaaaaccaacagttaatgaatcagtggcgtgaacgttggtttagtggtgagttagagagctccggcattccattgcgcgatcagttggcgaagctggtggatcgccgtgaacaaaaagtgcaacaagttcagcgtcaaatcgcacaaaagcaaaatgatattgatagcttagaagcacgggaacttaactatccacacttcgtgcgcattgcattggaaactattcgtcgtgaatgcccacaagcagagccatgtgtgttagcagattacgttgaaattactgactctgattggcaaaacgcgattgagggctacattggcggtgcgcgtttcagtatcattgttgaatcagaatacgaagctgaagctgctcgaatagtacgctctattcaaggtggcagccgcgcccgagttgtgcagggtagtaaggcgaaaaaagattgcgatcgcatgaagttatcggataactccatcataaatattatgtcgtttgaacacgcgaccgcgcgtcattatttacaagcgagttacggttcggttgagcaagtacgtgacgtgacagcgttgcgtcaaacccgtcgtggtgtaacaaaagaagggctgggtagtggtgcttattctatctaccgctgtgatttaaatgatgctgagctagtttttggtcaaggtgcgcgtgagcgtgcattggccgcgaaacaatctgaactaggcagtttgattgatcacgcgaatgatgcccaaattaatgcgaagcaagcacaagatatcttgtttgcagtgaatagcttgcgccatgtggtttttgctagttcgattaaagatatgctggaaacgcattaccaaattcagcaagcggaagcggcgcttgcgaaagttgatctttctgatttctctgcgcttgaagaagaattttcggtcttaaagaaaaaaggcgatgagctggatcagcaaattcaattattggatggatcgacagggcgtatagagcagcagcttaaagacagcgagcgtctgtgtaagaaattaagcgaccagcaagaagaaacgtcttatgtcgctgatggtaaagaagataatttgcgtaaaattgtcagtgtttggccggagtttgatgccgaagcacgattgaaagaggctgatgaagaagcggctaatagcccagcggactcgattgaaaatcatcgcaagtccgtgtacagcgaaatgaacgccaaggttcatgaaatagaacgcaacattgccgatcataaccaaacttgccaaaccattgatgccattgtttacgatcccaattatcgtgaagaacatggtgtacccttctttaaagatgtttgcggcttgcagcgagaagttgatcgtgtgcacaaccgcttacgcaacaatatattagtagagaagcaagataagttaacgggcttgaaagacagtttcaataacgctttcgtgaccaatctttgccactcaatttatcagtcgattaatgacggtaaacgcgttttagaagaactaaataaagaactggcgcatcataaatttggtgctgataaagaatgttattggtttgactgggaatgggtaccggaatataaagaatacttccagttttttgacgaagtaattaaatccccaagtttgggtgatggtgctacgttatttgatgctggcttgactaaaaattctcagcgagttcgtgatcaattaatggccatgctattagatgaagacgaagtaaaagcgatgcgtgaattggagcgtatttctgattatcgtaattatcgtgcgtatgaaatttataagcagccgttgaataaagatcctattgcactcagccaatacggtactggttcgggcggtcagttagagactccagcgtatattattcgcagtgcggcgattacttcagcgttccgttttaatgaaggcgatacacacttacgtacggtattagtcgatgaagctttctctaaaatggatgaaacccgttcgaaagaggtgattaactatttaaccgaagcgctcggcttacagttgtcgtttattatgccgaccagtaaagcgggaccgtttatggatctgatttcaaaccagtttgttttcagtaaagtaccgcttgccaatggtgtaaaaaaaggagagctgcagacgaaagtattggttgatcgtcaagagtgtaatcaagaccgaattaaagagttgtgggctaatcataggcagtcgattcgccatcaggcagggctcgactttatggaagaattttcctaa

SEQ ID NO: 45751 - DNA, 1389 bp, Acholeplasma palmae J233
atggcacatttatttgacaccattcctgatacttttttttcagtattatcatcccctaataagcatatatatgtagattgcttattcatcatctttgattcaattgataccatggaagatgccttccaaggtgatagagaatttatcattcataaattacaagattattttgaagataaaaaagaagcattcattgttgaaggtgaacaagaaattcaaacaactagtagacaaaaatccgttagtgtgattaacgtttttaaaaaaactggttggttaggtgaagaggagttaggtgactatagagtttcacttaacctttttgattatagtatccgaattatagaagtattaaaatcaattaaaaataatgagcaaatcgaatatacaggggaaatttatagtgtttattcaattttaaaatcatttacaatcgatgaaggacatgcgattttagaacaagcatatttaaaaacaaacgatattttaagaagacttaaaactcttaaggcaaatatttatcgtttttatcatgatataactaagaatcaagaaaaaaacaacttacaaagattattagaaaaattacttgtagattataaacaaaacttctttgattcagcttattacaatttaaaaacaaaagatagtttgccaagatataaaagaagtattctagaatcactttcaaaaatatatgaaaatgatgaacatatggaaaaacttactgaaagtatgatgattatttctaaacaagaagactataatttagcatatttaaaagtagaagctagaattagaacaattagagatagttttgaagggcttgatcagcttattaatgaaatagatagaaaaaatgaacaatatattaatgcagcagcttctaagattcttttcttaaccaatcattcagatgatttagaaggtattttaaatagactctttaaaattatcattgaagataataataagattgactatacgcaattttttaatcttgtttcaattagaaatctagatgatgcttcaatgtttaacccaagaagacaaagagttgaagcggttgcagaagaaatattctatgatgaagactatataacagaagaattaaagagagaaaaaattcaaaatttaactaaacataatatatatagtaaagtagaaattaataaatatgttttaagtttactacaaacagatgattctttagaagcaattgaagcaccacttcaaacccaacaagatttcattagacttattttagtattcttatactcaaaatccattggggtttcatatgatattaaactattaacaaacaatgttacagttaacgatataacattccaaaatttcgttatctttaaaaaaggagtaagtttatga

SEQ ID NO: 45752 - DNA, 639 bp, Acholeplasma palmae J233
atgataggtaaaactcaagcagctaaacgttttaatgaacaatatttagagttaaaagaagctgaaaaaagtacattctcaagagttgtcaataaaatgtttcaagttaactacatcacaagaaaaaaaattggtgatgccaatgattatagattcattcttgcatataaagatatatttgaagcttttttcgcaattagtgactttgaattaacaattgaaagacatgatgaagtagtatttataaaaaatgaaagtatttataatcacttaagactgaaaaaagaagaaagtttaatgcttctagtcattagagtcttatttcaaagaaaacgtgatcttgttacattagatgaaaatgttgaaatttatcttgaagaaattcatgaagaattaagacgcattggatatcttgatgataaaagaattactaaagataaactaaaaccagcattaatgctattaagaaattataatattatagactatattgaaagaggactaaaggatgattctagaattaaaatttatcctacaattctttatgtaactaatattcataatattaaagaagcaatagaacgtattgatcaatacatggaaggaagtgagtcaattgaagaaacttacgaagattaa

SEQ ID NO: 45753 - DNA, 3273 bp, Acholeplasma palmae J233
ttgaagaaacttacgaagattaaattagtcaattggcacttatttactaaccaaacaattgaaattaaagataatacattaatctctggtgaaaatggttcaggtaaatcaacactattagatgctttacaatacttacttgttggtggtaaatcaggagttaagtttaatatagcagcaaccgatgaagctagacgttctttagaaggatatattcgtggtagaattggtgctgaaaataaagaatacttaagaaataacgacgttgttacgcatgtagccttagaattttacgacgaacaaagtaatgaaagtggcattattgggtgtgtcttagaattaccaaaaggcggccaattaaaagaaagattctatcttttagaaaatactgcaatccatgaaaatatttttattgaaaatagatttccaagagattataagtcaatgaaggcttactttaaagatctagaaatagattttaagccatttgactctcaaaagcactatagagatgcggttgctagatactttggattagatgctaaaaaatatgcgcgaattttgcctaaagcactagcatttagacctattgatttacaagcttttgtttttgaatttttacttgatgatgatccaattgatattcaaagtttaaaaaacaacgttgaacaacttaaaaaagtggaaaatcaaattagaattgacagagaaaaattagataaattaagtaaaattattgatttaggcagtcagttaaatttaaacttagaccaaattgaaattaatcaattaattgaaaaattaagttttattgaaaaaagagaaacattcttagaaaattcaaaagatacactcgatcaactaaaccaaaaatatgagattctaaaatcagaaaaagaacagctagacgagttaattgaaacaaatgataaagaaattgtttcattagaaactgctagaaataataatgatgttagtagaagtttagcaaattataaagatgccttagttaaaaaaggcgaattatatgaacaacaaaaagagattgttatgaacttacgtaacactgtttctaatgaagttcaattaatgaaaaaattctctgaaacacaaagcaatccttctatccaagcctttgttaaatattatttagcaaacgaagaaaacttaaatgttatgcaattacaagaacacctaagttcagttagtaaagaagtcgcaggttacattaatgcctaccatcttgaacaagcaaaactagaagaagaacgtaatgaaatatcagatcaaatatcgattgtttcattaagattaaaccaactaaaaagaaatattaaaacataccctagacacgtaacagaattaatagaaattattaatgaagaattaacaaatcaatatcaaaaagaagtaagagtaagacctttttgtgaactgattgaagtaaatgaacccttatggagaaacgctttagaaggatatcttggcggacaaagatttgacttaatcgtagatccagcatactttaatgatgctttagaaatttatgatagagttaaatttgaaagaaaaatatatggtgttggtctagttaatacgcaaaaattacaagactataagacagctgatgataacagtttagcctcaaaacttacaacaaatcatccttatgcaagactgtatgctaatatgttgttatctggtgtaagatgtgttgaaaatgttcaagatcttaaaaaatatcatagagcaattaccccaagttgtatgacttatggtaattatactgcaagacaaatcaatcctagagtttatgaagttccatacattggtcaagaagcaaccgacttacaagtaagattagattcagaagaattagaaatgttagaaaaacaaattcatagtttatatgacttacttgaaaaaactcaaatgacacttagaattttaaacaatagtaaagcactacaaattgttaaccaaaatcaattaagatattttgatattgttaaacaaacaagaaaagaatatacattgattgaagaacaaatcgctaagttatcatatgatgcagacattgctaaattagaagaagaattagaatcattaaaacaaacaaaacgtcaatatagattagactttgaaagacttattggtctaatgtctgattcaagaaaagaaagaacagatatcttagaacaaatagatatttctaaagctgaacttgaaaatctatatagtgaacaaagaaaacttaatgaagaaaatactactaaattaaacgcagctcacgctcaatttaatgcatataaacaaaaatatgaccaaaactttgatcatattattagagccttaaatcaaagcacaatttctattcaaaatcaaaatgctagacaagaaggtgatgttgtcaacttaatgagacaatatattactaattatcattttggtgccgctcctgatatttcagagttaattgaatttgaaaaagaagcaagcctcattagagacaataatttagttcattatgaacaagaagctatcgaattaagaagaaattctgaaatcggatttaaagaagaatttgttaataaattacgtgcaagtattgaaaatgcccaacaacaaatttctgaattaaatatggcattaacagggaaaaccttcggtgctgatagttataaactaacaacaagagcctcagataacccagagtataaacaatattacggtattattatggataatgatgcaatcgagacaaacagtttatttacagaaagtctaactaaacgtaatgaaattatcctaatggaactatttgaaaaaatagcttcaaccgatcctgaatttgataaattatcatataacttcctagactatagaaattatatgtcatacgatattgaagtaacaaatgctaatggtaatatttcatacttctctaaagtatctaaagaaaaatcaggaggggaaacgcaagtaccattctatatagtaattgccgcatctttccaacaactactgacacgtaataagagaatggattcaggatgtatcgtattatttgatgaagccttcaataacatggatgagtcaagaattgatgcgatgatgaaattctataatagcttaagtatccaattatttattgctgtaccaccacaaagagtttcaaatatcgtatcttatgttaatacaagcctagcaatcgttaaggataatgactatgcagtgattgaaacatttaaagacgaaagagtaaacagataa

SEQ ID NO: 45754 - DNA, 1497 bp, Xenorhabdus doucetiae
atggaagaaaggatcaagcaacgtacagagagttatatttcggcaagaaatcaacatcctgcttggttactgcttgccacccgacgcgcaccgcttgtcttaagctgtctgaaaaccttgtttgaggaatcaaacgacggtattcctcttgaagaggcgattgtgcagcttactaacatcctcatggatcacgccaatcaagagcaatatgaaattaatcaggataattttcctctccaggcaagccgtgaactacgggaatggattaaacgccgtttaattgtcgagcgtgatgggcgtctatttgcaaccgatgcgcttgagatttccatcgcgtttgttgagacgcttgataaccggttcatgacttcaaccgcctctcgtttgtccacggtacaaagagaaatcgaaaatctggaaacccatcttaatcctaatccggcaaaccgggtttctgtgttacgccgccgaatagccgatcttgaacgcgagttgcaagaagcagaagcaggacacattgaggtactggagccacatcaggccattgaacatattcgcgaagtcttcaatctggccaccagcctgagagccgattttcggcgggttgaagattcctggcgtgaagccgaccgtgttctccggcaatcgattattggcgagcaatatcatcgtggggaaatcgttgatcgtctgctcaacgatcaggaggcgctgctcaatactcccgaagggagggtgtttgacagttttcaacaacaacttcgccagtctgctgaactgaccgcaatgagtgaacgattgcgtgtgatccttagtcaccctgccgcttctgacgcgttgagccgcctacagcgccatgatctgcgctggctggtaaagcgactggtcgatgagtcgcaaacggtacttcaggcgcgggctcgcagcgaacgcgatgttcgggggtttatgaaaaccggcctcgcagcggaacatcatcgcgtcgggcatttgcttaatgaattctttaatctggcattaaaccttgactggcagcgtcaggcagtacgcaaaaaggaagtgccgcttcctgcggttggcgtagctgtaggggggctccctattattgagcgccttcgtttcaaagaggtcgatgatgaagcagagcaaacacttgatctgagtcaccatgctgccgatctggcacaaatcggtgatgatttctgggatgcgtttaatgggttggatcgagaagcgttgctccgtcagacattacaggtactcgcgaaggagaataggcccgtcagccttgctgaactggcgatattgctgccaccggttcacgatctcgaaacgtttgccttctggattggcatggcaaaagaagcgggtatcgacgtgagagatgatcaacgtgaatatgttgaacttcgtgatgatgaagatcacctctggcgcttcgatctccccaccacagggctggaaagcaaggcactgaaagatattgactgggagtga

SEQ ID NO: 45755 - DNA, 762 bp, Xenorhabdus doucetiae
atggcgggaatttttgaccgactgattaagcagcgtaatgcagcggggtctgacagtgattcaactctgcaaagtgacgatttaaccgagcatgatttgaccgataatagagaagaaaacatcactggcagcgaaacacgaacccagaaaaaaatacgggaggccgctcaagaactgcttaaatttggtctgttggaagaggccaataaacccaacctgtaccgcgctgtgctgacccatcctgaagaagtcacccgaattttggaacccctcgatctggacattggtatcgatgagatccgcggtgtgctgtatgtcaaagtcaggcttgatgatgtacaggaacaggatgaatggtcgcacccactcgtgcggcggcagcggctcaatctggaacaatcgttgttggttgcgatcttgcgccagcattttatcgcctgggaacaagagagtggaaccggcgctaatcaggcgcagatagccatagacgacctgcttccacaattacagttgtaccttggcgatccgggcagtgaatcaaaagaacgaacccggttgattaatctgttggatcaattgaaaggccatgggttagtgacatcgccggatgcccatgaacggatcacgattcgacccgtcattgcccatctcgctgatccggtaaatcttcaagcattattggtttggttgcgggagcaggtcgcccaccggatacccccggatgacacatccaaaaacgataacagcgaggaggaagcatga

SEQ ID NO: 45756 - DNA, 3303 bp, Xenorhabdus doucetiae
atgaatcaagagatacacctgatgggagatgactcttttattctcacccgtatcgagctgtttaactggggtggctttcagggactgcatcaggcaaccatcaatcaggcaggcacggcagtgattggcccgaccggaagcggtaaaaccacgctggtagacgcgctgatgacactgctttgcgctaatccccgctacaatctggcttcaacggacgggcatgaaagcgaccgggatttgatctcttacgtgcggggagtctccggccccggtgacgggggagagggacaatcacatatcgccagaccgggaaaaaccgtgacggggattgctgcaacgctagagcgcaaagggcaaacggtacgtctgggagcgctgctgtggtttgacaccaccagttccagcgtgacggatatgaaaaggctttggctattcagcgataacccagaacagacgcttgaatattggctgaatgtctatcacgacggcggcatgcgattgctaaggaaaatggaaaaagaaacgaccgggatctgggcatggccgaataaaaaacaatatctggcgcggctgagagactatttcgacgtaggcgaaaacgcctttactttgctaaaccgtgccgcaggattaaagcagctaaacagtattgatgaaattttccgcgagctggtgcttgacgaccactctgcttttgatcgagcggcagaagtcgccaacagttttgatgacctgaccgagatacatcaggagctggaaaccgctcgcaagcaacaacgatccttacaacctatcgcccttagctgggaaaagcaccaagatcagcaaaggcagcttgctgacaaacgggtgttggaatcgctgttacctgtctggtttgcggagcaggcaagccatctctggcaacaagaagtcagccgccttgaaaccgaacttgatgagactaaagccagcacagcgcacctgcgggcgcagcttgaatcgcagaaaaaggtcgctaccgactgcctacagcgttatctacaggttggcggcgcaagtattgatgagctgaacaaccgtatcgacgactggcaaaacaccctcaaccagcgagaaacactggcacaccagtaccagcaactgacccataatctcgaactcccctccgcattgactcaatcgcagctagaggcgaaccagcatgaagccggagccagacgagagcaactcagccatgagatcaagctaaaacaagatgaggtgtatcaaaaaggggcactcaagcacaacgtggccgagcaacttcgtcaattagaggcggaaagcgccgagattgcgcagcgtccggactctaacctcccagctcattatcaggcgttccgcagtgagctggcaaaggctctggatattgatgaggcggagcttcctttcgtggcagaactggttcaggttaagccggaagaagcttcatggcgtggcgccattgaacgcgctatcggtagccaccggctgcgcatccttgtctcaccggaatccgcgccggcagcattaaactgggtaaaccagcgccataatcgcctgcatgtgcgattaatggaagttaaattgccatccgcttccgtcagtttttttgatgatggtttcacccgcaaactgctgtggaaggatcatccctggagggaagcagtaaaagggctactggcgggtattgatcgccactgtgttgaccgccctgaacagctacgcgcgatcccccatgccatgacctctcagggactcatgtccggcaagcaacgtttttacgacaaacaggatcagaaacgccttgatgaagactggctgacagggtttgataaccgggaccgaatgacctttctggcgaaagaaattgtcaggcttcaggaacagatgaccgtcgccactcaagagcttgagccggtaaaaggtgaggtaaaccagcttcagctccgggacgctttatttcaacgaattcagcaactggactttaataatattgatgttccgggcgcgatgaagaagctcgcggaattaagggaacggctggagaacttaatccatccggattctgatgtcagcgtcgccaacatgttgctaaacgaggcgcgacagattgaggagagtattgaaaagcagcttcaggaggccaataaagagctcggtgggctggaaaaaagcctcgacagggctttgggagcagagcgacaggctcaacgggttgcacaacagggtatgacggacgaagagcggcaactaagcggcttacatttccctacggtggcaatggaacaactgtctgatatttatgatcttgaacgccagcatgcgggtaaactccagcgtgaaatcgaagggctgaaaggaaaactgcacgacttgaatctcgagttgaccaggcgcatgtccattgccaaaaacgcggataccggggcgcttgccgaagtcggcaccgatctggacgatatcccggcttacttgcaacgtttgcaggagctgaccgaagaagccctgcctgaaaaactccagcgctttctggactacctgaaccgctcgtccgatgatggcgtcacgcaattgctcagccatattgatcaggccgtgttaatgattgaagagcgtctgagcgagctaaacgccacgatgttcagggttgattttcagccggatcgctatctgcggctggtcacaaagaaggtgatccatgaaagcctgcgcacacttgaaaaaacacggcgtcagttaaatgccgcacggcttattgatgataacggcgagagccattataaggccttacagtcgctggttgcgttgcttcgggatgcctgcgaaaggaatcgaacgctgggagcaaaggcgttgctggacccgcgttttcgtctggagttcgctgtgtcggtgatggatcgtcatacgggtaatgtgattgagtcccgcacgggttcacaaggcggtagcggtggggaaaaggagattattgcctcttacgtactgaccgcctcgctcagttatgcgctttgccccaagggcagcagccatccgctttttggcaccattattcttgatgaagctttctcccgtagttcccatgcggttgcgggcaggatcattgccgcactcaaggagtttggtctgcacgcggtatttatcacccctaacaaagagatgcgactgttgcgccaccatactcgctcggctatcgtcgtccaccgacgcggccagaattcaaatatggtctccctgagttgggaagagcttgaaaatcactaccaacggcgagcgcaagagcagcatgaactctcctga

SEQ ID NO: 45757 - DNA, 1182 bp, Xenorhabdus doucetiae
ttgaaaatcactaccaacggcgagcgcaagagcagcatgaactctcctgacgacatcgcaaaaaaacttgcccgccaatgggatagcgcaaagcgccgggcggaacgcttactccctccgggtaactggcccttgcggctgcccattggtaaacccaccccaagggaatttactgaacatgcccggcaagttttggaacatgttaaggcatggaggagtgtgcagaccggacgagtcgagtgggaattagtgaattatcgggcgagtagtgagccggtacccatgccagtgtgctgggttttggccgggccttcagagtggattgatgctgccgcagatcggggggtcagccgtgagttcaggttgcttgaggaaattatcgaacaagtcgatgcggtttttcatccactcttgatcaaaagccgttcactctggcaacaccgaaatcctcaagaggttattacggccgctgggctggccaaccgtttaacgcccggctgtgcaaacggactgccattgagattattgtccgggctgggagtggatacaaaatttatagaaaacaatacctcattactgacccggcttttggacgaacgttttgcgggcgaagtcagtaaacaaggattaaccacttttctggatgcgcttgatgaaaataaccattgggtactcgtcataccgctgtcacccggattattgcccttcaaaaaaagtaaggtcaccacggtagaactggctgacgttaaactgcctgcttcacacttgctcgttgttgaaaatgaacaatgccagcatcagctaccggctttacctgacaccatcgccatcttgggtgccggccttgatttgcaatggttatctaaccctgatctggaaggaaagtccgttgcctactggggagacatggatacttgggggcttctgatgctggcaagagccagaaaacatcacccaacgctttccgcattgctgatgcaccgtgaattatttgatgaacatgccagtgataaggctgttcccgaactggtaaaagcgcaggatactattccagatggtttactgaacgaagaagccgatttttatcattatttagctgatcgacagcgtgggcgccttgaacaagaattcctcccgacagatgtcgtcacttcagtactcacacgttggggaatggattaa

SEQ ID NO: 45758 - DNA, 477 bp, Pseudomonas fluorescens
gtggacacctggcctcaggtattcgcacctgatgcactgatgagcgctgcccgacttgcgcaaccgcgcaaggaagttcagcgccttgcgccttcaccactgcgaaaggctgtgctgtcggaacacgcccgggccgtcggtaacctggttcgacgcgctcaggagcgtagacgtatcacaccggcaaaactgcgggcctatgccaagtcagcgctgggtgagcacgagaaagttaatagccaagacttatccgtcgacagtatcgaaaacctgcgcgcctaccaaagtttcaacagcctggcgacggcgctcaaatcgaagatcgccacctccggcatgcaggcccgcaagcaaatccccggcctcgatgtggtatgtgacgaagacggttcgagcgatcaccctttcctcatcgcgcaatcgtttgagattcgcttgcgcatgcccaagtccgaccacaagagggatgagccatga

SEQ ID NO: 45759 - DNA, 3447 bp, Pseudomonas fluorescens
atgaagcgccttgaaagcataaagctggtgcagtttctgctgtacgaaagcgaagaatttctggtggaggaaaccaccggcatcttcggtcccaatggcagcgggaagagttcggcattggatgccgtgcaaatcgcgatgttcggagccaacaagaatcacatggccttcaacgctcaagccgactcctccggcgccaagatgtctcgctcgctgcgctcctactgcctagggcaatacggcgacgagatcgtcgaatgcgcacgccccaactccacgacctacatcaccttgacctggagaaacaccgaaatgaacgaaccgaccacaaccggtatttgcattgaggcctcactcgaaagtgaagaggcgcgggttgtgggtcgttacgtggtcaacggaatagagttggcaatggccgaccaccttcaatcgatcgaaggagacttcagccccctgccctggaagagctttcgcagccgcttgatggagcgcgcgaagattctgggggaagaccctttctacgatgacccgtccagctttaccaagcagatcttgttcgcgttgaggggtaaaaacggacagccatcttatgatgccttcatccgcgcatttcgcttcgcgctgcggatgaagttcgacaagtcggtcgactacattgtccgtaacgatgtgctggagagcaagccaacgaatatcaagaagttcaaggccatcgttgacaccttcaaacacctcaatctgctcatcgaaaatgttgaaaagaaaattgcccagggcagaaaggtcgcgggccagtatctcgccgcgcagacgaagctacgccgagcggtgtcgtggcgcggcctggcagccaccgctcaagatgaagaggcgcaactcgcttgcgaaagcgccgaggatgttcttgaaaaggccaagcagatcaccagcgagctaaagtctgccagtcagcgcctaagcgaatcactgaccgcgtcagaatctgaactccatcacctgagtacccgtcagcaactgcatgcggcgcacaaggaaaatgcggaggctcagttgggtcaggagaatgcccggcggcagttggccagggggggcgaagcacttgatgaagacctcctgaggatcagcacggcgctggagaccgctgctcagtcgccttatctcgaagatttgcgggatccgactctatctcttgctgcgcgcttccggctattggtcgctacccctgggctgaccagcgtggagaccctgagagcgcccttggaggatatggcttcgataggtcaaggggtcaaggctagtctgggggccgttcatcaggacctttcagatcaggcgtccgatctcggtgaccgggttcgtgggctggagggctcattggcacgggtgcaagaaggacgagcgcccctcagcgactatgctcagattctgctggaagaactgcgtgatgaagggctgaatccgatcccggtgtgcgatcaggtcaagatcacagacccacgctggcaaccggcgatcgaagcctacttggccaagaacaccgaggccttgttgctgcccgaagatcaggaagaacaggcgtttgcgatttatcgcgggctgaagggacgcagaacggctttcggggtgaagatcgttcgtagcaaccaggtcaaaccggccgcaatgaatctgaaaggcctggtcgccgaactgatcgagggcagcaaccccatcgccgtcggctatttgcgcggccaactcggcaacttgaagcgagccgaagaaacgggcgatgcgcttaagggcgaaaggaccctgaccacggacggcatgtacgtcagcccgcgagatttcgaacgcctcaaactagataatgaaaaactgcggatcggcgcgggcacgcggagccagatcgaccggctcaaggctgagctgtcatcagccacgctcaatctcaggcagattcgggatcaactggcggccatcaaaggcacgctggatctcaccagcgggttcggtagcgaattcgctagccgcttgattctcagccgggccactgcttacgagcaggccgttcgacagagcgagcttgcagatcaacgggtggccaatatcgcagacgctgagtacctcgatatctgcgaaagaatcgggacactccagcttgctctgaagcaactcaaggctgacgagcgaagcgcatacactgctgccacgaagagtgaatcgcaaatcgagagtctggagaccgcctatgcgagcagcaagcttcgtcatgagcaatgcatcctgctcaagcagcagtgccgtgaacatatcgattacgacgccgacttcgtatctgcagaatggagccggcttatcgagcgcttcgagtcgccacaggcgatggttgcccattgcaaccgagaatctcaagcagccgaacaaaacggaaccaagctggcgagcggtgcgcagattcagttgtgggcctaccttcaggaacatcgcgagtccctgcctcaacaggatctggaggactggcgcattgctaagggctggatcgaaagctatgtgcaaaagctcgaagtcaccgagcttcctgaatataaagtacaggccgaagatgcttatcgagcatcccaggagacgtttcgccgggatgttgcgatcgcgctcaacaccaaccttgagttccttcgccagaccttcgccagactgaacgatgcactgagcagcacgccaccgttcactaacggtgagcgatatcagttcatgtacaaggtccgaccacagctcaaaccgctgctcgacttcatcaagaaggttgcggactacggcgtcgacggggggctgtttggggaggctggtagcatcccccctcagtttgaagaattgctcaaggacaaggccgctgctggcaactcgggcgagaagagtccgctggatgactaccgtgaattctacgaattcgacattcgcattcagcaggtcgctccggacggcacagaaaagactattggccacctgagcaaacggattggttcaggttccgggggtgagcatcgtgctccgctttacgtcatcgccggggctggcctgtggtccgcataccgcatggatcatggcaccaatgacggcctgcggctgattatgctagatgaagcattcgacaaaatggacacctccaacatcgtagccacaatgaagtatttgcaggagcttggcctgcaggttttgctcgcaagcccgggagaaaacctcgggatcctcaatgcctttctagacagctacttcgagattcagaaggatgccgtgcgtcacgtcgtgcaggttgatcgggtgaaggtcacccaagcgatgcgggatcaattccgtgaggatctctgggaattccatccagagctgatcgaagaagaaatgctatcgatgagggcgcagtcgaacggcccttcgctctcctctgatggggcggccctatga

SEQ ID NO: 45760 - DNA, 1167 bp, Pseudomonas fluorescens
atgacgaatcagattgcccaggaccttcttctgaagctgctgaagatgggtaacaaatcagaggcgggggtgcgtcagcatgcacctgcactgaccgcagccaaactcaaggcttacgggtcgcttagaaactggcaccataaacatcagtgcgaggaagtgttccttgccgcccgggacgccggcgctatcagcttcatacgggacaagctcaatccagaggatggactcatcgagcgaattgagttgatagatactgccgtccttgcccgatttctaaagcagacgacgcattcagaaaccatggccgatgccagagagctgctggccccccatctgtcagggtatgacgtgcttgaggaagtcatcgagaaatgggcgcgcatgtccaatgtccgtggttcggggccggcagacgcaagtagctggatcgaggcgatcaccgtcatctgtcagtgcttgcaagtccaggatgtcaccctgtcgccggtgcgcgaaaccagcgctcgtctgcttcgcaacagcaaacgaatcgagcaactcaccgctcaattggatgttctgctgcaaggatcgattgaagcggcggctagagcgccggcagaagtatggcaggagcttggactcttcaaagaggagcaacccgtgttgatggcgggcaacgtgaccatcgtccgaagccgggtaacggccgtgctcgatgagccgtacacaggtcttcccgccagtgctgttcagtcgatctcaggtccagtagaggttgtgctcactatcgaaaacctgaccactttccactccgaggccaagcgtcattccaaccgtcccacattgctgatctataccgccggcatgccctcgccggcgtggagagccatgtaccagcgattgttgtcgggtgtggctcccggcacgcctgtctttcattggggggacgttgacgaaggtggctttcggatcgcgtctgtattggccaaagcgtcagcggccgctggtcattcgctgagaccccatgccatggcccccgacaatgttcctgcggagatgagaaagtcggcttcgaaacgaacattgacccgaatgaaacattttgccgagtcggccggctggccaagtctgggtgaggagctgtttgaggcagggtttattgtcgaacaggaagcactctag

SEQ ID NO: 45761 - DNA, 1464 bp, Methylomicrobium alcaliphilum 20Z
atgagtttcctcgaactaaacgcccgatttcgccgattgcacaaagagcatgccgcctggcgtttgttgcgttcggacaatgcgccgttgatactcgctttcgtggccgatttgttcgaagaggccgacgaaatcgcgttcggccgcgccaagatggcactcgataccgaactggagcattggcgcgaacagggcgttattgaagtcgaggtcaatgccgcgacctatttgcgacaatggattcaagccggttggctgcgcgagttggacgatcaattgagcaaaaccgatgcttgcgaggtcgcgctgcgtttctgccggcaattggatcagcgcgagaccaacgctaccgcgtcgcatttgcgtatcgtgcaagatgcggtacgggatctatcggtcgcgatcagtcccgacccggccgaacgcattcaattgctggaatcgcgcaaggccgaaattcaacgtgaactcgacgaactggaggccggtatcgttcatgaattatcggataccgaacagcgcgagcggattatcgaaatttatcaattggcggcggtgttgaccggcgattttcgccgtgtcgaagacgagatccggcaaatcgaccagaccctgcgcgtgcaaatgatcgagtccggcggtagccgaggcgacgtgattctgaacctgttggagcaggagcaactgctggctgcaagcgatgcaggccgggctttcgacggtttctttcaattattgtgcgatcaaaatcgcagtaccgaattgcgcgaacaattgaaagcgattttaagccgtccggccgcgaacaatctcagcgagcaacaggcccgttttctcggcaaactgatgcgcgaattgagccgcgaaagcggacgggtattccaagtgcggcgccgtaccgaggaaaatctgcggcagttcgtcgaaagcggagcggccggtgaaatgcgcgccgtggaccgattgctcggcaagttggagcgcttggcggtgtgtttcaaggaagccgatatttcgatgcgtcacgaaacgagcctgagactcgacagcggacatgtcaaaatacaatcgcctgacgcttggtgtctgaaaatgcccgaggaacagctcgacacgcgcgatgtccaagaacacatcaataacgccacgcccagcgagaccatgttgcgtcaattgcatgcggtgcaggtgctggctgtcgcggaaaaattgcgcaaaacattacgggccagccgaattccgctcagtatcgcgggcctggttgcgcgtcagccgattcaggccggtctggaagaattgatcgcatttctcagggttgcgcgcgcggtcggcgcgaccgaattgcagggcagggagacagtggaaatcaaagatagaaacgggcagcgtctcaaagcggaaattccgcattatttgctcagtgccgagcaatttcccgaacaacttgaggagttgattttgtga

SEQ ID NO: 45762 - DNA, 777 bp, Methylomicrobium alcaliphilum 20Z
gtgagttttttcgataaaccgctggccggaaattctgccgaacagcccgatctgttcgatttgcttcgcggccgaatcgagccgtccgaggtttcaaacgcgcagcagacagatgaatccctcgcgctcgacgagcagtctgaagccggcggcgagacggaagccgattccggccgattgccgtccgaagcgcgccgtgctttagtcgggttgctgcgccacggcgtgatcatggccgacaataaacgcctgcaattcgaggccttgtgccgctaccgcgcgccaatcgaagcccatctggccgatatgtatctgcgcctgttgctggatgagcaagcgggactggctattttactgcaacaagaagcggaagaactcgacgaggacgatgaaatcagtagtctgatcgtcaggcgaaccttaactctgtacgataccttattgctactggtgttgcgcaagcattatcaagaacggcaaaacgccggcgagcagcgcgtcattatcgatatcgaccgcgtcgatgtcgcgttgcggccgtttctgccgttgaccaacagcagtcgcagcgaccggcggcagttgagcggggcgttgaaaatcatgaaagaccggaaaattttggcggcggtgcgcggcgatgaagagcgttttgaaatcacgccggtgattcgttatgtcgtcaatgctgcctttctcgagcaaatgctcgaagaatatctgaagctggcgaccggcgccagcctgagcgaagaacaggaggcttccgatgtctga

SEQ ID NO: 45763 - DNA, 3360 bp, Methylomicrobium alcaliphilum 20Z
atgtctgacgggaagagcgcgcaagtgcgcgatttattcgcttgcggtgcgatccggctgcgagaattgtcggtctataactggggctcgtttcacggtttgcatacggcccgtatcgatcccggtggtaccttgatcaccggcgacaacggcgccggaaaatcgactctggtggacggtttgatggccttgttgctgccggccggtaaggcgacgtttaatgtcgcggcggctcagggcgaccggagcgaccgaagtttgatgagctatattcgcggcagtttcggcagcgctcacgacggcggccgaactcggatattgagcaagcgcgaaggtgcggtcgtcaccggacttcgcgccttttatcaggccgacgacggttcgcaaataacgctcgcggccttgttttggatgtcgcatgccggtaatgccctaggcgatctaaagcgggtttatctagtcgcacgccgtaatgtgaccctgaaagaattgctcgacgccttcggtgacggcgatccgcgcgcgttgaaacagttcttacgccaagatcctatgattaccgcttgcgacgaccgtttttccgaatatcaggaacgctaccggcgcttgttgcacatggataacccgaatgcgccggcgttattggcgagggctttgggcctgaagaaaatcgacgatttgacttcattgatccgcgatctggtgctcgaacccagcaatgtgcgcgacgatgcgcgtaaagcggtcgacgaattcgccgatctggtcggcattcacaagcagttgctcgacgcccgtcagcagcgcgatgccttggcggatttgcccggcgtgaccgaagacttgcagcgcgccgaacaggatttgcaaaagctggatgccgaattggacggcctgtcggcttggttcggcgaacaatgcgccgggctatggcggttgcgtatcgagaccatcgcttcggcgctgcagcaggccaaggatcatctcgaacggctggaaattcaagtgaacgaagccgcggagcgctccgagcaatgccatgccgattatctgcaagccggcggcgagcgtatcgaattcatcaagaaagacttacaggccgcggaagctaaactggccgaggtcaatctcaaggctgcgcgttaccaacgagtcgccggtgaattgcaattggacggtaggctcgaagaggcggtttttcaagacaatcagcgtcaggcgcaacaggcccgagaagccatcgccaacgaaaaaacgcaagtccagaactatttcgccgcggaggccgccaaactgagtaatgctcaggaacaacaacggcacttgcaggacgaaatcggcgaaatcgaggcgcgtcccgattccaatatcgacgccaagtttcaaatcctgcgcgatgaaatggccgaagcgctcggcttggatcgcggcaagctgatgttcatcggcgaattgctggacgtgcgcgaagacgagcgcgcttggcagggtgcgatagaacgcgcgttgggcgggctgcgtacgacgctggcggtgccggaaagcgatttttcattggtcacgcgctggttgaatcaacgtcacaccggcttgcatgtgcgcgtgcaagtcgttcgcgagctcgaccaggcgccggaattcaaagtcgacggctatttacgcaaactagcttggcgtgaccatccctatcgcgactggctgaaacggcacctggcgcgtttcgatctgcactgcgtcgagagcaccgaacggctcgaccggacgcctttttcgatgactcggcaaggcttgatgcatatggatcgcggccgcttcgagaaaaaagatcagcagcgtatcgacgaccgccgcgcctggcaattgggattttccaacaaaaaccggctggctctgttgcgtcaggatgtcgaacgcttgaaacaagaaattctcgcgttcgacgaggcggtcggcaaggctcgcgaagccatgaacgcggtcgaacggcgcgaccggcaatggaacgagctaagtcagttccgctgggccgatatcgatgtgccgtactggcaaaaccgcatcgtggagcataaaaacgatatcgagcaattggaacgggccggcggcgacctggccgccgcgaaggcgaggtgggaagcgtcgaaatcggcattgcaggatttgcaaaaacgaaaggaaagccaaatcgggcgcgtgagcgcgatcggcaaggatcatgaaaacgccgaaaaaaatagacaacaagccttgaagctggccgaaaccggagtggccgacgatttgcgcgcggcattgctgaaaaaaataggcgcgctcaaggacgcgcaactggaagattccgcgaaaatcgaggaacgttatcgccgcgatatggaacagcaacgcggcgtcgttcgcgcccgtaaagaccgggccagccggtcggcggtcggcatcatgaccggttttcgcgcgaaatgggaaatcatcgccgccgattggggcggggacttggcgagtctgcaggattatctggcgcatttagcgcaactggagcaagaaggcctgccggccttggtcgaaaagtttcgcgaacgcctgaaccgacacgcgacgcaatcgctagcggggatacgcacacgaatcgaatcggagcgggaagacatcgacgagcgcatccaaacgatcaatcgggtgctggagcggaccgaattccgggccggaagttatttgcaattgggcatgaaaaacgagcaatacgagcatgtgcagcatttcaatcgtctgttgagcaaggtcatggagcaattgaccagcgacgatcacgaagcgcgtttcgccggcttgcagcaggtcatcgccattctggacaaggccagtaatccggctacggccaatacgcaggaaagtctgcgtttgctcgacccgcgtcatcagttgtcgttttatgccgaggaaatcggcgcggaagacggcaagattcgcgatgtgttgatgtcgtccagcgggaaatccggcggggaaaaagaatcgttcgcgggcaccatcgtcgcggcgagtttggcctatgtattgacgccggacggcagcgataggccggtttacagcaccgtatttctcgacgaagccttttcgaatacggctgaagcggttagccgccgggtgctgcgtatcttcaaggaactccatattcatgtcaatttgatcacgccttacaagaacctgaatttggcgcgcgagtcggctcgttctttgttgattgccgaacgcgacggcgcggcgcatgagagtagtttgtgcgaagtcacttggcaagagatcgacgagcgtttgcggcaacaggccgaagcattcgatgtggtattgacacccgaagcatag

SEQ ID NO: 45764 - DNA, 1182 bp, Methylomicrobium alcaliphilum 20Z
atgaatcggtgggggttgttgccggataatgtgctggagcagttgcgaactcgggaatggctgaatactgagaaccttcgcggtcgattgagcggcgaccgtccttttcctatccgtatagcgctcaaagcgccaaccggcgctcaggccttggccgatctggagcatttcctgcgctttatcgaaagctggaagcgctggccgaatcagagtcaagtggactggcaaattaaaaaattccagcaactgggcgagcaaacgctgcccgttgcggtgcaaatcgagtcgatgtcggcgttgatagccgttttgggttcgaaagccgaagtcagaaaacagcgatgggagcagttgatgagaccgctgttgaatctggatgcccgtctgtcttccgttttgatcaggcaattgtccgttctggaaagcatggcgccggatgatagcgcgctattggcgcaattgttgccgcagttacgtcggggcatggggcagggcgcctatttgcgcgctttgccgctgaagggcgtcgataccaagttcgtcgagaattatcaaggactgatcgaagccttggcggatcggcttcatgagggcgaggtgactgaacaaggcggcttgtcgaattggttggcttgtatcgccaatccgagcggttggctcctggtgcgtccgctgtgccggcaaagccgcgaacgactggcgggtttgccgatcatgcaaatggatacgcggacgctgcaaaaccatgttttgcctgccggccgcattctggtcgtcgaaaataagcaaagcggttatgctttgccaaaactggacgacaccatcgcggtattcggcggcggcagaaataccgcttggatggatgccgagtggctcaagcagaaaagtatcgcttactggggcgatatcgatagctggggcttgacgattttgagcgacgcgcgccggcgtcaaccgcatttgcaggcgctgatgatggatgaggatactctgctcgagcatcgaaagcgcatggtcgaagaagaatgccctcaaggcaagctgccggaatatctgaccgaagcagagcggcaattgttcgaacgtttgcaaagtcggtattacgaaaaaacgcggctggaacaagagcgcctggcgccggattatattcggacgtgtttgctgggttggcatagtttatga

SEQ ID NO: 45765 - DNA, 1470 bp, Xanthomonas fuscans subsp. fuscans; identical to SEQ ID NO: 45195

SEQ ID NO: 45766 - DNA, 702 bp, Xanthomonas fuscans subsp. fuscans; identical to SEQ ID NO: 45048

SEQ ID NO: 45767 - DNA, 4023 bp, Xanthomonas fuscans subsp. fuscans; identical to SEQ ID NO: 45049

SEQ ID NO: 45768 - DNA, 1461 bp, Mycobacterium chelonae
atgactgacctgacaatcgaagagctgttcgcgcacaacgacgacgtgcagaaatcccgcgcggtcaggctattggccgctaagaatctcgcgccgtacatcacgctcatggagcgccacctggaccgcagcgcgaaggtttccgaaccccagctggtggccaaactggaccgggatcttcaggcggtcggcctgggggagcagtccggacttgccctcatcaagagctgggcaagtgacggctggttgcaccgcgcgtcggatggcgccggtcccgacgccgagaacgtctgctcgttgaccgaggacgcgcgcagtgcgctggccttcgtccggcgcctgcgtcgcgctgacagcgtcgccaccggcgggtccatcgcaggcatcgccgcgggcctcaagcgggtcgcgactcaactggatggcgacccatcgcggctgcgtgccgatatcgaggctcagatcgccgagttgcagacctacttgcacgcgatcgacgatggataccgtcctgagccggacatcgttgatctcgaggatgaaacccgcgccatcgcctatcagatggagcaggtgatcaccgacatcgtgcgctacggcagcatgcagaacgagatcaccgcgggactcatcgacgctgcggaggactccgattccgggttccgtgaccgtgcacgacgtatgttcgccgactacgacgccctgttcgactcccgtgaacgagcctcgtacgccgccttcacccgcaccatccaggaccccgaccaacgcgccgccctgcgcagtgatatcgcctgtgtcgctgagggattacctgagctagacccgggtttgcgtgatgtcatgaagaacttcttcaagctggtttcccagcagatcgcggaagtttcccgcatcgagcagcgctgtgcgcaacgtatccggcgattcttcgccgccggcaccacagagcaggcacgtggccgtgcgcgtcagctcaacgacgctctggccgctgggcacgcgctgctcaaggtgtccacggcagattccccgattgacgccgaactaccgatcggccgctccgcggcggcttccatcggtgccctgtccttcactatcaaggacaccgcgccgccggtgctggcccaggaagcgccatcgggccccttggacttgagtggattctcggcattggcgacccaggtggacatggccgcactggccgagacggtgaacagtgccattgccaaggggccagtttccctgcccgacatgatttctcatgtcgacgcgccgtatctgggtgacgtgatcgtgctgtggtcgctggccctcaagcaggacaacacccttgatcgcgagtcggtgaaggtgaagttccggtccctggatggacaggaccgggtgatggaggtacctcagttgatgttccgtgaaccggtgttggcaaccctcgatgaggagggggcggcactgtga

SEQ ID NO: 45769 - DNA, 726 bp, Mycobacterium chelonae
gtgacgacaacgcctttgggaaacatcaactttgacgatctgcccggtgtcgagccggatgcatcggcacccagaaccgtcaagggaccacggttcgacggcgacaccagcgacctgaccgacaaggcgtgctgggcgttgcagaacctggtggcccggcgctatctgagcaaggacggccagccggagctgtgggcatcgatgatggagcaccgcaaggtgctggcctcacgtctgtccgaattggatctacggctacgggttttcgacgatctcgaggtcgcctacgccgaaccggctcccttggagaaccccagcgcgtatggcgcccgggtgttgcgccgcgaacccttgggcacgtatgcctcgatcgttgcgctgcacctggccaagatcgcaaggaccgcgcacgacgagcaggtgctggtcagccgcgacgatatccatgagctcttcgccaatgtcagccacgacatcgaccgcgatgaagcgatgctgcgcgaccgcgtcgacgaagccatcaaacgcctgtcgaaggccgagatcctgcaacgcactcgcgacgacgagcacagctacaccatcagtcccgtcatcaacgcgctgatgtccgcgcagatgatcgaggcactgcaacgccaatacgagcagctgcagcgtggcggtgcggccccggaagactccaccgacgatgaagaagatggcgataccgatgacgatgaatga

SEQ ID NO: 45770 - DNA, 3312 bp, Mycobacterium chelonae
ttgtcccgactgcaggtcatcaactggggtgtcttcgacgggtaccacaccatcgagttcagccgccgcggcactctgatcaccggctcttctggtagcggtaaatcttctctactggacgcgatttcgctggcatttctgtcgtcgaaccgccgtaacttcaacgcgtcgagcgataccaccgccgccggctcgagcatgggcaagcgcaccgtcgacaagtacgtgcgcggtctgtggggtgagctaaagaacccaggggagcggccaacgcagatgttcctgcgcggcaagggtgcggcatggtcggcgatcgcggtcacctattcaggcaccgatggtcgtgtgatcaccggcctcgtgctcaaatggcttgcaccggggtcagattcggactcctcgagccgctactacctgattgacgccgacgccgacatccgtgacctgtgcaatgcctgggcgagtaagggatattcggctgcggtcttcgacggcgcgggctggcgtgggcacaagagcgaacgctggtatttggaacagctctacgccgccgttggtatccaaggttcctcggctgctcagcagcttttgggtaaggccaagtcgctcaaaagcgttggtggcctggaacagttcgtgcgtgagtacatgctcgacgagcccgagtccatggccgcgatttccgaggcgctggggcagatcacccctctggtggacgcgcgtgccgcgctggcggtcgcgcagcgtcagcgccagacactgggcgatatcgaacagattcagcagacatacgccagcgatgcggcacagctggccaccgtcgacgtggtggatcaccacaccgtccgcgactacgttgaccagcagcggctggcgctggccggcccggagatcgatctgttggacaccgaaatcacccggctcggcggtgaatgcgacgaaatccagtcgcgccaggacattctcactggcgaacgggacaagctgctcggccggatcgccgccgccgacagtaatctcgcaccgctcaagagtgagctcgctcatgcccgggcccgggccgaggaggtgtcgcgccgccgtaccgcctacgacagtgccctgtgggacctcggccacgacgaggatgtcgagtccgctgaggaattcgaagccatgcgggtcgagagcctgcgcgcagtcacccggatcaatgcggaactcgaagcgggccatgacgcctatgtgatggcggccggcgcgttgtcgacggcgcgcgatcagctgcgggctgcttcctccgagctcaagcgcgttgaacatgtcggaacctcggtgcctcctgacgaggaccgcatgcgtggggaaatcgcggcggcgctgggtcttaccgccaaggagctgccctacgtctgcgaattgatggatctgcggccgggccaggaacggtggcgcaggtcggtggagaaggtgctgcggtctaccggtctgtgcctgctggtgcccgaccagcaccaccggcaggtactgcgatacgtcaacgagaaccccatgcgcggctacctccagatggagcgggtgatcccgtccggcgcgccgcggcgcgccgagccgggcaccctcgccgactgtctgcgcctgaccaaccccaatcacgaatgcgccagtgctgccatgaatctggtggcgggtgtgggcgactacgtgttggttgatacacccgacgagttcagcaagcatcgccgggcggtcaccgatcagggcctgcgcaaggacggcgaccggcgcgcggtcaaggatgaccggcgcgagctgcgtgcctcccagtacatctaccagggcaacgcaggcgacaagcgcgccgcgctctccgatgatgtggtcgaggcgcagcaggccgttggtgacgccgagaagttcatcggcgagatggacaccaagcgtgaggagctgcgttcggaggtggtgcggtggtccaagctgcacagccagtacgagtactggagccagatcgacaccgattcggccgaggccgccgtggcacggcttcaggaccagtacgacgcgatgctggaggcaaaccccgacctcaccggactgcagcagcaggccgattcctatctcgatgagatcaagaaactctccgagcgtatcggtgcactgagaaggcaagaatccgaacatgattcgcgccgcacgagactgctggacctgttggacaacttgaacccgcgcgaggtgggcgggcacacccgatccggtatcgaagcgtatgttccgcagctgtcgtcaagcctggatgtgctggagccggacacctaccggctggagctgtggcgtcagatcgagaaggaccagtcggtgctgcgggaaagcgtcacccgttcacgcaacgagctgaaccggatcctcaatgcctacgaccgggacttcccggattcgattcccaacgacagtgagaacttcgacgagaagatccacgattacgtcgccttgtgccgccgaatcgacgagcgtgatctacccgccgcctacgaacaaatgctgcgactcatcaccgagcaggcacccaccgcagtcctgcggttgcatcagctcgccgaggaggaggcgcaccgcatcaccgaccagatcgaccgggtcaatagcggtttgggctcggtggagttcaacaggggaacccggttgaccttgcgtgccgagcccaaggcgcttgaggcggtgggcgagctcaacgagcgggcccggcggatttcggggcgggccgttgcggtttccatgggagacgagaaggccatccacgaccagtaccaggacatcctgcaactgcggaacctactggccgcggagactcccgaggccaggcaatggacacgcgatgcgttggatgtgcgcaaccgtttcgtgttgtactgcgaggagcgcgacgccgccaccggcgaggcgattcgcacctatagcaatgcgggtgcgaattccggtggggagcaagagaagctgatggcgttctgcctcgccggtgcgctgagcttcaacctggccaaccccgaatccggggacaaccggccggtctttgcgcagctgatgctcgacgaggcattctcgaagtccgatccgcagttcgcgcagcaggcgctgtcggcgtttcgtaagttcgggttccagttggtgatcgttgcgaccgtgcagaacacgaccaccatccagccctacatcgacagcgtggtcatggtgtccaaacccgacggcccgggcgttcggccagtcgcctcgacgcgcacggtgcctatcggggagctcggtgacgtgcgaaaggcagtcaacgcccgctga

SEQ ID NO: 45771 - DNA, 1470 bp, Xanthomonas campestris
atgaagcaccaggcacgtatcgccggctatcgccaattgcgcgagcagccggtgtggaaactgctggccgccgaccacgcgccggagctgatcggcctgctgcagacggtgttgctggacggcgaacgccgcctgccctcggccgtgctgcacgagcgcctgcagcgccagctcgacgcgctgcgcgccgacgaactctcgcgcgagttgccgcgtaccgcgcaggcctatctggcgcattggctggcgcagggctggctggaacgccgcctgcccgagggcgcggccgaagaagagtacgagctgtcgcgcgcggccacccaggccatccgcttcatcgtcggcctgcgcgagagcagcagcagcgccaccgaaagccgcctgtcgctggtgatccagcagctggtgcagctggcgggccagaccgaagccgacccggagctgcgcctggccgccctgcgcgaagaacgcgcgcgcatcgatgccgagatcgaacgcgtggcctccggccgcgtggccgcgctggatggcaagcgcgcgctggagcgtgcccgcgacctgatccatctctccgacgagctggccgaagatttccatcgcgtgcgcgacgatttcgaacagctcaaccgccagttccgcgagcgcatcatcgacgacgaaggcgcgcgcggcgatgtgctggagcagctgttcaacggcgtggacgtgatcgccgacagcgaggccgggcgcaccttcgaggcgttctggagcctgctcaacgacacccagcaaagcagccagctcgatcaggcgctggatgcgctgctggcacgcggcttcgcgcgcaagctggaccggcgcgaacgcgccttcctgcgcgggttgaccggcacgctgctggagcgtggcggcgaggtgcacactgtgatgcagcacttcgcccgcagcctgcgcggtttcgtgcagagccgcggctatctggagcagcgccggctcaatcaattgctcaagcaggcgcagggcgaagccttgcagctgcgcgacagcctgcacgccaccaccgccaccggttacacccaggcgttgagcgcggcccgcctgcgttcgctgtcgcaatggcgcctgcacgacccgcgcctgacccaggtcgatggccgcgtgcaggctgccgacgcggcagacatctcgctcgacagcgtgggcgatctggtcgcgcaatcggagatcgacgtgcgcagcctgcgccgcgacctgcacgagctgctcggccagcgcccgcgcctgaccatcggcgatgcgctgcagcagcgcccggccgcgcagggcctgggcagcgtgatcggttacctgtcgctgggcacgcgccacggcgtggtgatcgacggacagatggaaacggtgcaatgggaaggcggcgacggcgccctgcggcgcgcacgcattccgctggtgtggttcacccgggagaaacgcaatgaactggactga

SEQ ID NO: 45772 - DNA, 702 bp, Xanthomonas campestris
atgaactggactgaggacacccgcctggacgcggacgaggacagtggcgcgtcggccgatgccggccgcacgccgctgacggagacatcgcctgcacagccgcgcggcgaactgttcctgggcgacaccggcacgctgccgttcgacgcgcggcgcgcgctgtgccagctgctggccggccccagcatcgatgcgcaacgccacggtgcgttgtggcctgcgctgctgcgcaacgaggcggcgatccgccaggtgttgtgcgagctgttcctggagctggtgctggaccgcgagggcggggtggccttcacccggcaggccgacaccgccgagctggaatcgccgaccctgctgcgcagcgcgccgctgacctttatcgagtcggtgctgctgctgttcctgcgccagcaactggccgaagccgatacgcgcggcgagcgggcggtggtggacgaggcgcagttggtggaggccttgtcggtctacgagaagaacgtgtccaccgaccgcgccggattcgcgcgacgggtgctgacggcgatcggcaagatgcgcgagaaccagttgctgtcgcggttgcgcggcagcgaggagcgctacgaggtctcgccggtgctgaagttgctgttctcggccgaagacgtgcaggccctggtggtggcgtatcgcggcttgcgcgagggggacgtcgcgctcgactaa

SEQ ID NO: 45773 - DNA, 4068 bp, Xanthomonas campestris
atgaattcccagtccaacctgtcgccggcgcagccgggcgcgtccctgttcactgattcgcttgccgagcagcgcgcgcagcagttccgcatgcggcggttgcaggtgcacaactggggcacgttcaacggcttgaccgaggtgccgatcgccgagaagggcttcctgttcgtcgggcgctccgggtcgggcaagtcgaccctgctggatgcgatgtcggcgttgctgaccccgcccagcatcgtcgacttcaacgccgccgcacgcgaggccgagcgcagcgggcgcgatcgcagcctggtgtcgtatgtgcgcggtgcctgggccgatcagcaggacagcgcctcgggcgagatcgccacccaatacctgcgcaagggcgccacctggtcggcgctggtgctggaataccgcaacgcgcacggtgagacggtcagcctgattcgcctgttctggatcgccggcagcggcaatgccgcggccgatgtgcgccggcattacatggtcgcgccgcgcagcttcgatgtggccagcgagctggatggcttcgatctggatctgcgcaggctcaaggcgcgtcttggcgaggaggtcgcgcatttcgacggctttgccggctacgcagagcgctttcggcatgcgctgggcatcggcaacgagatggcgttgcggttgctgcacaagacccagtcggccaagaacctgggcgatctcaatgtgttcctgcgcggcttcatgctggacgagccgcgcacgttcgaggcggccgaccggctggtggaagacttcgccgaactcgacggcgcacaccatgcagtggtcaccgcacgccggcaggtggaaacgctcagcccggcacgcgagcaccatgcggcgctgatggccttgcgccacagcgtcggcgagttgcgcgagctgcagctgggcgtggacagctaccgcgaacagcagcgtctggccttgctggagacgcgcctgcacgaactccacagccaggaccgcgggctggccggcgaagaaggccagcggcgtgagtcgctggacaatcacgaacagaagctcgccgggctggagcgcgaacaacgcgccgccggtggcgagcagatcgaggaactcgaacgcgagcgcgcccgggtcgagcgcgagcgtgacgagcgcctgcggcgtcgcgtgcagatcgaacaggcctgccgccagctcggcaccgccctggccgcaggcgccagcggctttgccgagcagatcgcgtacgcgcagaccgtgctcgagaacggcaagcacgacgccagcgcgctggacgaggcgatcgccgagcgcatgggtgtgcgccgcgacgatgagcggcgctttgccgagatccgcgccgaactggatgcgttgaagcgcgccccgtccagcatgccggcaccgatgcaggccttgcgcgcgcgcctgtgcgaggacaccggcattgccgaagcggcgctgccattcgttggcgaactggtgcaggtgcgcgaggatcaatctgcctggcgcggtgcgatcgagcgcgtgctgagcggttttgcgcagtcgctgctggtggacgaccgccattacgcgcaggtcagcgaatgggtcaaccgcacccagctcggcacgcggctggtgtatttccgggtacgccgcaacgatgcgctgcatgcgcgcacgccggatgcgcgtgcattgccgggcaagctgcagctgcgcgagcatgccttcaccgagtggctgcgcaacgagttgatgcgtcgcttcgactacgaatgcgtcgacaacgccgccgcgctgcgcaatgccgaccgtgccatcacccgcgaagggcaggtcaagcatcccggcgaccgttacgaaaaggacgaccgccatgcggtcaacgaccgcaagcgctggttgctgggtcacgacaaccgcgacaagctcaaggtgttcgagcgcgaagcgcagacgcttgcccagcgcatcgccagctgcgatgccgacgtggccgcgctgcgcaagcaacgcgagcaggaccaggaacggcagctggccgcgcacacgctggtcgagcgcgactgggacgagattgatgtcggccccaagctgcagcgcctgagcgatatcgacgaacagctgcagcagctgcgcgaaggcaacagcggcctgcgcgcgctcggccaggcgatcgagaccgcacgtaccttgcgcgaccaagccaagcgcacttacgaggacgtgcggctggagcgcgcgcagctggcacgcgagcgggttcggctggaacagcagcacgctgcctgtgccagccgtgccggcaccgccgcgctaacgcccacccagctgcagggcctgcgcgaacgcctggcggcgctggcaccgctgtcgctggacaatctggaggcgcatttccgcgtggtggagcgtggcctggccgagcaattggccgagagccagggccgcgacagccggctcagcgcgcagctgctcgattgcttccgcaagtactgccagcaatggccggaagacagcggcgatttcaccgtgagcctggccagtgccgacgattttctcgcgcgcctggatcgcctggaaagcgatggcctgccgcgccacgagcaccgcttcttcgatctgctgcagacccagagcaagaacaatctgctggccctgcagcgccacaccgccgaggcccacaagggcatcaagcagcgcatggacgaggtcaacgccagtctggagcaggtgccgttcaatcgcggcacgctgctgaccatcgaggtcagcgaccgtcgcctgggcgaggtgcaggaattccagcaacagctgcgcgcggtgctgtcgcatcaacagaccgaagaccgcgcactggccgaagcgcagttttccaccctgcgcgcgttggtggcacgcctgggcgcgcaggaaccggacgcacgccgctggcgcgagcaggtgctggacgtgcgccagcatgtggaattcatcggcgtggagctggatgcgcagacccgcgcgcaggtggagatctaccgcagcggtgccggcaaatccggcggtcagcgtcagaagctggcaaccacctgtctggccgccgcgttgcgctaccagctcggtggcgaagacggcgaactgccgcgctactgcgcggtggtgctggacgaagccttcgacaaggccgacaacgaattcaccgcgctggcgatgaacatcttcgagaacttcggtttccagatggtggtggccacgccgctgaaatccgtgatgacgctggagccgttcatcggcggtgcctgctttgtggaaatcagcggccggcacaactccggcgtgctgctgatcgaatacgacgagcaggcgcagcgactccagttgcccgagcgctcgcgcggggacgaggccgctgcagcggtgacggagcaggcggtgagtgctgcgcagcgcgaggatgcaccgcgttcgacgcagggtgaaacgcgtatggacagcaccggtgccgtctctggcgctgagggcgcggcacttcaggacgtccctgcacaggacgacgtagcagccggggcgagcaagcgcgccagcaaggtcgcgccggcatcgacgccggccgttcaagccgcgccgaagccatcaaaaacagccgctgccagcgcacgtgcgggatcaggcaagtcggcagcggcgaaggccgcagcgggcaaggccgcatccgccaaacctgcaccagccaaacctgcatcagccaggcgtgcatcgcccgcagcgggcacagcgcgcaagtcggcaacaccgactaaatcggccaaaccgccagcgaacaccgggacggcatccaggcgcgcgaccgcgtccgtcaaaccgactccccagccgaacaaggccgcgacaacagcggcagcgccgaaaaagcccgctgccaagtcggcgctggcgaccaggcgcgccaccacatcgctgggtggcgcaaccaaggcaaccagggcaactgcggcgcgtagcgcggccaagcccgtgccaaccaaaaccgcggccaaggcgcgtgctgcgtccacgcgcggatctacaggcaagccgcgcggaaaacgctga

SEQ ID NO: 45774 - DNA, 1371 bp, Methylobacterium sp. ME121
atgctgttcgcgcagctgtctgacgagctgttcaagccgctggcctcgccgagccgcggcttcaacgccgccctgctcctgcacctgcaccggcgcgtcctcggggccgagccggtgcgcaaggccgagctcctggcggagatcggcgacttcgccgccggctggagcgaccccgaggtcagcggcgacgagccgatctcggccgacccggccgagcgccgcacggcgctctaccggcgcctcctcgacaccggctggctgatcgagcgccgcgagcgctacgtcccggtcgcggagttcgaccccgaggcccgcctcctgctggaggagctgtcccggctcgaaaggggcgagacgcgctcctacggcggcgcggtgctggaggtgctgggcgggctcgagagcgccctgtcggacccggcgaatcgctccgaggcgctgtccaacgccgcccgggccgctgccgccttcctgtcgcacgtgcgcggcctcgcggccggcatgcgcaaggtcgaggagcgcatcctgcgcgagcccgaccgcgccaagaccttccggctgttcttcgaggatttcgtcgagcgccacctgatcagcgactaccggacgctgcacacccgctttaacccattccgcttccgcgccagcgtggtgcgcgaggccggtcgggcgctgcgcgacgccctcacggtccgggcgctggccgagggcctgatccgcgaggggcggagcgccgacctcgacgcggcgcagaaggccgtccgggcggatctcgcccagatcctcgcggtgttcgagggcctcgacaaccacctcgacgccgtcgacgccgtggtggcgcggctggagcgccggatcgcttccgccctgcacgtgatggaccgcccggacccgagcggcgtcgagcgcgtggcggcgatgctgcgcgccgtcggcgggtccgagatcgcccccgaggtgccgggggacgtctcgctgctgcggccgccgatcggccacgcgcatctccaggcgccgcgggcccgcaagtcggccatcgacatggagcccctgcccgacatcgaggacgaccccgtggtcgacgccttcgcggccgccaaggcggagttccggcgccgcaccaccgtgaccccggagagcatgagcgccttcgtggaggcccgcctcggcaaggccgtgcgcctgcgcgggtcgcagatcgtgatcgcgggcgtcgacgacttcatcgtgttccagcgcctgcgcgagatcgacgtgctgttcgacgccaagctcggcgcgcgctacgccctgacccggctgcccgagcgggttgtcaacggctggctggactgcccggacttcctgctggagcgccgtccccgtgcttga

SEQ ID NO: 45775 - DNA, 627 bp, Methylobacterium sp. ME121; identical to SEQ ID NO: 41852

SEQ ID NO: 45776 - DNA, 3438 bp, Methylobacterium sp. ME121
gtgtacgtcctcaccgacatcgccatctcgaactggtacctgatccgccgcgagcagatccgcctgcgcggcgccgcggcgctggtcgggccgaccggggccgggaagtcgacgatcttcgacgcggtcggcacggtgctggccggcaacaacgccagccgcctcgccctcaacgcctcggcctccggccgcagcgcccgcacggtgcgcgactactgcctcggctggatcagcgacccggcggagggcggccgcccgacgcgggaatcctgcgagaccgtgctggtcctggtcttcgagaaccccgattccggccgcgtggtctcggtcggcctcgccctggcggcccgggccgtggagccgaaggagaccgtgctgtcgcgcttcatcgcggtcgggcaccggttcgaggtcgccgactacgcgcgcaccgctcccggcggcacctacacggcgccctggagcgagatcgccgccgacctgcgcgcccgcgcgtcgagcttcaccgagtaccgcacctccggcgagcgcttcacggccgacgtgctcgcgaccctgcgcgagggggcgccggcgccggagccgcgccacttcctgcgcagcttcgccaacgcggtggcgttcaagccgatcttcgacaccagcgcgttcgtgcgcgccttcgtgctcgacccggagcccctcgacgtcgagcgcgtgcgccactcgatcgccaactggcggcgcctcctggagaccatcgccgaactggagagccggctcgggcgcctgcggcgcctgcgcgaccgctacgaggcctggggcgaggcggtcctggccgccgcgacccacgagctgcgggcggcgagcgccgagctgcgccgccgcagcctcgacctcatcgccgtccggagccgcctccgcgagggcgccgacaccctgcgcatcgcgcgcgaacgcgtcaccgcgagccgaggctacgtccgcgagatcgacggcgagatcgccgagaagaaggcgctggccgccgcgagcgccgccgagggccggctcgcggcctcgacgcttggcctgtccatgctggagcgggaccggaaggagctgatcggccggatcggcgacctcgtggggctcgtcgggcagatggccaagctccagcccgtcgccccgctcctgcgccagagctgcccgcaggcggcccgcctcgccgaggcctgcgcccgggcgggcctgcgccgggaatcctcgcccgaggagatcctgcgccccgagggcccgctggccgagctggcagacggactggcgcgtctgcccgatttcgacgaggccctggagcgggccgccgaggacgcggcgctcaaggcccgggcccaggagagcgaggccgagcgcacggccccgcgcaccggcggcggcccggcggcgcgcctgtcctccgacacggtggcgtttcgcggcgagctggagcggcgcggcatcgacgcgctgccgatctgcgagctggcggagatcgtcgatccgacctgggggccggccctcgaaggcctgctcgggcgcgcccgcgaggcgctggtggtcgcccccgaccggctgagcgaggcgctcggcgtgctgcaatcgggccgcgaccgcttcagccgctgcatcctggtgaagaccaccgacaccgcaaagcagcggtcccgccgctacgacgacgggccgctcaccgtgatcgagaccagcgacccccacgcggaggccttcctcggcgtgcggctcggcggctacgacctcgcccgggacgatgccgaactggcgcgcctgtcccgcgccgtggcgccgagcggtcggaccacggccggcatggcctacacggtgacccgcaacgtcgacctgctgatgactcgcggtcatcgcgggccgaccgccgacagccgccgcgcgcacgagatcgccgtcgcggaggcgcggcgcctgcgcggcgaggccgcggtcctgcgcgaggccgccaggacggccgccgcgatccgggcccgcgtcgcccggggcctcgacgacgtggaggccttgcgggccgagctcgacgggctcgagggacggcggcgcacgctccagaccgagcgggagggcatcgagaagcgcgacacggcggggctcaccgccgagatcgccgcgctgaccaccgagcgggtcggctacctgcgggaactgtcggaggagctggagccgaagctcgatcgtctgctcgccgacgaggcggccctgcgcgcccggatggggcctgtgcgcgaggccgtccgcgccgccctgtcggcccgccgcgcggccctgcgccagctgagcgggggcgacgcggcgcgggtgcgcctcgcccgcgccgagccgttcgacctcggtgcggtcgccgaggcgcggcggtcgctcgccggactcgacgccaaggcggccggggcccgggtgagtgccgagcgcggcctcgcccgcgattccgccgaggccgcccgctcgcacgggcggatcgccgagcgcgagctggcggaggcctgcgcggcctggcgggtggagaacccgctcgcctccggggacgccccggcgatcgacggtttcgcctgggtgcggcgggaatacgaggcggtcgaggggcacgagctgcgccgctaccgggcgcaggccgagcgggccgaggccgagatgcgccgcctgatgaccgaggacctgctgacgcgcctcgccgaccggttcgagcgggtccacgcccgcctcgcggccctgaacgagcggctctcggcgcgcagcttcaccggccagacctacgcgttcgaggcggcggtcgaccgccgctacgccgccgtccacgcgctggccaccgagaccgcccgctcgcccgaggccgcgcaggcgctgctcgccggtgaggccgaggggccgatggcggccgcgctcgaggagatcaccgcgctgatcgccggcgaggaggacgcggcgcggctcgccgattaccgcaactacttcgtctacgagatcggcatgcgcgaccgggcgggcaaccgcaccaccatgtcggcccgggcgctgcgcggctccggcggcgaggcgcaggcgccgttctacgtggcgatcgccgcgtcgctggccagcgcctactatccgggcgaccggccgggcgacgagaatccggggctcggcctgtgcctgctcgacgaggcgttctcgaagctcgacgtgcgcaacagccaggcgctggtcgatctctaccgcgcctgggggctgcagctcctcatcgccgcccccgaggacaagcgcaccacgctgaccgaggtgatggacacgatcgtgacggtctacaagagcccggatctcacctcggtgcggatcgaggccgagcaccccctcgaggcggcccggcgggcgctgcacgcgatcaatcccgaccagatcgggatcgagggcttccgccggtcggacgccgccgagtga

SEQ ID NO: 45777 - DNA, 1422 bp, Mycobacterium obuense
gtggacgaccagctgtcggcggccgatctgctcgagcgcaaccgcgagctgcaggcatccccgacggtacggctgctgtcggccaccaacctgagcctctacgcggcgctgatggaccggcacctgagcggcggagtggtcgccgagaccgagctggtggtgcgcctggagcgtgatctggccgacctgggcgacgatcagcccggcctcgcgctggtcaagtcgtgggccagccagggctggctgcaccgcatcgtcgacgaccgcaccgatcagaacgtctgctacctgacccaggacgcgcggcgtgcgctggacttcctgcgcgggatgcgccgccaggacaccatcgccaccggcgggtcgatcacaggtatcgccggccggctcaagcaggtcgcgatcaaggtgggcaacgaccccgcccggatccgcaagagcatcgaggccgagatcgacgcgctgcgtcgtgagctcgacgaactggaggccggggaacgacccgaaccggacgtcaccgacgcctacgacgaggcccgcgcgatcgcgctgcagatggaacgcctgatcaccgacatcggccagtacggcacgatgatcgagcaggccaccgcggcgctcgacgaaccgatcgacagcaacctcgcctaccgggatcggcagcggcagatgtacgccgactaccaggcggcctgggattcgcagggccgcgacagccaccgcgccttcctgcgcctgatcaacgaccccgaccagcgcgccgagttcgaggccgacgtcgccgcggtcgctggggcgctcccgcatctggacccggcgctgcgccgggtgatggccggcttcttcgaactggtcggacagcagatcgacgaggtcgaacgcatccagcagcgctgcgcgcaacgggtcaagcgcttcaccgcgttcggcactctggagcagagccgcggcatcgcccgccagctgaacgaggccatcggcgccgcgcgcaccctgctgaagacctcgctgaccgattcccggctcgatctcgagctgccgctcgcccggcacgcgatcagctcggtcggcgcgctcagcttcaagatcggcgacctgtccaacccgaagccggccaaaccggccgagggcgacgtcgacctcgccagcttcgccgcgctcaccacccaggtcgacgccgcggcgatggcggagatgatcaacgacgcgctgccgatgtcgctgcccgacgcggtcgccaaactcgataacgcgtacctcggtcacgtcatcgtgctgtggtcctgggcgctcaagcagccgcaagagacggccggtgagtccacgacggtccgcttccgttcgctggacggccgcgatcgcgagatcgccgttcccaacgcgactttcaccgaaccgatcaccgtgggagcggccccgtga

SEQ ID NO: 45778 - DNA, 681 bp, Mycobacterium obuense
gtgagcaccgacgccgatatcgacttctcgtccctgccgcaggtcgaccagaccgcgcggccgccgcatcagcgtcggccccggttcgacggcgacgtctccgagctgcctgaccgcgcctgctgggcgctgcagcatctgctgactcggcgttacatcagcgccgagtccgacgccgacatctacgcctgggtgttggagtaccgccatcagctctcggtgcggctgtccgagctggacctgctgctgcgcatcgtcgacggaacggacgtcgctttcgtcgagcaggcgcgctacgaatccgccaagggcatcaagcttctccgccgggagccactcggcacctacgactcgatcctggccctgcacctcgcgcagatgatgcgcgccgcgggcgggcagagcgtgctcatctcacgcgaggagatgcacgggttgttctcgggtgtgctgaacgacgtggaccgagacgcggtgacgttcacgggccgcatcgacgcggcgatcgcccggctcacgggcctggagatcctgcgccgcagccgcgacgacgaagacagctacacgatcagcccggtgatcaccgcggtgatgacggccagcgtgatcaccgagctgcagcagcagttcgaattgctggccaccggcggcacccccgacgtggaggtcacccttgactga

SEQ ID NO: 45779 - DNA, 3360 bp, Mycobacterium obuense
ttgactgagcagttccacctgtcccggctgcaggtcatcaactggggcgtgttcgacggctaccactcgatcccgttcagcgagggcggtgcgctgatcgccggcgcttcgggcagcggcaaatcctcactgctggacgctatttcgctgggctttctgccgttcaaccgacgcaacttcaacgcctccggcgacaacaccgcggccgggtcgagcgcgggccgccgcaccgtggacaagtacgtgcgtggtgcgtggggtcagcgcagcgacggtggcaccagccgggtgatgtacctgcgcggcgacggcaccgcctggtcggccgtcgcggtgacctatgccagcgactccggccgcacggtgacgggcctggtcctcaagtggctgaccggcgaatcgcgcaacgactcgtcgagccggttcgtgctcggcgacggtgatctcggtatcgaggacgtctgcaatcgttgggccgcaggccgtttcgacaccggcgtgttcaaagagaacggctggcggttcaccaccaaggtcgagtcgcagtatctggcgcagctgtacgcgaccatcggcatccgcgcctccgatgcggcccagcagctgctcggcaaggcgaagtcgctcaagagcgtcggcggcctggagcagttcgtccgggagttcatgctcgacgagccggatagcctggcccgtcttcccgaggcgctcaagcagatcgatcccctggtggaggcccgcgaactgctggccgtcgcgcagcgcaagcgcaagatcctgggcgacatcgagaagatccagcagcggtacgcgtcggagtccaccgatctcggcatcatcgatctcgtcgacctgccgatggtgcgcgcgtacaccgaccacgtccggctggcgcagtgcccggcgcagatcgcccagctcgacaccacgatcgaccagctcgagaacgagtacgaggacgtcacgcggtcgctgaatctggcgaaggccgaagcggattcgctcaatgcacagatcagcggcaccagtgcgaacatcggtccgctgcagagccaggtgacggccgcggagacggaggccgagcagatcgagcgccgccgcgccgcctacgaggacatgctcgccgcgcaggatctcgaggttcccgacaccgctgacgaattctggaatctgcgcgaagaactgctgcagcaggccaccgaactgctcgccaaggtcgaacgcaaccgggaggcgtccaccgacgccgagtacgcgcagaaggccgcgcgcatgacgcgcgacgacgccgccaaggagctcaagcgcgtcgagcacgtcggctcggcgctgcccgagttcgcgctgctgatgcgcgatcagatctgcgccgcggtcggtgtggacgccgccgagctgccgtatgtcgccgagctgatggacctgcgcgcagaccagacccggtggcgcaccgcggtggagaaggtgctgcgcggcgtcgggctgcggctgatggtgcccgatcagcactggacggcggtgctgcagttcgtcaacgagacgaacatgcggggccggctcgcgctgcaccatgtgcgggcgaagatgctgggcgcggatccggtggagccggaatcgaacacgctggcaggcaagctctttcccgtcgatcccgcgcatccgtgcgctgccgaagccgtcgacatcgtcaccgcggcgggcgatcacgtctgcgtcgacacccccgatgtcttcgcccggttccgccgcgcggtcaccgacaccggcctctacaaggactccgaccggctcgcgatcaaggacgaccggcgcccgctcaagcagtcggagtacctgtaccagggtgatgtgacggcgaagatcaacgcgctcaccgtcgatctggccgccgccgaggacgcctatcagaaggcacgccgcaccgccgacgacatcgccgcccagcgtcagcagtggcgtgaccgcgcggcggcctgcaaggcgatctgcgagcagttcccgcagtggagtcatatcgacaccgagaccgccgacgggcacgccgaacggctgcgcgaacagtacgagttgctgctggccgacaacccggacatcgaggcactcaatgcgcgcgccgacgaatgttggtcgcagatccagaaattgatgacgcgccgcggcgctatccagacccgtcgtgacgatctggacgcccgccgcacccggctcctcgaactggaggagcggctctctccggcgttcgtcagcgaaccgctgaccgagctgctgacccgctactccgcgcagctgcccgtcagcctcgagctactcgacccggaaccgttccgcgacgcgctgttcggtgcgatcaacaaggaacgcgagcaactccgcgagagccgcagacggtcctacgacgagctcgcccgcatcctgaacacgttcgacaccgcgttccccgacgcgatcccgaacgacagcgacaacttcgatgagcgcgtgcatgactatgtcgcgctgtgccggcacatcgacgagcgcgagctacccgaggcctacgagcggatgatgcggttggtcaccgagcaggcgccggacgcgatcctgacgctgcaccgcgtggccgagcaggaagcacgccgcatcgccgaacagatcaaacgagtcaacaccggcttgggcgccgtcgagttcaaccgtggcacccggctgacgctgcgtgccacgccgcgcagcctgaccgcggtgtcggagctgaccgagatcgtgcgggccatcagccggcgcatcgccgaggtgggcctgggcgacaagcaggcgatcctggaccagtacgccgacatcctgcggttgcgcaatcggctggcgtcgacggcgccggaggacaaggcgtggacgcgggacgcgctcgatgtgcgcaaccggttcacgttcgactgcgcggagtgggacgtggcctccgacgagctgatccgcacgcacagcaatgccggcgacaactcgggcggtgagcaggagaagctgatggcgttctgcctcgctggggcgctgagcttcaacctcgcgagccccgaaagccacgacaacaagccggtgttcgcgcagttgatgctcgacgaggcgttctcgaaatcggatccgcagttcgcgcagcaggcgctgcaggcgttccgcaaattcggcttccagttggtgatcgtcgcgacggtgcagaacgcgacgacgatccagccctacatcgacagcgtggtgatggtcagcaagaccgaagcgacgggtcgcaacgcgcggccggtggccacggtggcgacgcgttcgatcgcggagttcacggagctgcgtcatcagatgaagcagaaggtgccggcgctggcgcactga

SEQ ID NO: 45780 - DNA, 1470 bp, Stenotrophomonas maltophilia
atgaagcaccgcgaacgcatctcccgttaccgccatctgcgcgaacagccccagtggaagctgcttgccgccgaccacgccccggaaatcatcggcctgctgcaggggctgctgatggacggcgagcgcacgctgccgtcgtcggtgctcaacgagcgcctgcagcgtgcgctggaccagctcaacggcgacgaactgtcgcgtgagctgccgcgtaccgcgcaggcctacatcgcgcactggctggcccagggctggctggaacgccgcctgcccgaaggcgccgaccaggagcagtacgagctgtcgactgcggcactgcaggccatccgcttcgccgatggtcttgagcaggcccgcgtggccgccaccgaaagccgcctggcgctggtcatcgaacagctctcgcagttggccgcgcagaccgagtccgacccggatgcacgcctgtcagcactgcgcgacgagcgcgaccgcatcgacgccgagatcgcccgcgtcggtgccggacgtgtgatcgcgctggatggcaagcgcgcgctggagcgcgcgcgccagatcatcggcctggccgacgagctgaccgaggatttccgtcgcgtgcgcgacgatttcgagcagctcaaccgcgacttccgcgaacgcatcatcgacgacgagggcgagcgcggcgatgtgctgtcgcagctgttcgaaggcgtggatgtgatcggcgagagcgatgccggtcgcagcttccaggccttctggcgcctgctcaacgacgccgaacagagcgcccagctcgatgccgcgctggaagcggtgctggcgcgtggcttcgcccgccgcctggaccgcaatgaacggaacttcctgcgcggcttcaccagcaccatgctcgagcgcggtggccaggtgcacgacgtgctgcagaatttcgcgcgcagcctgcgtggcttcgtgcagagccgtggctatctggaacagcgccgcctcaaccagctgctgaagcaggcgcagtccgaagcgctggccctgcgcgacgaattccccgcacaacgcggcatcggccgcgacctgcagctgaccaccagccgcctgcgctcgtggtcgcagtggaagctgcacgatccgcgcagcgcccaggtcgatggcaacgtcgagtacaacgacgccgcagccatcagtctggagagcgtcggtgatctggtcgcttcgtctgaaatcgacttccgcaccctgcgccgcgacctgcacgacctgctcgatgcacagccgcggctcagcatcgcccaggcactgtcgcagcgcgaagcgccgcagggtcttggcagcgtcatcggctacctgtcgctgggcacgcgcttcggcaacgtgatcgctggtgagcaggagcttgccgaatggcgtggtggcgacggccaggtccgtcgcgcccgcatcccgctggtttggttcacccaggagagacgccatgagctggcatga

SEQ ID NO: 45781 - DNA, 702 bp, Stenotrophomonas maltophilia
atgagctggcatgaagatcccatcgacgcaccgcaggccgacgtggcggaagacgcctacgaagccgaaccggtggcggccgtggcgcagccccgccgtggcaatgacgtgtattacctcggcgacaccgggcgcctgccgctggatgcacgccgcgcgctgtgccagctgctgatcggccccagcatcgaccagctgcgccacgccaagctgtggccggcactgatccgcagcgaggcggccatccgctcctcgctggcggacctgttcctggaactggtgctcgaccgtgacagcggcgtggccttcacccgccaggccgataccgaagacgtggatgcgccggtgctgctgcgcacctcgccgctgaccttcatcgactcggtgctgctgctgtacctgcgccagcagctggccgaggccgatgcgcgcggcaaccgcgcggtggtcgccgacgccgagatggccgaagcgctggccatctacgaaaagaacctgtccaccgaccgcgccggcttcaatcgccgcgtcgcttcggcggtgcagaagatgaaggacaaccacatcctgacccgcctcagcggccaggaagaccgccacgaagtctcgccggcgctgaagctgctgttctccgccgaagacgtatcccagctttcggcggtctaccgccagctgcgtgacaccccggccgccgaggcctga

SEQ ID NO: 45782 - DNA, 3381 bp, Stenotrophomonas maltophilia
atggctatctccaagcacactcccgccctgttcaacgaaggcctgccggacccgcgcctgcagcagttccgcatgcgtcgcctgcaggtgcacaactggggcacgttcaacggcctgaccgaagtaccgatcgccgagcgtggcttcctgttcgtcggccgttccggctcgggcaagtcgaccctgctcgatgccatgtccgcgctgctgacgccgccggccatcgtcgatttcaacgccgccgcgcgtgaagccgagcgcagtggccgcgaccgcaacctggtgtcctacgtgcgtggcgcgtgggccgaccagcaggacagcggcaccggcgaaatcgccacccagtacctgcgcaagggcgcgacctggactgcgctggtgctggagtaccgcgccggcgatggccgcgtggtcagcctggtgcgcctgctgtggatctccggcaacggaacctcggccggtgacgtgcgcaagcactacatgatcgccgagcgtccgttcgacatcgccaaggatcttggcggcttcgacctggacctgcgcaagctcaagcagaagttgtccgacctgcaccacttcgacaccttctccggctacgccgagcgcttccgcgacctgctcggcatcgacaacgagatggcgctgcgcctgctgcacaagacgcagtcggcgaagaacctgggcgacctcaacgtcttcctgcgcgacttcatgctcgacacgccgaagaccttcgacgccgccgagcgcctggtcagcgacttcgccgaactcgatggcgcgcaccaggccgtggtcaccgcccgccgccaggtggagaccctgctgccggcacgcgcctactacaacgacctgaaggaaatgcaccgccggcgcggcgacgacgaagccctcaagcttggcgtcgacagcttccgtgaaagccgccgccaggcgctgatcgaggcgcgcctgcgcgagatggacgtgcgtgaccgtggcctgctcggggaagaagcccagcgccgtgccgcactggacaaccacaccgagcgcctggccgaactggaactgcagcgtcgccagcagggcggtgagcgcatcgaggaactggaacgcgagcagggccgcgccgaagccgagcgtgaccgccgccaagccaagcgcgagcaggcaagcctggccgcgcagcagctcggggctgaacttccggacgacgcacacggcttcgccgagctggtcgagcgtgcgcagaacgaactgcaggaccgccagcgtgcctcttcggcgctggacgatgcgatcagcgatcgcctgggtggcaagcgcgatgacgagcgccgtttcggcgaagtccgtgcggaactcgaagcgatgcagcgcacgccctccaacatcccggcgccgatgcagaagctgcgcgcgcgcctggccgaggaaaccggcattgccgaggcggcgctgccgttcgtcggcgagctgatccaggtccgctcggaagagcagggctggcagggtgccatcgagcgtgtgctgggtggcttcgcgctgtcgctgctggtcgatgacaagcactacaacgacgtcgccgagtgggtgaatcgcactcacctgggcatgcgcttcacctactaccgtgtgcgccgcaacgatgatgcgttcgcgcgcgagccgtcggcgaagtcgctgctgcacaagctggagctgcgcgagcacgtattcgaaagctggctgcgccgtgagctcggcaagcgcttcgactacgagtgcgtggatgccaagcagctgcgcaacgtcgaccgcggcatcacccgagaaggccaggtcaagcatcccggcgaccgcttcgagaaggacgaccgcagtgcggtgggcgaccgccgtcgctggatcctcggcttcaacaaccacgacaaggtgggcgccttcgagcgcgaagcccaggaactggccaagcgcatcgccagctgcgagaccgacatcgcgcgcctgcgtgggcagcgtgaccgcgacaacgaacgtcgcctggcctgccacgagctggtcagcatcagctggaacgagatcgacatcgccgccccgcagcagcgcctgaccgatatcgaggccaccctgcgcgacctgcgcgaaggcaatgccgacctggccaagctggccaagcagatcgacgccgtgcgcgccgacatcgagcaggcccgccgcacctatgaagacgtccgcgtcgagcgcggccagctggtcaaggaacgcgatcgcctcgaccgcgcccgccagcagagccgtgcgctggtgctgccgagcctggcccaggagcaggaagccgggctcgccgagcgcctgcaggagcagggcccgctcagcctggaaacgctggaggcgcacatgcgccaggtcagcaacgcgctgaacgagcagctgtcgacctcgcagcaggacctcaaccgcatcgagaaccagctgatcggttgcttccgtcgcttcatccagcagtggccggaggaatcgggcgacttcaccgtatcggtggcctcggccgaggatttccttgcccgcctcgagcgcctggagcgcgacggcctgccgcagcacgaagaacgcttcttcgatctgctgcagaaccagagcaagaacaacctgctggccctgcagcgccacagcgccgaggcccgcaagtcgatcggccagcgcctggacgaagtgaacgccagcctggagcaggtgccgttcaaccgtggcacgctgctgaccatcgaactgagcgaccgccgcctgccggaagtcggcgagttccacctgcagctgcgcgaggtgctggcgcagcagcagaccgagcagcgcgagctggccgaatcgcagttcaccgtgctgcgccagctggtcaaccgcctgggttcgcaggaaggcgaggacaagcgctggcgcgagctggtgctggacgtacgcatgcacgtggagttcatcggcgtcgagctggatgcggaaacgcgccagcaggtcgagatctaccgtagtggcgcgggcaagtccggtggccagcgccagaaactggccaccacctgcctggctgcggcactgcgctaccagctcggcggcgccgacagccagctgcccagctacgccgccgtcgtgcttgacgaagccttcgacaaggccgacaacgagttcaccgcgctggcgatgaacatcttcgacaacttcggtttccagatggtggtcgccaccccgctgaagtcggtgatgacgctggagccgttcatcggtggcgcctgcttcgtcgagatcagcggccgccacgactccggcgtgctgctgatcgagtacgacgaagaaggcaagcgcctgaagctgcccgagcgcagccgccagcaggccaacgaaccggaagaagccgaagcctga

SEQ ID NO: 45783 - DNA, 1494 bp, Leucobacter sp. Ag1
atgggacacagcagggcggaggccgcgtaccagcgagcgatcggggcgttcaagaacccgacgctcgatctgctgcacggtcggtacgcgccgttcgtgatcgccgcgctctcgctcgtcttcacggcggatcgtccgacggtcgccgtctcggacgcgcacgtcgaggtcggcgagatcgtcgacgagctgcgcgccgccgatcacgacggacgggaacgcggcctgcccgcgggctcgggccgtgagatctgccggtactgggtgcgggtgggctggctcgtgccgcagatcgtggacgacgcagaggtgtaccggctgtcggcgcaggccgtcggcgcgctcgagatcgccggtcgcgcgggcggcgggcgttcacgggtctcgcgctcgcgcgtgcgcaccctgctcgagacgatcgagcagctcgcgcaggatgccgagccggatcccgaggagcggcgcgcccggctcctcgccgatcgcgcggcgatcgacgccgagctcgcgcgcctcgacgagcacggggcgcccgagcccgcggacgacgagctgctgctcgaggaggcggagaacgtgctccacctcgctcgcgagctgccggccgacttctcccgcgtagccgagtcgatcaacgcgatgcagcgcgacgtcgtcgcggatctgcgacgcgacgtacggcccgccggagaggtgctgcgcgagtacctgcagcgcggccagcacgtcatgcaggccaccccggaggggcgcgcgttcgcgggagcgctgcggctcatcggcgatcccgagcacatcgatcgcctgacggatcagctgcgcaatctgctcgcacaaccgttctcgcggctcatggacgccgagcagcgcggcgatctcgacgcgatcgcgaagcgcgtcgagcagggggtgcaggaggtgctcaccgcgcagcgccgcgcgtcccacgtgatcaccgcgcaggtgcgcacccacgaccccgcgcgcgaccgcgaggtcgacgagctgctgcgcagcgtgatgtcggggctgcagaactggacccgggacgcgaaggcgggcgaccgcgtcgaacccctgcgcgggttccccgtcgcgggcgtcggccatctgcggcagacgctcagcgacatccgcccgcccgcggccccggcgccgctgagcgaggccgagggcgaggccgagttcgaggaggccgacacccgagcctggggcggtccccgatacaccgagctcgaggcctacgtggccgggctcggcgagcgcttcgacctggccgacgcgttcgcgggcgctcccgatgccgagcgccgaccggtcgacctgctcggcctgctcgagatcgcgcaccgcaccggcatgagcgagggcgacgaggtctccgtcgtcgaagcgctccgacccgacgggacgagccgcaggttcgccttcggttccgtcaccgccggtatccgcacagaatccgccgtacccgaagaaggcgcagatgactga

SEQ ID NO: 45784 - DNA, 732 bp, Leucobacter sp. Ag1
atgactgaaaccgtcgaaccgttcgtcgcccccgtcccgatggaggccgacccgggggagtacttcccgggcgaccgcggcgtgctcgatcccgaggtgcgccgcgtgctcgtgcgcctgctccagcgtcgcttcctgctcgccgcgcgcaaccgcgacgactggaaggtgctgctcgagaaccagtcggtgatcgagtcgcgcctgcacgacctgttcgtcgacctcgtggtcgactcgggccgcggcgtcgcctacaagcagcagatccgctccgacgagctcgacgtgccgatcctgctccgcgacgaggcctacacgcgcgccgagacgctcgtgctcgtctacctccgcaccgtctaccagcgcgagtcgaccgccggcgaggcgtcggcccgcgtcgacatcgaagaggtcgagcagaccgtgctgagctacttcgccgaggtcgacggggatcaggcccgacgccagaaggccgtgcgcgcggcgctcgcccggctccggcaggagggcatcgtcgaggaggagtccgaggggcggtaccgcatcagcccgctcgtcgagatcgtgctcggcgccgagcagctccgcgagctcagcgtctggctgcgcgaacggggggagcggcccgcgacccgcgagcccgacgcggggaccggctcagccccggaccccgatccggatcccgaaccgaccgacggcatcgaccgagaggagcacgcgctgtga

SEQ ID NO: 45785 - DNA, 1328 bp, Leucobacter sp. Ag1
gtgaccatgctcgacaccctcttcggactgatccccgccgcctcgcgcggccagcagtggatcgccgacgagctccagctcgtgaactggggcggatacgacggggcgcaccgcgtccgcttctcgccgacggcgacgctgctgtgcggcggatccggatccggcaagtccacgctcatggacgcctacatcgcgctcatgatgccgcacaccacaccgttcaacggcgcgtccaacggcggcgtcgcggggcggccgcgcggcgatgagcagcgcaacatcctctcgtacggtcgtggcaagatcgacgagtcgcgcacggaggagggcaccaaggtgcgcgtgctccgcggagacggcaccgacacctggaccgccatcgccgcgacctggctcgatcacgacggatcgcggttcaccgccgtgcgggcctggtacatccccgcgacggcgcggacgctcgacgacacggtgcgcgtgcgcgcgaccgtcgacggcccgttcgacctgagcgcgctcgaatcggcggcggggcagcggctctcggacgcatcggtccgcgcggccgggctcgagaccgtcgcgaccgaccgcgagttctcggcacggctccactcggtgctcggcatcggggccgccggagccggatcgaaggcgatgagcctgctcgcccggatccaggccgggcagcagatcaccaccgtcgacgagctctacaagcggatggtgctcgaggagcccgagacgctgaccatcgcggatgcggtggtcagccacttcgacgagctcgagagcacacgcggtcgcatggtgaccgcgcagaagcaggtgcgcgcgctccgcccgatccgtgacatgcgcacccgcatcgaggagtcggcggagcgactgcgtctgatcgacgcggtcggccgattctcggaccccgcctcactggcctcgctctggcgcgccgggcgccgcctcgaactgctgcgcgcggtcgagggggagctgcaggcgcagaaacgcgacgccgacgacgcggttcgcgtgcagcagacgctggccgacgcggcggagtcggagcgcgacggcctgctcgaggtgctgcgtaacgcgggcggcgatcggctcgagaccgccgaacgcgagctccgggggatcgagcagcgattgaccgcggtccgtcaggagcgcgagcgcttcgacgggatcctcgcggtgctcggcgccgaggccggcaccgcgacggagttcgccgcgctcgccgagaccgcgcgcggcgcgctcggcgacccgaatgccaaggccgcggcacgcgaggcctacgcggacgcgcgcggcgg

SEQ ID NO: 45786 - DNA, 1353 bp, Pseudomonas aeruginosa; identical to SEQ ID NO: 43741

SEQ ID NO: 45787 - DNA, 663 bp, Pseudomonas aeruginosa; identical to SEQ ID NO: 45502

SEQ ID NO: 45788 - DNA, 2940 bp, Pseudomonas aeruginosa; identical to SEQ ID NO: 45503

SEQ ID NO: 45789 - DNA, 1182 bp, Pseudomonas aeruginosa; identical to SEQ ID NO: 44163

SEQ ID NO: 45790 - DNA, 1482 bp, Rhodococcus aetherivorans
gtgtccaccgccgacctgcaccgcctggcgcgtctgcgtcaggagcacccggcgtgggcgctgctgcggtcggacaatgcggccgcggtgctggcgctgctgggccggcacttcgaccgcggcacgcgacggctgccggccccggagctgttcgcccgcctcgatgcggacctgcaggagctgcgcgacgagggcttcgagctgccgcgcaccggtcaggcctattgtgcggactgggtgcgcgcgggttacctgctgcgccgcgcgagcgccgacgcccgggaggagaccctcgaaccgaccgaggcgacgttcgccgcgctcacgttcgtcgcgggcctgacgaccgccacgagctcggtcaccgagtcgcggctgaccaccctgtcgagccagctccaggcgctggcgcgggactcggaccctcgcagcgagagccgcctggcggcgttgcgggccgagcgcgacgagctggaccggcagatcgccgccgtcgagtccggggattttcccgtgttggacgggaaccgcgcggtggaacggtccgcggagatcctggcgttggccggggagatcccgggtgacttcgcgcgggtgcgcgccgagttggaggcgctcaaccgggaactgcggacccggatcctcgacgacgagggcgaccgcggcggcactctcggcgaggtgttccgcggggtcgatctgatcggcagctccgacgccggccgcagcttcgccggcttctacgacatgatcatcgacccggagcggtcgtcgcagctcgacgactggatcgaggcggtgctgcaacgcccgttcgcgcagcagctcaccaccgagcaacgcaaccggttccgcaccctgctcaccgagatggaggacgccggcggcgaggtccacgcgacgatgacgtcgctgtcgcgttcgctgcgccacttcgtgcagtcccgccactacgaggagcaccggcgtctgcagcggctgttgcgctcggcccagcagcaggccctgcaggtggcgcagcgccgcaaaccatacgacctgctggacctcgagctggtgcgggtcggcatgggcatcgactccgtggcggcgctgcggctgcacaacccggccgacgacctggtggccgagccggtggtgacgcagccggtcggcgaggtggatctggaggagctgcgccgcatcgtccgcgaatctgagatcgacatggacgagctggccggcaacgtcgccgccacgctacgttcccgcggcagcgccacgatcggcgacgtgctgcgcgatcatcccgccacgcagggactggccagcgcggtgggtctgctggtgctcgccgcggagcacggtcaccgcgtcgacggcaccgaggagatcgcgtggacgtccccgtcgggcgcgacccgcgtcgcgacggtgcggcggcacctgttcgacccgaccgacaccgagttcaccgcccgcatcaccgaggacgcgtcatga

SEQ ID NO: 45791 - DNA, 606 bp, Rhodococcus aetherivorans
atgaccgaatcgaccacacgcacggggatgtatccgggcgacaccggcgaactcgacctcgacacccgccgcgcgctggtgcaactgctcaagggaccgctcgtcaccgccgacaagcacccggaggtgtggcggacggtgatccgtgacgagcgggtgctgcggtcccggctcgcggacgtgtttctcgatctcgtcgtcgacgaggacgatcagctcgcgttcacccgccccgccgacacgggcgaccacaaggccccgacggtgctgcgcaccgagcggctcacgttcatggacacggtgatgctgctggcgttgcggcaccggctgctgcgcgcccagccgggcgagcgggtgatcgtcgacttcgacgaggtggccgggcagctggagatgtaccgcgcggcgacgagcaccgatccggccggcttccgcaaacgggtcaacgcatcgtgggagaagctgaagaagtacacgctgctggcggcgacgtccacggagggccggatggaggtctccccggtgttgcggcagttgttcgacgccgatcaggtcgccgccgtcgaagccgagttccggcgcatcgtcgaggaggacgcgccgtga

SEQ ID NO: 45792 - DNA, 3300 bp, Rhodococcus aetherivorans
gtgagcgccgcgcccatccaccccggccagttccggctcgcgcgggtgcaggtggtcaactggggcaccctgcacgggcatcacgacattcccgtggcccgcaagggttttctcatcacgggcgcgtccggctcgggcaagtcgacgctcatcgatgcgatctcgacggtgctcatgccgggcggcagcgtgcggttcaacgcggccgcgcaggagtcggcggccgggtcgggccgcaacttcgtcagctacatccgcggggcgtggcggcgcgaggccgacgccgacaccgatgcgctcaccgcctcgtatctgcgcaccggcgccacgtggagcgcggtcgcactgacgtacaacgccgccgacggcgcggccccggtgaccctggtcaagctcatgcacctgcgccggggcgccaacgccaacaacgagatctcgcacctgcacctgatcctcgacaccgacgtggagctgaccgacctcgaaccgttcgtcacgcggggaatcgacacccggggcatccgcaagcgctggcctgatgcggtcgtgaaccccagctacgcgccgttcgcccgcgcgttccggtccaagctcggcatctcgtcggaggccgcgcagcggctgctgcaccgcacgctgtccgcgaagagcctgaacagtctcgaccagctgttgcgcgactacatgctcgacgagccgccgacgttcgcgatggccgagcgggccaccacgcagttccgcgagctgcgcgaggcgcatcgcgtcgtcgtcgacgcccgtcgtcaggtcgagacgctcgaaccgctcgtcgcgctggccgacgcccgtcgcagcggcctgcaggcccagcgcgacctgcaggacgagaccgatcacctcgacgcggtgcacgcccggatgacggtggacctgctcagcgacaggctcgacgagacgcgggcgcagacgggtctgctgcaggccgccgcggacaagaccgccgacgaggccgaccgcgccggcgaacgcaccgtggatctgcgggtgcgcgccgagagcgccggcgacggccggctcgcgaccctccgcgtgcacaaggagaccgccgagaccgccctcgaacgaatcacccagcaacgcagacggttcgacgacgccctcgcccactgggaggcggagacaccggccaccgcggacgacttcgcgcatctgcaggcccagctcgagagggaactgcgcgagctcgacgcgaccgccgacacgcgcagggccgagctgtacgaggtggccggcgcgctcgccgagcgccggaagacgatccgcgaactgatcgccgaccgggaggtcctggcccggcgccggtcgaacctcgatcccgacctgctgcgcgcccgggaactggtgtgctcggcggccggactcggcgaggacgccctgcacttcgcgggcgagctgatcgcggtgcgcgccgagcacgccgagtggacgggtccgatcgagcgggtcctgggcggattcgggcgcaccctgctggtgcccgacgagctgtatccgcgggtggccgccgccgtcgacgcacaccatttcggtgcccgcctcgtgtaccggcgagtccgcacgggcgtcggtgcgccggacgcacccaccaccgccgacggctcgctcgtccgcaagctcgaggtgcgccccggcccgctcgccgcgtggctgcagcaccacctggcggaccgcttcgattacgcgtgcgtcgacaccgccgacgacctgcgccgcgtcccgcggggcgtgacccgggccggtcaggtcaagcacggtggcgaccggcacgagaaggacgaccggcggcgcatcgacgaccgcagccgctgggtcctcggcttcgacaacgaggccaagctcgccgacctgcgccggcgcatcggcgacgccgagaccgacgtcgacgcactgcaacggcggcaggaggcgctcgaacgcgccgagtccgcgatccagctgcgccggcaggccgccgcggtgatccgcgagtccgcgtggtccgacgtcgacgtcgcggcggcggggaacgcggtggacgcgatcgaggaacggctgcgcgagtggatgcagggcaacaccgaatacgccacgctcaccgcggatctggctcgcgccgagagcgaggaacgcgccgcccggcaggcgcacaccgcggcgctggccaagctcgaacagcaccgggacgagctgacccgggtgcaggcgcggctcgacgaggcgcaggcccacgccggcacggcggtgcccgacccgatcttcgcgcgcatccggacccggttcgccgcgacggtgcgccgcgtcaccgtcgacaacatcgaccgggccctgagcacggtgggtcgcgcgatcaacgtggagatgcggtccgcgcagcacgacaccgcggacgccgagcgccgcatcaccgccatcctcaccggctaccttgccgagtgggaggcgcggcgcgccgagatgcgcgccgaggccgagtacgtcgacgatgcgctcgcggtgctcgcccggctgcgcagcgacggcctgcctgcctacgaggacgagttcttccggctgctgcgcgagcagtcgcaccgcaacatcggagagctggcgcgcgcgatccgtaaggcgccgggtgagatccgctcacgtatcgagccggtgaacgaatcgctgcgccgctcgccgttcgacaccgaccggatcctgcgcatcgacgtcaaggaccggcgctcccccgccgcgtcggagttcctggcggagctgctgcagatcacgagcggcgcgtggaaggaggaggaccgggccgcggcggagcggcggttcgaacagatggcggcggtgctcgaacggctcgactccggcgagcccgccgacctgcggtggaagcgcctcgtgctcgacacccgcctgcacgtcggattcatcggggtggaggtcgacccggagggcaacgacgccaactatcacgactcgagctccggcctgtcgggtgggcaggcgcagaagctggtgttcttctgcctcgcggcggcgctgcgctatcagctggccgccgccggcgaggagctgccgcgctacggcacggtgatcctcgacgaggcgttcgaccgcgcggaccccgcgtacacgcggcgggcactggacgtgttcacccagttcgggttccacatggtgctcgccaccccgctcaagctgctgcagaccctcgacgactacatcgacggcgtggccgcggtgagcatccgcgacaagtgctactcgcagatcgcactgttgccgatccgcggggacggcacgtga

SEQ ID NO: 45793 - DNA, 1137 bp, Rhodococcus aetherivorans
gtgagcgcactgtgcgtgccgccgtccgcggtcgccggcaaggcccaggttgcctaccgcagccgccgcgcccgatggatcaccgatcccgctgcggccgaatcggattcgctgtcgatcgggctgcatccgccgtccgagcggcgggtcgcgcaggatcccgacgccgtcgtggcgtgggtgcgtgcctggcaccgctacccgggcgccgggcgggtcgagtgggagacgcggcgctggccgagcttcggcacgcaggaagtgccgatgcgcctgctgctttcgggcgcgaccgagatcgccgccgcggccgcacgagcacccgaatggcgcaccctcaccgaactgcaggcacgactgctcgacggactcggccccggcaccgcgacgctcgcgacagcgatcgccgcgacacatgcccgctggctggagctggacgagccggacttcgcgcggctcgtcgcggcggtgcgctggctggccgagcatccgtcgtcggggctgttcatccgtcagctgccggtgcccggcgtcgacaccaaatgggtgtcgcggcaccgcggcctggtcgagacgctgctcgacggcgtgcggggcgatcgtgacctgggggtgcggtcgctgccgcggatgtgcgaggtcgccgtgtgcgaccgggcgctgctggcagcggcgccccggatcttcgcgacgtcgctcgacgagctggcggcactgccggtgaagccggtccgcaccctgatcctggagaacaaggagggcctgcacgcgctgccggagctgccggcgacggtggcggtgcacggcggcggctacgcggtgcacgagctggcggacgtgccgtggctcgccgcctccgacgtcgtgtactggggtgacctggacacgcacggtttcgcgatcctcgaccggctccgcggccgcctcccgcacgtgcgcagcctgctcatggaccgcggcaccgtcgagcggtggcgcgacctcgccgtgcccgaggcgtcacccgccccgcacacgcccgcacacctgaccggaccggaacgcgacgcgctcgcggtggtgcgcaccgagggtctgcggctcgaacaggagcggatcccgtggccgtacgtcgtcgcccatctcgaggcgctgtag

SEQ ID NO: 45794 - DNA, 1458 bp, Halomonas sp. A3H3
atggactacgactacctcgccagtctacgtaaataccatcccgcttggcggctgctgctggccgaccacgcgccgctgatcattgccttcgtgcatcgcagttttatcgagcccaatgtgcgcagcctgccggagcaggagctggcggcaaggctggaagactatctgttccaccttcgccaggggctgggcgaagggcacttcccaaagcccgcgcgggagtatctgaatgactgggccagcgatgagcgcggctggctgcggcgttattttcccgccgactcggacgagccgcattacgacctgatacctgccgtcgagcaagccattcagtggctggctgggcttgagcagcgcaccttcgtgggggcggagtcacggctaaagctggtcttcgacctgctgcgtgacatctcccagaacagcgaaacggatcccgagacgcgtatcgcggaactgagccgccgccgcgccgccattgacgcagaaattgaggagattcgcaccggccatatggcgtttatggatcccacgcggctacgcgagcgctttcttcaggccaccgacacggctcaagcgttactggccgacttccgccaggtggagcagaattttcgcgacctggatcgccaggtacgcgagcggatcgccacctgggagggcggtaaggccgcgatactggaggaggtactgggccagcgtaatgccattacagactccgaccagggccgcagttttcgtgccttctgggacttcctgatgtccgccgaccgccagcaggagctcaccgaactgctggagtcgatcctgtcgctggagccggtcgctgagctgaatcctgacccgaggctgcgccgcatccactacgactggctaaccgccggagaagcgacccagcgcaccgtggcccggctttccgaacagctgcgacgctatctggacgaccaagcttggctggaaaatcggcgtatcatggatctgctgcatgggctggaacagcacgccttggcggtgcgcgagaacctgccaaccacccctttcatgaccgtggaggcacccgcccccgacgtccagttgcccatggatcggccgctgttcagccctcccatcaagccgcatatcgagcaggcgccgctcgaggagggagccgcgaacatcgccgccgacccactgttcgaacaggtctacgtggacaaggagcggctgcgggcccggctacgccaggcgctgcagacccagcgccagatcagcctggagtccctgctgcagcggcatccactggagcagggactggcagaactggtgacctggctgagcctggccaccggggaggaactgggtctcatcgatgaaacacaggagcaggtcgtgtattggaccgatgaccagggccagcagcgccgcgccaccctgcccgcggtgatcttcgttagtggccatcagggagcccgcccatga

SEQ ID NO: 45795 - DNA, 609 bp, Halomonas sp. A3H3
atgagcgataccggcaccccacccaacgagcgcgaaccggcgctgtctccggtgttgatcctgctgttcaaaggcgtcctctaccgcgatgaccaggccggagcgtggcaggatctattgcgactccaggcgcaagtacgcgaccatgccggtgtgttcgggctggagctgatcctggacgaagccgagggctacgcctatttgcgccagcgcccgaccgaggagggcgaggaggagctgccgcgcctggtaccacgccgccagctcagctacccggtcagcctgctgttggcactgctgcgcaagaagctggccgagcaagacgccaccggcggcgatccgcggctgatcctctcccgcgagcagatcgccgacatgatgcgtctgttcctgcctgaaacgggggatgaagtgcgcctgatgaaccgcatggacagccatatcaagcgggtagtggaactgggcttcctgcgccgactacgcggccaggaggagcgcttcgaggtgcgccgcattctcgccgccttcgtcgacgcccagtggctcgccgagttcgaccaactcctagcagactaccgccagcacctggataacgacgatgacggataa

SEQ ID NO: 45796 - DNA, 3393 bp, Halomonas sp. A3H3
atgacggataatccgcagaacgcgctgttcgacttcgccagcgacgactcgcacaccgggtttcggctccagcgcctggaggtctacaactggggcacctttcatcagcgggtctggcacttgacaccgaatggcgagaccagcctgctcaccggcgacatcggctccggcaagtcgacgctggtggacgccatcaccaccctgctggtacccgcccagcgcatcacctacaacaaggccgccggcgccgaacagcgcgagcgtagcctgcgctcctacgtgcttggctactacaagacggagcgcagcgacggcgccctggccgccaagcccgttgccctgcgcgacttcaatagctactcggtgattctcgcgcagttctaccatgccggctacgaccagcacgtcaccctggcccagctgttctggctccgcgacagccaaggacagcccgctcgcagctatgtggtcgccgaccggccactgaccatcaccgaagacttcgccaacttcggcagcgacctcaacgcgctgcgcaagcgcctgcgccagttgccccaggtggagctcttcgaccacttcccaccctatggggcggcgttccgccgacgcttcggtctcgacagcgagcaggcactggagctgttcaaccagacggtctcgatgaaatcggtcggcaatctcaccgagttcgtgcgcgggcatatgctggcagccttcgcggtggaggagcgcatcgacgcgctgatccgccacttcgaggaccttgaccgcgcccaccaggcggtgctcaaggcgaaggcgcagatcgatgccctacagccgatggtcgacaacctggaccgctacgccgaggccagcgaccaggcccgggagttcaccgcctgccgcgaggcgctgcaaccctggttcgccggaatcaaggcgcaactgctggagcagcggcgggagaagctggagcgggagctggaacggctggcctcgcgtatcgaggcgctggtgagcgagcaacagcacaaccaggccaagcgcgacgagctgaaacaggccattgccaacaacggcggcgaccgcctggagcaactcaagcgacagatcaaggatcaaggcgagcgggccgatgagcgccgccggcgggccgaggagtatcaagcgcttacccagcgcctggcgctggacgcactgggcgacgaggcggtgtttgtggaaaaccgccagcgggtggaacaagccctcgagaccctggaggaccgcaaggccgaggcccagaacgcggtaaccgaggcggcggtcgccttccgcgatggccgcgagggtgtcgaggaggtcgagcgcgagctggactccctgcgccagcgtcgctccaacatccctgccgccatactggcactgcgtgagcgactgtgcgagagcactgggctgccagtggagtcgctgccctttgccggtgagttgatccaggtgcgtgatgaagagcgcgactgggagggcgccatcgagcgcgtgctgcacaatttcggtctgtctctgctggtgccggatgcacactatcaggaggtcgccgagtgggtggaccgcacccacctgcgtggacgcctggtctactaccgggtgcgcgagccgaaaggcgccggcctgccgcagctgcacccggactccctcgtgcgcaagctcgccgtacggccagactcggatttctacgcctggttggagcaggagctcgcccgccgcttcgactacgcctgctgtcgcgacctggcgcaattgcgccgcgagcaacgcgccatcacccgtagcggccagatcaaggccaaaggcgagcgccacgagaaggacgaccgccacgccatcaatgaccgtgcccgctatgtgctgggctggagcaacgaggccaagatcgccgccctggagcagcagcagtatcagctgcagcagcggctacagcaactggccgacaccctgagccaggcccaagagacccagaagcaactggaaaccctcggcaccctgctccatcggatcgatgtctaccgccattttcaggagcttgactggcataccccgacgctgctcatccagcgtctcgaggaggagcgccggtcgctcgaggcaacttcagatacgctgcgcctgctccagcagcagctcggcgacttggaagcggagctcaaggagcaggacacgcgcctgaccgggctgcgcgacgaacgcgccactgcacggctcaagtacgatcaggccggtgacgcccaggccgaagccgaagccttggtggagcgtaccgcagcctcggtgcgcgagagcgatttcccccgcctggatgcgctacgccccgaggccctgcccgagcgacgcctgacagtggagtcctgcgacaatgccgagcgggagatgcgcacctggcttcaggggcgcatcgacgccgaggagaaacgcctcaagcgcctgggcgaacgcatcatcgacgccatgcgcagctaccacaccgagtggccactggagacccgcgaggtggatgtcagcatcgcctccggcgacgagtaccgcggcatgctcaagcagctggtcggtgacgacctgccgcgcttcgaagccgacttccgcaagctgctcaaggagaacaccatccgcgaggtggccggcttccaggccaaactcaaccaggagcgcgagctaatccgcgagcgcatcgacaccatcaaccgctcactgcatggcatcgactacaaccccaaccgctacatccgcctgcaggccgaaccgaccccggatctcgaggtacgcgagttccgcgagtcgctgcgcgcctgcaccgaaggggcgctaaccggttcggaaaccgaggagtactccgaagccaaattcctgcaggtcaaagctattatcgagcgcctgcgcgggcgggaaggccagaccgagctcgacaagcgatggacacggaaggtcaccgatgtgcgcaactggttcgtcttctccgcctcggaacgctggcgagaggacgacgccgagcacgagcactataccgatgccggaggcaaatccggtggccagaaggaaaagctcgcctacacggtgctggccgccagcctggcctaccagttcggccttgaaacgggcgggcagagctcacgttcattccgcttcgtggtcattgatgaagccttcggccgcggctccgacgaatccgcccgctacggcctcgagctattccagaggctcaatctgcagctgctgatcatcaccccgctgcagaaaatccatatcatcgagccctttgtggccaacgtgggctatgtgcacaacgacggcggtcagcactccatggtgcgcaacctcagcatcgaggagtatcgcgccgagcgtgccgcccgcagcatgataagcgcgtcatga

SEQ ID NO: 45797 - DNA, 1200 bp, Halomonas sp. A3H3
atgagctggagtacccccgtcaccatccgagcgcaggtggaaaaggcctggggcagcggcagccttctcgccgcccgggtgtccggcgaatcgccattccccctggagatccgcctgcgccgccccggcgcccgggacatcaccgagcgcttcggcgcggtgatggactgggtgaacgcgctgcgggagcagagccgcgagaaacgcggctacggctatgatctgcgctggctgcaggtcaacaaccgggtccacggcagtaacgccattccggtggcagcagtgatccccgatgagggccaggcgctgcgcctgattggccgccaacaggatgcccagcgcttccaggccctggccgacaccctgctccaccaccaccccgagctgcgggattgggtagcgcgccgccccctcagcgtgctacgccacgccgacgactggcctcagctactggccgtgctggcgtggtttctggccaatccgcggccgaggctctacctgcgccagctggatatttccggcgtcgacaccaagttcatcgaaactcgccggaacctgctcgccgagctgctggatgtggtgctaccggcgaccgccatccagcgcgatgccagcggcgtcaagggcttcacacgtcgctatggcctgcgcacggaagcaccacagatccgcttccgcctgctcgatcccgcgctgtcccttcagggcctgcgcgacatcgcggttccgccggaggagttcgccggactgagtctaccgctgcagcacgtgttcatcaccgagaatcgcatcaatggcctggccttccccgatacccctgccagcctggtgatcttcggactgggctatggcctggagcggctgatagagattccctggctgcacgataccgccatctggtactggggcgacatcgatacccacggcttcggcatcctcaaccgcctgcgtgccggcctgccccatgcccgctccctgttgatggaccgtcccaccctgataaaccaccagcccctatggggtcaggagcccaaggacaagcgctacatcggccagccaacccggcttaccgccatggagcaggcactgctcaaggaactgcgcacagaccgcttgggggagcgggtgcggctggagcaggagcgtatcgccttcagcgccgtcgaacgtgcggtcgcggcgaccgagagtgtgacataa

SEQ ID NO: 45798 - DNA, 1521 bp, Neorhizobium galegae bv. orientalis
atgccattgttcagatatcttagtgacgacgcattcctgattttctcgcgcaaacatcgctatctctatgaggcgtcgctgcttgagatttatgaccgtttcttctccagcggggccgtctttccgacgccgcaggaattggttcatgtcatctatgacgttattggccaacggccgcacctgcttctcgatgcagacgatcttatagacgggttgccggaggtggtttcgaaggggcgtcgccggctaaaattcgcgggaaatgggggtgagatcggtgaccgcgcgcttaaggccgcccagcaggtctatcagggtctcgtgcgaaccggctggctcgaggaagaggagtacggcctgaaggtgacgaccgatatgccgatgggtgcgcttctggtcgttcagcgcctatcgagtctgaagtcggacgtctcgcagcggttcggcggcctcgtggttcatatcaaaaccagcctcgatctcgtcgagaggctatcggtagagaacccggagaaagcgcggtcgagcgcagtgcatgctctgagagaggcgcgcgttcaggcggaccagttcgtcaagacgcttcgggcaatcttgtcggatctccggcgcatccgcaaatccctgcttgagtctgaagatcttcgccaaaagatggacacctatttcgaggagtttatcggcgaactcctcctgaaggattttcaggcgatcctgaccttcaaccatccgtaccgcttccgcgaccagatcatcacaacggcgcggcgcatttcttattcagcagacctgctttcggtcgttgcggacggttacatcgaaatcggagtggcgcccgatgttcagcatgcgcgcgacgaggccgtcagcgatcttttgtcgatcgaaacgacatttgatacgatcggggacatgttcgaacgtatcgcacagtttcgccgggcacttgagacgcgattgcgaaacacggtaaaatacgccgaacaaggagagcggggactttcggcgcgtgcgcggggcatcgtcgagcgtctggaagggctgctctccgctaatcccgagcgttatatggaaccggttgttccggtcgcagtggaacgcattttcttgccgtggtcggcggctcagctggcatcgcagcggcaggccaagctgccgatcgaagcacagccgcttgccaaacgtccttacgatccgatgtacgcgttccgcaagcggatgagagccgactatctggaacggatttcgccttctcccgaacgcgtgcgccagtttcttgttcgtatccttgccccctatcacactgtcgaggctcgatttgtcgcgttgcagactatcgatgatttcctggcattcgacgctgctcgacgctacgcgctgaccggcgaaataccaggccccgtggcaagccaattcgaactcgaatatctgccgaacggcgagccacacgactgcgaatggctccgttgcagtaatttctccatccgtcatctgggcgatccgtcacatcgagaggcctga

SEQ ID NO: 45799 - DNA, 681 bp, Neorhizobium galegae bv. orientalis
atgctgagtgaattcgagaacgtcgaagcgaccttcggcgtggacaaagcggctgacctgaaaaaagcctgccgttacctgttgagaaaccagttcgcttattccggagatcgcggcgtcgcaaccgtctacaacaccctgaccgataaccgtttccgacggatcgccgatgattttttcgacagtatcggttatcgcgttcagagaaatgcagatgagcaatgggtcggtatccttttcgaggatgacgatgcctcgtccgttcccaagatgcggcttgacgaaacgatcgtggttctcgtgttgggtagtcattggcaggaggaagccgatgtcggcaatctgatcgaccgggctatcgcggtcaccacggtcaatgtcctgcatgatcgctacagggatatgctaaaaagcggcaccaagcctatgatccccgcagcccgctttctcgacctgcttcgggatgttgcggtacgcaatctcatttggatcggtgatttcgatcatgatgctcaggaccgggaagtcgaaatccggccgatgatcaaatttgtcagcggcgcggacgctctcgctcgtctcgaaacatatgtgaagagcgaggaacaccgttcgcattcacgtgcggcgcctgtcgtcaatgatatcgacgttccccctatcgaggacaacatggcatga

SEQ ID NO: 45800 - DNA, 3453 bp, Neorhizobium galegae bv. orientalis
atgatggaattgcggcaactgacattggtcaattggcatctgtttgacgcggaggatatcgaagttcgcgggaatttcggaattctcggagagaatcgatcaggcaagtccacgatcctcgatatggttcaggccgttttgtcgggagcaagcagacagtatctccgattgaatgccgtggcgggagacggtggcaagggacgctcgatgtcgaagcgcacggtgctcagctattgccttggaacgctgggcgatggagatgtgcggcgcccggaaagtctgacctatgtcgcgctcggtttcgaggatacgcagaacaagcggcctccggtgaccatcggtctggcgatcgaagcacgacgcacggatgcatcggagacgatcctcggacggttcgtctgcatcggcaaattgatgacgacggcagatttcaccgagacccgagccgatggcatctatgctgcccaatgggacgacgtcaaaacccggatcattgctttcgtcggggccgatcatttcatcaaccatcgcgacagggccgtcgatttcgttcgtgaatatatgaggcggctcgtgcctagcttgcccaatgccgagcaaaatgcttctgcattgctgaaggccatcgtcaatgccatgacgctcaaccagggatattccgcgacggagttcgttcgccgtttcatcctcgaagacaatccgatcaagatcggtgagttgcgtagttccatcgaaacctatcgcggtgtcagcgcaaccatcgtcaccctgcgcgagaagctggaggcgctcaaggagattagggtgcaggtagccgccttcgaggacagtttgcatcagagggcgcttgcggagtggctcgcgcgccgtgcgcgctggcttgcgtcacgtgcggaaaatcgggcgatcaaggagcagattgccgaagccagacgcttcatcaatgcggaaagcgaagatcggagcattgccctcgaagggattaacgaagcaaaaagcgagatcgagcgtttgatcaaggcaattgccgcccacgccgccaaatcgggacgcgatcagtggcaggagacattgaagagcatcaccgccgagaatgaccggctggtgaaagacatcgacaggaggcgcaagtcagcgaccgatctcgcagacctgacggttgggttcgatgatgcgggtatcataggcacttattgccagctcgccctgcgcaaggcagaccggaacgagctgagacatgccgaacaggagctcagggcgaaagccccggacatccttgcgaaagccgaaaaacgtcgtcgtgaagttgcggcacagattgtaccattggagagggatataaccgatctgcggaaggcattcgagcagtcgcgtgagtcagggcccgcggcgtatctctcgccggaaacgaagttgctcgtgcgtcggcttgaaagccggggcatggacgcacgccccctgtgcgatctgctcgaagtcatgaatcctggctgggccgcggctgccgaagcgttgctcggccgcgaccgggaggccatcttcgtagagcgccagaacatccgggacgcgacagcactgtttcgcgaggggcggcgagagtttcgaggcgcatctctcgtcagtctgaacaagctcgcagagttccgcgacaatccacaggcgggaacgtttccggcccttttcaggaccgatgatgccgatgcccgcgcgtttctgcagcggcgatacggaaatgtccgccttgccctcacgctggacgagttcaatcagcctggccgggcactgatgcaggatggcctttacgacgatggacttgtccggagtcacaggtccatcaacccccgcgaccacaagattgggaaagcggcgcaaaccgaccacctgcgcaatctgcaggaagattttgttcaaaaaggtgaaagcctatcggttttgcagcaagaagaccggcttctggcgcgtgccctgacggctcttgacctcttttcgcgacaggacgtcgactggctggccgacatgttggacagtgtcgacggttgcatgatgcggacgaaggatgcacagatgcggatcgatgccatcgatgcggccggcgacgatgggctgcggaaccggcttctcggacagaaaggttttcaggagcgtaaggaagccgaattgagggctatcgatgcgcgtgtcagcaaatatcttgtcgatgcgcagagcggtgagcgttccttgaaaagtggcgatggaaccgaagggtctgacctgaacctgaagctggcaagatccctctatcgttctcaacgtatgctgtataactatccggaagggtgcgctgcctatcgcgaaaaattggtgtcgtcgagaagccctcgatccgaggcttctgctatcgccggccagctagaacgtgacgaggcagctgcacatcgcaaattaggccagcggtcggaagatgcggccaagcgggcggctgagcgaaatcgtgtggccgaactccaaacccgcagcgcattgcatgtttatttcaacaatccgaagtttggcgtgagctcgcaggtcggccccgagagcgcgttgcttgccgatatcaagccgtggatggacgtgctgatcgaggatattgaaagcaatgagctgcggcgttacgaagaccgggcccgcgaagcatcggagcgtgcgtccgtcctgttccgcggcgagttcgtcaacgcgctcaacacgcgtgtctcaaagatggaacgcgatatcgaggcgctcaatcgcagcctcaaggggcatccgtttcatcacgagatctactctttccatcgtacggcagaggccgagttccagccgatcctgaaaatcatcgagatcagcaggatttccgacgacgccctcgatgccctgttcaagcctagtgtgcccgacgactttccgcataaggatacgatcaatgcggtcgagcaattgctggaggatccggacaaggacgtgtcggcgttcgaagactatcggaacttctacacgttcgagatccatatggaggacattcggaccaaggctaggactcgttgggaaacacggcgcaatacggggtcgggcgccgagcagcaggtgccgctctatgttgcgatcggtgcttcgcttgcggctgtctatggtagtgctgcgtctcttgggatgaaagggatgtcgcctgcattgttcgacgaggcgttctcgaagatggacggcaagaaccagcgcgctatgatgtcgttttatgccgacctcggcctgcaagtggtgattgccgccccgttggaaaagaagacggcaatcagcggttacatgcacaccttggtggagatcgaccgcatcgacgaccagtcgtcggccgacaccgtctatgttggccaacgtgcccgcgacgaactcctcgccatgaatccggacacgtggagcaaagaggagattgctcaacgaatggcggcggaatag

SEQ ID NO: 45801 - DNA, 1179 bp, Neorhizobium galegae bv. orientalis
gtggcccgcaagtttgacactgcaggcgggttgctccacgatctgctcgatcgtttcgaaggtggtacggtccgtccgatcggctacccggaccatgatgcatttgcgagtgtcacggccagcgacgctttcgtgcgttcgattgcggaggcagagcgcacgggcggagtcgagcgtgtctacggcaagggacggcgacatgtagaattgaagcatgtcagactggccgatgccgctttgctttataggcatcttggccggacgccggcgcgtcaagcggcgatcgggatcggcgagaccatgctcgatggtctcactcttcatccgaagcttcgcgaggcggcactgacggctatcgacgcatggtcgcgaaaccgcacttgggccactctcgggatcgacgacgcggcatccatgcgaaccgctatcgtgctggcgcaagccatcgtggacggatcccatcgtgggctggattatcggacgttttcgcggcgaactgtggcaaacagcaaggcgctggagaagcttgaagctgcagtgctccgcttgatcacaggggttgttgatgttccaccttcgagcggcgcgcgtgcagcgtttgcggctcttggtcttgaacggtttggcccgccgctgcttctgtctggcgctttcctgctcgatcgacaacccgttccgccgtcactgccgtatcttggtattccgccaaccgcgatgatgcggataggtttcgataaaccgccagcctacgccctcacgatcgagaattttgcgagcttcaaccggcatgttctggaggcggatcccgaaagagtggggctgacgcttttcgtgggcggatacccatctctcgcgacgcaaagggcacttgccgaacttggatccattctgcccgagagtgttccgtttttccactggtcagacatagatccggatggcacctggatcttccggaccatcgagcgagcactgggtcgtcctttgcatccgcaccttatgtcgcgcgaactggcagaaaagttcggagaagtatcggctgggatctccaagctgcggcggagcgaaacgtctctgtcattgatctccgatcttgtgaactatttcatagaaccggggtcgaaagtcatggaacaagagcagatcgatccaaaaattccgggatggcccataaccgattga

SEQ ID NO: 45802 - DNA, 1521 bp, Neorhizobium galegae bv. orientalis
atgccattgttcagatatcttagtgacgacgcattcctgattttctcgcgcaaacatcgctatctctatgaggcgtcgctgcttgagatttatgaccgtttcttctccagcggggccgtctttccgacgccgcaggaattggttcatgtcatctatgacgttattggccaacggccgcacctgcttctcgatgcagacgatctcatagacgggttgccggaggtggtttcgaaggggcgtcgccggctaaaattcgcgggaaatgggggtgaggtcggtgaccgcgcgcttaaggccgcccagcaggtctatcagggtctcgtgcgaaccggctggctcgaggaagaggagtacggcctgaaggtgacgaccgatatgccgatgggtgcgcttctggtcgttcagcgcctatcgagtctgaagtcggacgtctcgcagcggttcggcggcctcgtggttcatatcaaaaccagcctcgatctcgtcgagaggctatcggtagagaacccggagaaagcgcggtcgagcgcagtgcatgctctgagagaggcgcgcgttcaggcggaccagttcgtcaagacgcttcgggcaatcttgtcggatctccggcgcatccgcaaatccctgcttgagtctgaagatcttcgccaaaagatggacacctatttcgaggagtttatcggcgaactcctcctgaaggattttcaggcgatcctgaccttcaaccatccgtaccgcttccgcgaccagatcatcacaacggcgcggcgcatttcttattcagcagacctgctttcggtcgttgcggacggttacatcgaaatcggagtggcgcccgatgttcagcatgcgcgcgacgaggccgtcagcgatcttttgtcgatcgaaacgacatttgatacgatcggggacatgttcgaacgtatcgcacagtttcgccgggcacttgagacgcgattgcgaaacacggtaaaatacgccgaacaaggagagcggggactttcggcgcgtgcgcggggcatcgtcgagcgtctggaagggctgctctccgccaatcctgagcgttatatggaaccggttgttccggtcgcagtggaacgcattttcttgccgtggtcggcggctcagctggcatcgcagcggcaggccaagctgccgatcgaagcacagccgcttgccaaacgtccttacgatccgatgtacgcgttccgcaagcggatgagagccgactatctggaacggatttcgccttctcccgaacgcgtgcgccagtttcttgttcgtatccttgccccctatcacactgtcgaggctcgatttgtcgcgttgcagactatcgatgatttcctggcattcgacgctgctcgacgctacgcgctgaccggcgaaataccaggccccgtggcaagccaattcgaactcgaatatctgccgaacggcgagccacacgactgcgaatggctccgttgcagtaatttctccatccgtcatctgggcgatccgtcacatcgagaggcctga

SEQ ID NO: 45803 - DNA, 681 bp, Neorhizobium galegae bv. orientalis
atgctgagtgaattcgagaacgtcgaagcgaccttcggcgtggacaaagcggctgacctgaaaaaagcctgccgttacctgttgagaaaccagttcgcttattccggagatcgcggcgtcgcaaccgtctacaacaccctgaccgataaccgtttccgacggatcgccgatgattttttcgacagtatcggttatcgcgttcagagaaatgcagatgagcaatgggtcggtatccttttcgaggatgacgatgcctcgtccgttcccaagatgcggcttgacgaaacgatcgtggttctcgtgttgggtagtcattggcaggaggaagccgatgtcggcaatctgatcgaccgggctatcgcggtcaccacggtcaatgtcctgcatgatcgctacagggatatgctaaaaagcggcaccaagcctatgatccccgccgcccgctttctcgacctgcttcgggatgttgcggtacgcaatctcatttggatcggtgatttcgatcatgatgctcaggaccgggaagtcgaaatccggccgatgatcaaatttgtcagcggcgcggacgctctcgctcgtctcgaaacatatgtgaagagcgaggaacaccgttcgcattcacgtgcggcgcctgtcgtcaatgatatcgacgttccccctatcgaggacaacatggcatga

SEQ ID NO: 45804 - DNA, 3453 bp, Neorhizobium galegae bv. orientalis
atgatggaattgcggcaactgacattggtcaattggcatctgtttgacgcggaggatatcgaagttcgcgggaatttcggaattctcggagagaatcgatcaggcaagtccacgatcctcgatatggttcaggccgttttgtcgggagcaagcagacagtatctccgattgaatgccgtggcgggagacggtggcaagggacgctcgatgtcgaagcgcacggtgctcagctattgccttggaacgctgggcgatggagatgtgcggcgcccggaaagtctgacctatgtcgcgctcggtttcgaggatacgcagaacaagcggcctccggtgaccatcggtctggcgatcgaagcacgacgcacggatgcatcggagacgatcctcggacggttcgtctgcatcggcaaattgatgacgacggcagatttcaccgagacccgagccgatggcatctatgctgcccaatgggacgacgtcaaaacccggatcattgctttcgtcggggccgatcatttcatcaaccatcgcgacagggccatcgatttcgttcgtgaatatatgaggcggctcgtgcctagcttgcccaatgccgagcaaaacgcttctgcattgctgaaggccatcgtcaatgccatgacgctcaaccagggatattccgcgacggagttcgttcgccgtttcatcctcgaagacaatccgatcaagatcggtgagttgcgtagttccatcgaaacctatcgcggtgtcagcgcaaccatcgtcaccctgcgcgagaagctggaggcgctcaaggagattagggtgcaggtagccgccttcgaggacagtttgcatcagagggcgcttgcggagtggctcgcgcgccgtgcgcgctggcttgcgtcacgtgcggaaaatcgggcgatcaaggagcagattgccgaagccagacgcttcatcaatgcggaaagcgaagatcggagcattgccctcgaagggattaacgaagcaaaaagcgagatcgagcgtttgatcaaggcaattgccgcccacgccgccaaatcgggacgcgatcagtggcaggagacattgaagagcatcaccgccgagaatgaccggctggtgaaagacatcgacaggaggcgcaagtcagcgaccgatctcgcagacctgacggttgggttcgatgatgcgggtatcataggcacttattgccagctcgccctgcgcaaggcagaccggaacgggctgagacatgccgaacaggagctcagggcgaaagccccggacatccttgcgaaagccgaaaaacgtcgtcgtgaagttgcggcacagattgtaccattggagagggatataaccgatctgcggaaggcattcgagcagtcgcgtgagtcagggcccgcggcgtatctctcgccggagacgaagttgctcgtgcgtcggcttgaaagccggggcatggacgcacgccccctgtgcgatctgctcgaagtcatgaatcctggctgggccgcggctgccgaagcgttgctcggccgcgaccgggaggccatcttcgtagagcgccagaacatccgggacgcgacagcactgtttcgcgaggggcggcgagagtttcgaggcgcatctctcgtcagtctgaacaagctcgcagagttccgcgacaatccacaggcgggaacgtttccggcccttttcaggaccgatgatgccgatgcccgcgcgtttctgcagcggcgatacggaaatgtccgccttgccctcacgctggacgagttcaatcagcctggccgggcactgatgcaggatggcctttacgacgatggacttgtccggagtcacaggtccatcaacccccgcgaccacaagattgggaaagcggcgcaaaccgaccacctgcgcaatctgcaggaagattttgttcaaaaaggtgaaagcctatcggttttgcagcaagaagaccggcttctggcgcgtgccctgacggctcttgacctcttttcgcgacaggacgtcgactggctggccgacatgttggacagtgtcgacggttgcatgatgcggacgaaggatgcacagatgcggatcgatgccatcgatgcggccggcgacgatgggctgcggaaccggcttctcggacagaaaggttttcaggagcgtaaggaagccgaattgagggctatcgatgcgcgtgtcagcaaatatcttgtcgatgcgcagagcggtgagcgttccttgaaaagtggcgatggaaccgaagggtctgacctgaacctgaagctggcaagatccctctatcgttctcaacgtaagctgtataactatccggaagggtgcgctgcctatcgcgaaaaattggtgtcgtcgagaagccctcgatccgaggcttctgctatcgccggccagctagaacgtgacgaggcagctgcacatcgcaaattaggccagcggtcggaagatgcggccaagcgggcggctgagcgaaatcgtgtggccgaactccaaacccgcagcgcattgcatgtttatttcaacaatccgaagtttggcgtgagctcgcaggtcggccccgagagcgcgttgcttgccgatatcaagccgtggatggacgtgctgatcgaggatattgaaagcaatgagctgcggcgttacgaagaccgggcccgcgaagcatcggagcgtgcgtccgtcctgttccgcggcgagttcgtcaacgcgctcaacacgcgtgtctcaaagatggaacgcgatatcgaggcgctcaatcgcagcctcaaggggcatccgtttcatcacgagatctactctttccatcgtacggcagaggccgagttccagccgatcctgaaaatcatcgagatcagcaggatttccgacgacgccctcgatgccctgttcaagcctagtgtgcccgacgactttccgcataaggatacgatcaatgcggtcgagcaattgctggaggatccggacaaggacgtgtcggcgttcgaagactatcggaacttctacacgttcgagatccatatggaggacattcggaccaaggctaggactcgttgggaaacacggcgcaatacggggtcgggcgccgagcagcaggtgccgctctatgttgcgatcggtgcttcgcttgcggctgtctatggtagtgctgcgtctcttgggatgaaagggatgtcgcctgcattgttcgacgaggcgttctcgaagatggacggcaagaaccagcgcgctatgatgtcgttttatgccgacctcggcctgcaagtggtgattgccgccccgttggaaaagaagacggcaatcagcggttacatgcacaccttggtggagatcgaccgcatcgacgaccagtcgtcggccgacaccgtctatgttggccaacgtgcccgcgacgaactcctcgccatgaatccggacacgtggagcaaagaggagattgctcaacgaatggcggcggaatag

SEQ ID NO: 45805 - DNA, 1179 bp, Neorhizobium galegae bv. orientalis
gtggcccgcaagtttgacactgcaggcgggttgctccacgatctgctcgatcgtttcgaaggtggtacggtccgtccgatcggctacccggaccatgatgcatttgcgagtgtcacggccagcgacgctttcgtgcgttcgattgcggaggcagagcgcacgggcggagtcgagcgtgtctacggcaagggacggcgacatgtagaattgaagcatgtcagactggccgatgccgctttgctttataggcatcttggccggacgccggcgcgtcaagcggcgatcgggatcggcgagaccatgctcgatggtctcactcttcatccgaaacttcgcgaggcggcactgacggctatcgacgcatggtcgcgaaaccgcacctgggccactctcgggatcgacgacgcggcatccatgcgaaccgctatcgtgctggcgcaagccatcgtggacggatcccatcgtgggctggattatcggacgttttcgcggcgaactgtggcaaacagcaaggcgctggagaagcttgaagctgcagtgctccgcttgatcacaggggttgttgatgttccaccttcgagcggcgcgcgtgcagcgtttgcggctcttggtcttgaacggtttggcccgccgctgcttctgtctggcgctttcctgctcgatcgacaacccgttccgccgtcactgccgtatcttggtattccgccaaccgcgatgatgcggataggtttcgataaaccgccagcctacgccctcacgatcgagaattttgcgagcttcaaccggcatgttctggaggcggatcccgaaagagtggggctgacgcttttcgtgggcggatacccatctctcgcgacgcaaagggcacttgccgaacttggatccattctgcccgagagtgttccgtttttccactggtcagacatagatccggatggcacctggatcttccggaccatcgagcgagcactgggtcgtcctttgcatccgcaccttatgtcgcgcgaactggcagaaaagttcggagaagtatcggctgggatctccaagctgcggcggagcgaaacgtctctgtcattgatctccgatcttgtgaactatttcatagaaccggggtcgaaagtcatggaacaagagcagatcgatccaaaaattccgggatggcccataaccgattga

SEQ ID NO: 45806 - DNA, 1521 bp, Neorhizobium galegae bv. orientalis; identical to SEQ ID NO: 44775

SEQ ID NO: 45807 - DNA, 690 bp, Neorhizobium galegae bv. orientalis
atgttgagcgagttcgagcaggtcgaggcgacttatggtatcgacaaggcggccgacctgaggaaggcatgtcgctatctgttgcgaaaccagttcgcctattccggagatcgcggtgccgctaccgtctataacaccctgatcgacaatcgcttccgacgaattatcgacgggttcttcgatagcataggttatcgcgtgcataaaaacgcggaggagcagtgggtcggtatcctcttcgatgatgacgatccttcctccgttccgaaaatgcgactcgacgagacgatcgtggtgctggtgctgggcagtcactggcaggaggacgcggatgtcggcaacttgcttgatcgagcgactgcggtcaccaccgtcaacgtgcttcatgaacgctacagggacatgctgcagaatacgggcaagcccgcaatcacggccggccgtttcctcgatttgctcaaggaggtcgcggttcgcaatctcatctcgatcggagacttcgattacgacgctcaggattgggaggttgtgatacggccgatgatcaagttcgtcagcggggccgatgttctcgcacgccttgaaagctatgtgacgacggaggaacggggtatgcgcacgcgtgcgatgccggccgtcggcgagctgcttcgcgccgatgcctctgccgcaaaaggtgatactccatga

SEQ ID NO: 45808 - DNA, 3462 bp, Neorhizobium galegae bv. orientalis
atgatggaattgcggcgtatcacattagtcaactggcatctgttcgatgtcgaggatatcgaagttcagggcaatttcggcattcttggcgagaaccggtccgggaagtcgacgatcctcgacatgatacaggtcgttctgtccggggcgagccgaagttatctgagactgaacgccgtcgctggggaggggagcaaggcgcgctcggcatcgaagcgcaccgtgctcagctactgcctgggaacgctgaatgacggcgacgtccgccgccccgagacgctgacctacatagcgcttggtttcgaggatcaagaaaagcagcagcctcccatcacaattgggcttgccatcgaagcacggcaaaccgacgctgcggaaacgattctcgggcgcttcgtggtcatcggcaagctgctgacgacggcggactttacggacaagcgggctgacggcatttatgccacgcagtgggatgaggtgaaggcccggatcattgcgtccgtcggcgacgtaaattttgtcaatcatcgcgacaaggcaatcgactttgtccgcgagtatatgcgccggctggtgccaagccttcccaatgccgagcagagcgcttccgcgctgttaaaagcggtcgtgaacgcgatgacgctcaatcagggatattccgcgactgagttcgtccgacggttcatccttgaagacaaccccatcaacatccgcgatttgcgtagttcgatcgaaacctatcggagcgtaagcgcgacgatcgtgaccttgcgcgaaaagctcgaggctctcaaggagctgggagggttcatcgctgccttcgaggagagtttgggccagaaggacctggagaattggttggcgcgtcgggcatggtggcttgcttcccgcgcggaaaatcgggccatcaaagagcggattgccgaagccaggcgctttatcgacgccgagaaagaggacaggggcttggcgatcgaggggatcaaggatgccgaacaagaaatcgagcggctaaggaaagcgattgccacccacgaagcacggtccggacgcgatcagtggctggaggtcctaaagagcgtcacggcggacaacgatcgcctgaagaaggaggtcgacaggaggcgcaggtcggcgatcgagctcgtcgacttgacacaggtgctcgacgataccggcttcatgaaggcttattgcgcactggtcgcagggccagatggcaaagctgatcgcaaagctatgcgagatgccgagcagaatttccgcacccatgtcgtcgtcaccgtggagacggtagagagacgtcgtcgggagacggcagcgcaaatcgtgctgctgacaaaggaaatcacgggtattcgccaggtgctggacgaagtggatgagcggggctctgccgcatatctctcgcgtgagacgaaactcctgctgcggcggctcgaaagccgcggcatggatgccaggccattttgcgacttgctcgaagttgccgatgcgagttggaccgctgcggcagaggcgttgctgggtcgcgatcgagaagcagtgttcgttgaacgacgcaatattcgtgaagcgacagcgcttttccgcgaagggcgccgggattttcaaggtgcctcccttgttagtctgaacaaactcgacgaattccgcgatgcgcctcgacagggaacattcccagcgctcttccggtccgccgatcccgacgctcgtgcctttcttcagcgccgatatggcaatgtgcgcctcgcgttgacgctcgaggagttcaaccagccggggcgcgccatcatgcaggatggcctctatgacgatgggcttgtgcgtagccacagagcggtcaatccgcgcgatcacaagatcggcagggcagcgcaggcggatcatctcatcaacctgagggaagattttgctcaaaaggcagacgttttgtcaggcctgcagcgcgaagagaaacttctgacgcatgccctggcagcgcttgatttgctgaaacggcaggatacggaccgactggcggacatgctcgacagcatcgacgattgtgcggaacgcatgcgggatgcgcaagagcgagtcgcggccatcgacgcggcgggcgacgatgggttcaaagaacggctccgcgcccagaaggcgttccaggatcgcaaaaaagaggaactaaagacgatcgacgagcgctcgcgcaagtatcaggtcgatgtagaagtgggtgagcgagccttgaagagcggcgagggaacggaaggttcggctatgaacctatctattgccaaagcccgctacggcactcagcgcagattgtaccagtatccagaaggcagcggcgcttaccgtcagaggctggaggcactaaggcgacgatcccacgattccgggacaatgggccaatccgctcgaaacgaagctgtagcgcatcgcaaacttggtcaacaagcggccgaggcagctgaccgcgcagccgaccgaaaccgtcgcgcggaactcgatgcgcgccgtgccctccatgactatttcaataaccccaagttcggcgtgagttcacaggtcgggcccgagagcgaattgctggccgacataaaaccctggatggacctcttgatcgaggacatcgagagaaacgaattaaggcgctacgaagacaaggcgaaggaggcatcggagcgggcgtccgtcctattccgcggtgagttcgtgaacgcacttaacacgcgtgtttcgaagatggagagggacatagaagcgctcaaccgcagcctcagggggcaccccttccacaatgaaatctattcgtttcacaggactgcagaggcccagttccagcctatcctgaagattatcgacatcagtcggatctcggacgaagcgctcgatacccttttcaagcccaatgttcccgatgattttcaacacaaggatacgatcaaggctgtcgagcaattgctggaagatccggacaaggatgtctcagcctttgaagactatcggaacttttatgccttcgaaatccacatggaggatgttcacaccaaagctcggacccggtgggagacgcggcggaataccggatctggtgccgagcagcaggtaccgctctatgttgccatcggcgcttcgctcgcagccgtgtacggcagtgccgtttcgcatcggggccagaagggcatgtcgccggcactgttcgacgaagccttttccaagatggatggcaaaaatcaacgggcgatgatgtctttttatgcagatctcggacttcaggtcgttatcgccgccccactggaaaagaagcctgccataatcggttacatgcacagcctggtcgagatcgaccgcatcaacgaacaatccttcgccaacgtcgtctatatcggtaaacgcgccagagacgaaattcttgcgatgaatccggaaacgctgagtgatgccgacatcgccgcaaggatggcggcggagtaa

SEQ ID NO: 45809 - DNA, 855 bp, Neorhizobium galegae bv. orientalis
gtggcacgcggtcgcaagttcaccatcgcccaagatttgctgcaggatttgctcgatcgtttcgaggacggcacagcccagcccgtcggttatccagatcatggcggttttgccgatattaccgccagcgatgtttttatgaggaagatcggcgaggcagaacgccgaggcggcgtcgcacttgtttacggttccggtcggaggcgcggagaactgaaactggtgaggttgaccgatgcgcggctgctttacgaatatctcgaccgcacacccagccgccagacggcattgaccgttggagaggaagtgctcggcggattgagcatccaccctgccattcgcgacgttgcgttctcggcggtcgaggcatggtcgcgaaatcgcaaatggatcaatattggcgtcgagagtgcggcctccatgcgaaatgcggtcatcctggctcaggcgattgtggagaagcgccacctcgatctggattatcgcactttctccagaaggatcgtcgcggatagcaaagcgcttgaaaaattggagggcgctgtcctgcggttggtcggggccgtcgttgacgtccctcctgcaagcagtgcgcgggcggctttcgcgacccttggtctagagcgatttagccctccgcttttgttgtccggaaggttcctgctcgacggcatctctgtcggggcatcgctctcctatctgggcatcccgccgaccgagatgatgcggataagcttcagcaggcagccggactacgttctgacggtcgagaattttgccagcttcaaccggcatgtcctagaggcggacccgaatggatcgggtctcacgctcttcgtcggtgggtatccttct

SEQ ID NO: 45810 - DNA, 1473 bp, Rathayibacter toxicus; identical to SEQ ID NO: 45534

SEQ ID NO: 45811 - DNA, 732 bp, Rathayibacter toxicus
atgtctgagaccgtcgcgccagaacctttgatgcatcccgaaaccgaacctttcctcgcaccggtcgcgatggaggaggactcggacgaactcttcgtcggcgaccgcggggtgctcgacctcgaggttcgccgggtgctcgtgcaggtactgcaccgtcgcttccttctcgctgaccgtcatcgggaacagtggaccgtcctcctcgaacatcagcagctcattgagtcgcgcctcaacgaaatgtttgtgcgtctggtggttgatcacgagcgcggagtcgcctacaagcagcaggtgcgttccgacgagttcgacgtgccgattctgttgcgcgacctgccctattcccgcccggagacactggtgctcgtgcacttgcgcacggtgtaccagcgggagacagccaccggggagctagcggcgcacgtggacagtgaggacgttgagcagacggtgctcagctatttttccgacggtgaccgtgacacggcgaaacggcagcggatgatccgtaaggcgttggagcgacttggccgtgacggcatcgtcgacgaggagtcggccgggcgtttccggatcagcccgctcgtcgagatcgtgttgagcgccgagaagctgcgggaattgcgtgactggttgcagaggcaatcggtgtcgacagtcgtggcggcgggggacgacggtgaggattcagactccgatgatgacctgctggaggtacagcgatga

SEQ ID NO: 45812 - DNA, 3348 bp, Rathayibacter toxicus; identical to SEQ ID NO: 45536

SEQ ID NO: 45813 - DNA, 1938 bp, Burkholderia contaminans LMG 23361; identical to SEQ ID NO: 45268

SEQ ID NO: 45814 - DNA, 675 bp, Burkholderia contaminans LMG 23361; identical to SEQ ID NO: 45269

SEQ ID NO: 45815 - DNA, 3633 bp, Burkholderia contaminans LMG 23361; identical to SEQ ID NO: 45270

SEQ ID NO: 45816 - DNA, 693 bp, Burkholderia contaminans LMG 23361; identical to SEQ ID NO: 45271

SEQ ID NO: 45817 - DNA, 1488 bp, Brevibacterium flavum; identical to SEQ ID NO: 42724

SEQ ID NO: 45818 - DNA, 639 bp, Brevibacterium flavum; identical to SEQ ID NO: 42725

SEQ ID NO: 45819 - DNA, 3336 bp, Brevibacterium flavum; identical to SEQ ID NO: 42726

SEQ ID NO: 45820 - DNA, 1107 bp, Brevibacterium flavum; identical to SEQ ID NO: 42727

SEQ ID NO: 45821 - DNA, 1452 bp, Leptospira santarosai
atggactataaacttttgcaaagattgcttcgttcttccgcaatccgtcttttgcgaaaagacaacgccccttttatcatctactttttggaaaaatattttagaagttctgcacgtactttcgttccgttcgaggagctgaaaattctacttcgttacgaattggaaaacttaaacgatcaggaagagatctccttacagagaagcgcggacgtttatctgggagaatggattggagaaaattttctgacccggaggatacgatccgcggagggaatcgaagagatcatattggaaccctcggtcgaattggaaaaagtattctcctggatggaagacatacgatccttggaagataaggacgtgatcggcacggaatcccgttttttttccgtattaaataaattgaaagagattgtggaagagagcgtttccgatccggaggagaaaattcgacaattggaatccaagcgggacgaattggatcttcaaattcgaaaactcaaggcgggagaacaagtatccaaatttccgagcgaaagaattcggagccaatatgtgtatgcgcgaaaggaagcgttggggttactttcggatttccgacaagtggaaggtaattttatggaaataacgaagatgattcataaaaaatatctggaggtcgttcagaaaggggaaattttacgatttgctttggacgggaacgacgagttacttcgatcggaacagggtcgtagtttccaaaccttttgggattttttacgatccgaacgaagtcaggaacaattcgaaagtatattagattctttgtattcattggaagacgttttggagctggactcgagaaagtttttccggaattttaggagaaatttaagagaagcgggttctcgggtaaacggagttgttacccgtatgtcggaacagctcaaaaaaagtttggtggaacgtacacttcgtgaaaaccgcagatcgaaagaacttatcgcggaaattaagaatttggtcttggagaatccactcgatttttctcagacggatttttattctttggaggaaatggatgtgcgtttttcgatggaaaggcctctttggcgcggcgatccggaggagacgtttcgaaccgtccggatcgaaaatacggatgaggatgaaaatgtattcgatattctggaatcgatccgaggaatcgatttggaaatgtacgaacaacggatccaaacgttgcttcgtatttctccggaggtttctttggaaaaggttctgcgggaatatccggacgacgtctgctttgaaagtttagtcgcttatgtttggattgcgggtaacggagaatttcattccttggacgattcggaaacctttgtatattccgtttccataatggatcattcttcggaaaaacttgcgtatcgaattcctaagggaacgtatagagtgggtcatttatga

SEQ ID NO: 45822 - DNA, 564 bp, Leptospira santarosai
atgaataaaccgcatatctacgcagcttctatactcagattgttgaaagggccgatcaacagcgagtccgatgcaaagatttggcagaatcttttggacaacgaaaaaccggtgcgggaacactttgaaaaactgggcatttttttgcacttggatcgggaagacggttatgcgtttctacgacagacttcggacgacgaaagtgccgaatcggatgagaaactgcccgtgatcacccgtaaacttccgcttacgaaagaggagacgttatttctcattctactgagggaatgtatcatagaaatcgaagaaaaagatccttccggttccatcctttttagaaaggaagagctatcggacaaagtgagtccttttttctccgatctctccgatgaaattgatcggcaaaaaagattcgaaaaattacttcgcaaatccgaagaactaggttttgtcaaacagatcgagccggaaacgattcggatcgaaaaactcttaaaggcgaaattgaccgtatccgagttagagggtctacgcggtaagtttcgactaggaacggaataa

SEQ ID NO: 45823 - DNA, 3357 bp, Leptospira santarosai
atgactgatttattttcacccggtgaaattgccgccaataccggatatagacttgaattcttggaaattctaaattggggaacttttcacggtaggatttggaaattacgaccggaaggggaaaactttcttttaaccggagcgaacggttccggcaaatccacgttagtcgacgcgattcttacgctgctcgttccggccgcaaaacgaaattataatctggcttcggggctcgaaagtaaaaagagagatcgatcggaacgatcttatgtggaaggccactacggtagatcctcttccggtagcgaaggcattttgaaaattcgcgggaaacaagaagagtgttattccgttttatcggcggtattccaagcaaatggaaggttcccgcgaattcggattgcgcagattttttggttcgaatccggagaattgaaaaagatctaccttttttccgataaagagttggacttcgaaaaagatctggttttgggaaaaagaaccgtaaaggaattgaaagcggatctgaaaaattccggggcaagactttacgatcagttcaaggcgtataacgtggattttagaaaagcggtgggtttggaatcggagaaagcgatcgacctattcaatcaaatcgtagccatcaaatccttaggagtgttgaacgaattcgtccgagaacatatgctcgagtccaaggataaaagatccaggatcgaggaattgaatcgtaatttttccgatctgagcgaaacatacgaggcgattgtaaacgcaaaagaacagttgaagttgttggaaccgatcgaaaaaaaagccgccgagtatagggaatggaatcggaaggcggccgatcttcaggctttgatcgtatatgttccgtattattttgcggaaaaaaattacgagcttcgtcaaatcagagaacaggattatctttttgaattatcgcgtttgaaagacagatccgacgaactatcgactgaaatcgaatccttaaatcaagaggaacggaagttattcaacgcattagaaaacaatgatactcaaaggagaatcgccgatcttgtacgaaaacgggaggggattctctccgatctcaaaacgcgtggaatcgaaaggaaaaaatattcctcctatctttccaaaatcggtctggaggaagcgttctccgaagaaacattctatacgaacctgcgcatagccggaggaatgcttacggaaaccgattcgatttgggaagaaatcagggatcgatcgggaaagctgacgcttcaaaaaatggaattgcaaaagaatttcgattcggttcgttccgaattggagtatctgaaaaaaaagcgggataatcttcccagaacccaatcggaaattcgggcgaaaattgcctccggaatcggactttccgaaaaaagatttccctttatttgcgaattgatccgcgtcaaagaatccgaaaaagaatggaccggggctttggaaaggctcttgagaaatttcggcttacggatgttagtcgcggaagaggactacgaggccgtgtcggcttacgtgaattcttcctatctgggagggaagttggttttttcaagaatggttcctttatcgggaccgatcttgcaacccaaagacaaggaagaagttttctacaaattggaattgaaatcggaattgtcgaacgtaaagaaagaatggttggaagcgcagatactgcgcgagttcggacatatctgcggggatctgaatcgtctccggaaagaggagaaggctcttacaaaagaaggtttgattaagtccggtagaattcgacacgagaaggacgatcgtaagaacatttcggacgcaagagattatattttaggttggaataatacggagaaaatcgccgcgttggaatccgaatttgccattctcgggcagaacatctaccggctgaatgctgcaatcgacctagtcagagaagaggaaaacaaaaacaaaaacaaacgggacgacctgcttctctttctacgtttcgaacaattttcacaaatcgacgacgaaagtttgaaaggtccgcttcaggatacggaaagacaaatccgggaattggaattgcgttccgaagaatacgggaaattgaaggaacaatacgaactcgcaaaagcccgcctaacggatgttcaagggagacaacgggaaaccgacaaggaattcaacgttttagaggataggctttccactcttcggaaggacatggaagatctacggcagaggatccgaaaagtcgaccgggaaacgtcgatttcactggagccgattctcaaagaacgactgcgggaaacgatcctaaccctggagtcgatcgtagaaacggaacggaatttttcggatcgtttggttgtagagcgtgatcaatatttggagaaacgagattcgatcggagaagaattgaacagaggaatggatcgttatgtgaaacgattccgggaggaggcggatcgggaggaattgtccgtttcggtttccaacgcggaagcgtttgcgaaattgaccgaaaggatccggcaggatcgattgcccgaatttcaggaaaaatttcgaacgatgatgtccgacaaagtcgcaaaacagattttggatttcaaggcggaattggacgacgacgtctctgaaatcaaggaaaggatcgacgaactgaacgattcgttaaaggatttggattattctaaaggaaaatcttatattcaaattcgatattttgataccaaggatcgggagattgtgggcgattccggctttaaggaaatgttacgcggaagcattccggatttgggagacagttctcacaatgaggaaaaattcgctaaaatcagagagttgctgaaaaagttaaagggagagggcggtagcgatcgttggcccagactcgtaacggatcccaggaactggctggatttccaagcggcggaattccttagggacaacaatcaaattcttcaggtttacgattcgtccgcgggtaagtcgggaggacaaacggtaaaacttgcttatacgattctcgcttcggcgatcgcttatcaattcaaaattcgtgaacggaattcgtttcgttttgtggtgatcgatgaaatgttcaacaatctggacggagagaattcaaggtatgcgttgaacctctttcgtcaattgggtttacaattgcttgtcgtaactccgatggacaaaattacgattgtcgaaccttatgtgagaagcgttcattttgtgaaaaacaattcggaaggaaacgattccagagtgtatccgatttcgaaggaaaatgtatcgtccgggaaggatgaaaattcggaaaggaaagtgggaaatttatag

SEQ ID NO: 45824 - DNA, 1176 bp, Leptospira santarosai
atgatttctccggaaattttacgcaagagatcgttggcatactatcataacgaactcttacgttctatcgtcctaggaggtgttttatttccctgggaaatttcgatcggtaaagttcttccggaagagatcttaaaaaatccgtctttgttacgagaattacgggccgaatcgaaagaaaacaaaggtttcggatttagaatcgtctttcgttcgaaagagacccggaaatacggaatacaaacgattcctacgaaaatcgtttttgataccgaagacgattttttgcgttttacaaaaaaaaaagacgaatttctttcttatcgcaccgactgtacgttgattctttccgttcttcccgagctgaaagattggattttaaaaaatacgttatccgtaatcgaagagtccggtaaatgggaaagtattctttcggtctgttcctattttttagaatatagaaatcccggattgtatattcgagagttgccgatccgaattcctacgaaattcatcgaggaaaataaaaaggttttgagaagtcttttggattttctattgcctgagatcgtcgatgcgaaggatttcgaaactcgttacggattaaaaaaagcggaacctttggttcgatttcgaattttggatctcggaattgcaaagtcttccaccggaggtttaacggatttgagcattcccgtccgggattttagaaagttggaactctccggttgtggaagggtttttatcttagaaaataaaacgaatttcgcgaacctattcaattttttaagttttccgcaactgaagggaacgatctccattttcggtcagggtttcggattaaacgttttaaaggattgtagctggttggagaaaatggaaattttttattggggagatctggatgttcagggtttcgaaatcctgtcgcaactacgggaacaatatcctcaaagccgttcctttttaatggacctgaagacgttcgttcggtttcgagactttgcggtagacggtatttcttcttctaaatcttccgaaccgaaatttctcactccatcggagcgcgaaacttggaagtatttaagttctttagattcgaaaaatcggttggaacaggagaaaatccctcacgaatacgtgcaagaagttctgtccggtttggacggatcgtag

SEQ ID NO: 45825 - DNA, 1473 bp, Corynebacterium minutissimum
atgtctgttgaagcacgcgccctatcgctgcggcgtttgatgcgcgattccgccgcgatccggctcctggccgcggataacgcgcccgtgattctggcgttgatcgcggagtacttcccgcgcggcacccgggcgcgcccggcggcggaggtgtatgagctcatggtcaccgatttcgaggtgctcgccagtgagttttccatgccccgcacgccgcagaattactgcaatgactgggtcaaggccgggtggctcatcagaaagtccggaaagagctcccacggcgaaacactcgagcccagcgaggaggccttatccgcgctcgaagccattgagcgctgggaggcaccagtgaccacggtgacggcgtcacgcgtggaatcaatcagctccgcgctgcaaaggctagcgcgggatacgaacgaagacatcgccagccgcgtggccagcttggaggaagaacgcgaccgcatcgaccgtgaaattgagaaagcccgccgcgggcagttcgaaaggctcaccgccgcggaggcagaagaacgcgtccaagacgtgctgaacatggccatggccgtgccgagcgatttcgcccgggtacgccacgagcttgaagccctcaaccaccaactgcgccgccaacttttggatccagagggctaccgcggcgaagtgctggaggagatcttcaacggcgtggaccacattgcggagtcggacgccgggcgcagtttccgcggcttctattccctcttgatggatagggagcgcagcgcctggttggaccagtggatcacggaggtcctcgacagcgaagccggacaggcgctagccccggacaggcggcagcagctgcgcaggctttttcgcgatatggaggacaccagcttcgaggtcaaccagaccatgacggggctggcacgcagcctgcgcaactacgtctcctccgagcaattcgcggaggaccggcgcatgattgagctgctgcgggaagcccgcggcatggctatcgatgccgcacagaactccgagctcaaagcctttcaccggatggagacaccgctgcagcgcatcggcatgtcgattcactccgtctcccgcatccgcctggccaacccgggacgggaagtcgtggaggaaaccccggtggcataccaaccggaggcagaagacccgcaagccctgtatgagttggtgcgcgaatcggagattgacttcgaggaattgcacgaggcgatacgcggggccgtcgcccagtccggcccctgcacgattggccaggtgctgcaagcccatccaccaacccagggccttgccagcgtggtgggcttggtgcacatcgccgaccagcacccggtgcccgtgctacgtccatcgcgtgagaaagtcacgtggaccgaggaggacggcaccgtgcgctgcgcccatatccctgccaagtatttcgatcacaccaccgttaaggagctacagtga

SEQ ID NO: 45826 - DNA, 666 bp, Corynebacterium minutissimum
gtgaccgccgcacacactccccgcgtcgattccgcacacgagccaccgctgtgggagcacgataaaggctcgctgacctaccactcgcggcgcgcgttagtgcagctcctgcagggcccgctcattcgcgcgcagaaggaaccggtgctgtgggccgccatcatctcggatgaggagaacctccgcgcccggctgcatgaggtgtttctggaactcgtcgtggacgagaccgagggcttcgcgtttacccggatggtggaggaagaaaccttgagcatcccgcaggtgctgcgcacggacaagctcaagcacatcgacaccgcgatcctgctgaacctgcgccaagagctggggcttgcgctgcccggcgagcgggtcatcgtggacgtcgaggatctccgggagggaatcggttacgtccgcgcagtggacaaccgtgatgaagccggtttcaaccgccgcttcaacgccgccatcaaccgcattcacaacgactactccctgctgagtgctaccgagaccgaagggcgcttcgaggtctcaccggtgctccgccagcttttcgacgcctccaccgtcaccgccatccgcgatgaatacgcccgcctggcacaagccgatgaagagcaggtagacgaggaaaaggagaaggcttccgatgactag

SEQ ID NO: 45827 - DNA, 3399 bp, Corynebacterium minutissimum
atgactagccacaccagcctgtaccccggccaattccgcatcagccgcattcagctgatcaactggggcaccttccacggctacttctccatcccggtggcgcgcaaaggtttcctcatcaccggcggttcgggctccggcaagtccacgctgctggatgcgatgtcggcggtcttggttccacagagccacctgaagttcaatgcggcgtcgcagcaggacctcggccggcacaacgggcgcagcctggtctcctatgtgcgcggtgcctggcggaagcaggaaaacgcgcagaccggtgagatcgcccccgagtacctgcgggagggcgctaccaactcggtggttgccctgacctacgacaatggcgcgggcaagcagcacacgctcattgctatcttccgccttaacggcggtgagaactcagtaggccagatcaagaagttgtatgggctggtgccgggtgatgaggacgtcgataagctcagccccttgctcacccgcagcctggacacccgcaagatcaaagccctgtacaaggggcccggcgcgtcctttacaccgacctatgccacgtttgcggatcgtttccgcaaacgcctgggcatcaagaacgtggagggccagctgctgctccaccgcacgcaatccgcgaagtcgctctccagcctggatcagctctttcgggactacatgctggacaagccctcgaccttctccagagcggaggaggccgtggagcagtttgaggatctgcgccaggcgtacctgcgggtcgaagacgtcaaggcccagattgatacgctcgctcccctaccccagctgcatgcccagcgcgcaaccgcggaggcagataagcacaaagccgaggccatgagcgaggcgctaccggccgtgcgcgcccgcctggtggcagaagagctggactccagcatccgtgctctcagcgcccagcaggtagaagcccaatcggaagtggaatccctcgaggccgacgtcgcccacctcgatgatgcggaacgccgcgccgcgatggccgtctcccagctcagcgccggcgagctcgatgccctgcgcgcaaagatggagaccgccgacatagagattgagcaccgctccaaagaattccagcgccttgcggctgccgtgggcgagtggaccgagcactatgagctcagcccgcaaggattcgcagagctacaggccaacgccaagctgcgactctccgacttcgagaccgactccgccaatctgacgaaccagcaacaggaagccggcgtggccgcccgcgatgcggccaccgcctgcgcccggctcgatagcgagctgcgctcttttagctcgcggcgcaccaacatcgacaaggccctggtggagctgcgctcccaacttgcccgcgataccggctacgccgaatccgagcttcccttcgccggcgagctcatcgacatcagcccgcagcaggcggactgggagccggtcatccaaaagctactgcacggcttcgccgctacgctgctcgtgcctgaggacgcgcggcaagccattaaccagtgggtcaactcccgcaacgtgggtacccgtctggaataccgcaccatcccggagttcacgtcggcgccagcctccgcgcgcagcccgcggcagctcatccacaagctggaattccaggatcaccccatgacggcgtgggtacgccaacacatttcccgccgcttcaactatgaatgcgtggagtcggtagcggaactggacaaggtcaccacaactcccgccgttacccgcgatggcttggaaagccgccccaaggacaaggacggctccacgcgtttcatcaaggatgaccgcacgcgctttgccggtaccgcatggtaccgggtgggttccaccaacaccgccaagattgagctactgcgctcccagttaaagcaggccaaagccaccgccagcgccaccgccaggcaggtccataacctcaaccggaagatggacatcctgcgcacccagcgcgataaagcccagcaggtgctggactcgagattccaggacattgacaccgcctccgcgaaagcccgcaagcaggacctgcaagcgcaatacgattccctggcatcctcccccgaagcccaagccttggccgccgcacatcagcacgcgaaggaaaagctggaggctgcccgcacccggctcaaccaggcacagaaacacctcggtgacgtcgaaggcgagctgaagcgctccaccgagcgccgccacgccatcggtaccgttccggaaatcgccgacaaggacatagcgaaagccgtcgaggaggccttacacaagggcaagcgcacgctgaccatcgataacatcgatgcccggcgcgatgaagtccaggccgacctgcaggacgccgcccgcaccgccgcgcgccgcatcgaggacgccaacggcaagatcgtctccgtcctccacgcttacctgtcccagtggccagcagaagccgccgacctggaaccgcaggccagcttcgccggcgaaggcatagagaagctgaagtacctacgagctgaccgcctggcagatttccgcgcccgcttcctggagctgctcaacggccagaccgtccagaacctctcccaccttgcctcctccctgcgccatgcccgcagcgatattgaaacgcgcatggagttcatcaacaagtccctggagcgctcgcccttcaacggtgagcgcaccctgcgcattgatgtcaaggatgcccgcggccaggtggtccaagacttccagcgggacctcgatgccgccacctcccacagcctggccgaaatcagcaaggatgagcacgatgccgccctgcagcgctaccacgccctggacaagattctgagccgcctgggctcgagccacccggaggatatccgctggcgcaacgtggtcttggatacccgtcgccacgtcagcttcatcggccgcgagtgctaccccgacggcaccacggccaatacctatcaggactccgcgtcgctctccggcggccaagcgcaaaaactcgtcttcttctgcctggcagcggccctgcgcttccgcctagcggagccggaccaggacgtgcccacctatggctccatcatcttggatgaggcctttgaccgcgccgatcccgcctttacccgcacggccatgtccgtctttgcttcctttggtttccacatgattctggccacgcctttcaagctcatccagacgctctcgccctacgtggatggcaccatcgtggtcaactacgacgagccgattatcaacggccgcccgcaggcgcgcacaggttattcacttatcgacgcctcctccctctccacccacaaccccgaacagccccgccccgaggagcccaccgatgcggatgcctaa

SEQ ID NO: 45828 - DNA, 1152 bp, Corynebacterium minutissimum
atgcggatgcctaaagacctgcaggtgcacgcggcgaaatacctgcgcaaccatttcgccgaagcactgtccgatccggattcgctgcacctggcgtggccgctgcacccaccgacagccacggccgccgcccgcgatattggcaccacccaagacttcatccgcgcctggcagcgctggccgcaccaggacgaagtcatctatgaaacgcgcaattggtcccgcgcgggcctgggcaccaataacgtcccgacccgcatcacaatcaacggcgccgaacgcatcgccaccgctgccggcttggaacgcgagtattccaccgcccaacagcgcgcccaggacatcgccgccatcttcccggagtccccggacttcacccacaccgtccaccgctcctacaaccagtggaaagacttaagcccgtacgacctgcgttgcctggggccgtgcctgcgctggctgcgcgcaaaccctaattccggcgagtgggagcgcgccgtgccggtcgaaggcgtggacggcaagtggattggcaaccaccgccgcctgctgctgacactcctcgcccccttcggtatcacggacttgggcctgcgccgcaacgacacccgcctgcgcctgcgctacctcaatcacacaccagcgctctccgatatcgaaatccccctcgccgacgctgccaaactcttccccgacaccccgccccgggtgctcatcgtggagaataagcagaccttcctggccctgcccacgcttgccgacgcctcccctcccaccatcgccctcctcggctccggcaccgccgcccaccagctccgcgcactgcgctggctacacgaagcggacatcacctactggggcgacctcgatgccgccggctttgccatcctcaacgccgtgcgcgcccacttcccccacacgaagtcactactcatggacaccgccaccgtcaccgaattccaacacttagccgtccccgaccccggcgacggctccgccaccctcacccacctcaccaccgaagagcagcgcgcctaccgcctactcttcaccgcgggccggctgcgcattgagcaggagcggattccttttatgcatgtaagtgaggaaatgagctaccaactagaagcttggattgcaagcctcaattag

SEQ ID NO: 45829 - DNA, 1437 bp, Myxococcus fulvus 124B02
atggacttcacgacgctcgagaccttgcgtctgaaacaccccggctggcggttgctcgtcgcggaccacgcgccgctcatcgtcggcttcctgcaccgggtgttcgtcgcatccaacgcacgcgccatcgcccagcgggagctggtgctgcggctggaggaccacctgcacgccctgcgcgaatcgaagggcgcggccgcgttcccgcgcggcgcgagcgcctatctcgatgagtgggcggccgacggcaccggctggctgcgcaagttctatccgccggagatggacgagccgcacttcgatttgacgcccgcggcggagcgcgccatccgctggctcgtccagctcaccgagcagcccttcgtggggaccgagtcgcgactgctcaccgtcttccacctgctccaggagatgaccgagggcaccgaggtggacccgaaggcgcggctcgcggagctggagcggcgcaaggcggagctcgaggaggagatatcccgcgtgcgcgagggccacctggagttgatggacgagtccgcgctcaaggaccgcttccagcagatgtccgacacggcgcgcggcctgatgtccgacttccgcgcgctggaggacggcttccacgcgctggaccgtcgggtgcgcgagcgcatcgcgacgtgggaggggacccgcggcgagctgttggagacggtgctgggggagcgcgacgccatcaacggctcggaccagggacgcagcttccgcgcgttctgggacttcctcatgtcgcccgagcgcaaggaggcgctcacccgcaacctggagcgcgtgctgtcgcatccggcgattcaatccctccagccggacgcgcgcctgccgcgcatccacttcgactggctggaggccggcgagcacacccagcgcaccgtggcgcgactgtccggacagctccgccgcttcctggatgaccgtgtgtggttggagaaccgccgcatcctccaggtgctgcgcggcatcgaacgcaacgcgctggcggtgcgctcgcggcctccgggcgagggcttcgtgtctttggaggaactggcgcccacgctcgagctcccgctggagcggcccctgtatgggcctgccgcccgcgcgcggatggtggacgaggaggtgaaggaggcgaccgacgacgtgccgtcggaggcgctgttcaacctcgcgttcatcgacaaggcgcggctgcggctcaacgtgcgtgaggcgctgcaggcgcgcgagcaggtctccctcgcggagctggtgcgcgagcacccgctccagcacggcctggccgagctcgtcacgtacctgagcctcgcgtcggaggaccggaaggcctcggtcgacgatgcgcgcacgcaggacctcttctggaccgatgcgagcggcgccacccgccgcgcctcccttcccctggtgctcttcgtccgatga

SEQ ID NO: 45830 - DNA, 615 bp, Myxococcus fulvus 124B02
atgatgacccacgcgattcgtaccgccgatgccgccgacaccctgtccctcgtgctcgtctcgctcctcaagggcgcggtgtaccgcgacgagcatgcgggggtgtggcaggccctgctccagctccagccgaaggtgcgcgagcagctggccgtgctgggcttgaagctggtgctcgacgagccggagggctacgcgttcctgcgccagcgctcggagtcggagggtggtgtcgagctgccccggctcgtggcgcgaaggcagctgggctacggcctgagcctgttgctcgcgctcttgcgcaagaagctggcggacgtggacgcggcggcggggggcacgcggctggtgctgcggcgtcacgaggtgcacgagctggtgcggctgttcctcccggagggcaccaacgaggtgcgctgggcggagcgcgtgaatcaggacctggagcgcgcggtgggcatgggcttcgtgcgccggctgggcgaggaggaggacaccttcgaggtgcgtcgcatcctcaaggcgttcatcgacgcgcagtggttggaggacttcgaacggcggctggaggcgtaccgcgtccggctcgtcgaggaacaaggaggcacggaatga

SEQ ID NO: 45831 - DNA, 3384 bp, Myxococcus fulvus 124B02
atgagcacggtgcgaaccctcacccaggcggacctgctggacatcggcgcgcccaacgagcgcgcggggttccggctccaccggttcgaggtctacaactggggcaccttccaccagcacgtctggcacctggacctgcgtggcgagagtgggctcctcacgggagacatcggctcgggcaagtcgacgctggtggacgggctggtgacgctcttcgtcccgccgcagaagctcgcctacaacaaggcggcgggcgcggaggcgaaggagcgcaacctgcgctcgtacgtgcgcggccagtacaagtccgagcgcggcgacgcgggacaggtcgcgcggcccgtctacctgcgtgacgcgccgacgtactcggtgctgctcgcgcacttccacaacgagggctacgggcaggacgtcacgctcgtgcaggtgatgtggatgcgggagccggaggggcagccggtgcggctctatgtcgtggcggacgggaagctctccatcgccgagcacttctcgcgcatcggctcggacctgaacgcgctgaagaagcggctcaagacgctcgcgcgcgaggtgcacgagaccttcccgccgtatcaggccgcgttccggcggcgcttcggcctggagaacgagcaggcgctggacctgttcctccagacggtgtcgatgaagtcggtgggcaacctgacggacttcgtgcgccaccacatgctgccgcccttcgacgtggagacgcgactggcggcgctcatcggccacttcgacgacttgcaccgcgcgcacgaggccgtgctccaggcgaagcggcgggtgagccggctggagccgctggtggcggaccacgagcgccacgccgtcctggcgcgggagctcgaagcgctccggctgtgtcgggaagcgctccgtccctggttctccgagcagaaggcgcggctgttcgaggagcggctggccagcgtgcgcgacgagcgcgagaagctgcgcgtggaggcggaagcgcttcgcgagcagcgggagcggcagggcacggagcgcgacgggctccggcaggccatctccgccaacgggggagaccggctggagacggagaaggcggagctgacgcagaggcggcgcgagcgggacgagcgcgcgctgaagtcggaccgctacgcgcggatggcccagtcggtggggctgcccgcggccacggacctggacctcttcctgtccaacacgcgcgccatccagctccagcgcgaggcgacagcgggcgagctggccgaggtgcaggagtcgcgcaccgagctgggcatggcgctgcgcgacttgaagaagtcgcacgaggccgtggccgtggagttggagtcgctgcgccgtcagcgctcgaacatccccgcgcgcttcctccacctgcgcgccaggctgtgcgcggacctggggctgcccgaggaggcgctcccgttcgccggcgagctgctgcgcgtgcgtgacgaggcgcgtgactggacgggcgccatcgagcgcgtgctgtattcgctgggcacctcgctgctggtggtggacgcggactatcccagcgtgagccagtgggtggagcgcacccacctgaacgagcggctggtctactaccgcgtccgcgaggatgggctcgcgaggccccaggagcctcgccccgattcactcccgggcaagctgctcatcaagcccggctcgcacatgggcgggtggctctcggcgcagctcgcgcggcagttcgactacacgtgctgcgacacgccggagcagttccagcgcgcgcgtcaggccctgacccgctcggggcaggtgaagacgggcggcgagcgtcacctgaaggacgaccggcggcgcatcgatgaccgctcgcagtgggtgctcggctggacgaacgactccaagcgccagtcgctggagtcggagggcaaggccctgcagacgcgcctccaggcggcctcggcgaagtgggaggcccacgagcagcgccacgcgcggctgcgtcagcaggccgagcagctgggccagctcgcggtgttcgacaacttccgggagctggactggcgctcggtggccagcgacatccagcgccgggaggcgcggctgggcgagctggaaggggagtccgacgtgctgcggggcttcgagcgtcagctcgccgccatcgagaaggagctggcggcgacggacaccgcgctgaaggcggtggagaagcgtcagggacgacaggaggagaaggaggaggcggcgcggcggacactggcgacgtgtcaacgcacggcgagcgagacccccgagtccgtccgggcctgcttcccgcgcgtggccgggttgtgcgcggaagggcagggggagctcttgctcgaagcggaggcgtgcgacgagcgcgagcgtcaggtgcgcgagcggctccagtcgcgcatcgacggcgaggcgcgcaagctggagcgggtgcgcgacgcgctgttgtccgcgatgcaggcctaccgcgcggagttcccggtggagacgcaggagctgggcgcgagcctggaggcggccggcgagtacgtggcgctgctccactcgctgcgcgcggacgacctgccgcgcttcgaggagcgcttcaagcgcctgctcaacgagaacaccatccgcgaggtggccaacttccaggcgcagctgcaccgggagcggcacggcatccgcgagcgggtggacaccatcaaccgctcgctgagggccatcgactacaacccggaccgctacatcgtcctggagctgtcacccacccaggacgcggacatccgcgagttccagcaggacctgcgagcctgcatcgagggcacgctcggcggcgcggaggaggacgcctactccgagcagaagttcctggacgtcaagcgcatcatcgagcgcttccggggccgcgagggctccgcggacgcggacgcgaagtggaccgggcgcgtcacggacgtgcgcaactggttcagcttctccgcctccgagcgctggcgcgcggacgaccaggagcacgagcactacgcggactcgggcggcaagtcgggcggacagaaggagaagctcgcgtacacggtgctggccgcgagcctcgcctaccagttcggcctgcagtggggcgagacgcgctcgcgctcgttccgcttcgtggtcatcgacgaggcgttcggccggggctcggatgagtccgcggcgtatggcctggagctgttccgccggctggacctgcagctgctcatcgtgacgccgctgcagaagattcgcgtcatcgagccgtacgtggccagcgtgggctacgtgcacaacgaggaggggcgtcgctcccgcgtgcgcaacctctccatcgagcagtaccacgcggagcgcgaggcccggagcgcctga

SEQ ID NO: 45832 - DNA, 1464 bp, Microbacterium sp. Ag1
gtgacaggcactcgagtggaagcggcattctcccgcgccgtcaccgccttcagcactccgactctcgacctgctgcacggccgtttcgcccccttcgtcgtggcgtcgctgtctcttctgttcacggcggaccgggtctccatcccgattgccgacgcccaggccgagctcgcggagatcctcgatgaactcagggatgcgggcgacgatgacgacgatcgccgggtcccttcgggaaccggccgcgacgtcgcgaggaactgggtccgcctgggctggttggtgcagcagatcgacgaggacgtcgaggtgtatcgactctccgcgcacgctgtcgaggctctggagatcgcggggcgcacgggcggcgggcgcacgcgcgtatccaactcccgagtgcgcacgctcctcgaggccgtggagcatctggccgacagcgccgaggcagaccccgttcgtcgactcgcccgcctccgggaggagcgcgccgcactcgatgccgagatcgatcggatcgaggagtcgggcagagccgatccactcgatgatgaagagctcttcgaggaagcggagaacgtgctgcatctggcgcgcgagcttcccgccgacttcacccgggtcgccgaatccctcaaactcatgcagcgcgacgtcgtcgcccatctgcgccgtgatgagcggccgacgggtgaggtgctgcgcgagtacctgcagcgtgcgcaggatgtcatgaactcgacgccggaaggacgcgccttcgccggcgctctcaagctgatcggcgatccggagcgcatcgatgccctcaccgaccaactgcatggtctgctccgacagccgttggcccggatgctcgacagcacgcagcgggccgagctcgacgcgatcggacgccgcgtggagctcggggtcgaggaggtgctggctgcgcaacgtcgagcctcgcacgtcatcaccggccaggtgaagacgcacgatccgctgcgggaccgtcagatcgacgacctgctgcgtgacgtcatcgccgcgttgcacgtgtgggacgggacgggggcgagcgacgcaccggtgcgcagtcttccgctcgccgacctggggcacctcaggcagaccgtgagcagcatccgtccacccgcggtccccgcccctctggccgacgccggggacgtcgagttcgccgacgtcgactcccgcgcgtggggtggtccgaggtatgcggagctcgagcagtacgtcgcggggctcggacccgagttcgatctcgccgccgcattcgccgagagcgacgacgacacccggcgccctgtcgacctcgtcggactgctcgagatcgcccaccgcaacggcatgaccgagagcgagacggtgtcggtggtcgaagctctgcgccccgacggctcgacgcgacgcttcgcgttcggtgccgtcacggcgcgcaacacgaaggaagacgcacatgcctga

SEQ ID NO: 45833 - DNA, 663 bp, Microbacterium sp. Ag1
atgcctgaagagagccccgcgccggaagcagcggtcgatgacccgttcatcgctcccgtccccatggaagaagacatcgaggagcatttcgccggcgaccgcggcaccctcgatccggagatccgccgtctgctcgcccacatccttcagcggcgcttcatcgccgcggagcgcaaccgcaaggagtggacgctgctgctcgatcatcagcacgtgatcgagtcgcgtctgaacgacctgtacctccgacttgtcgtcgatcacggtcgcggtttcgcctacaagcagcagctgcgctccgatgagatcgatatgccggtgctgctgaaggactccccgtacacacgtgcggagacgctcgtgctcgtgcatctgcgcaccgtctaccagcgggagtccgccgccggtgagtcgtcggtgcgcatcgacatcgaggatctcgagcagaccgtgctgagctacttcaccgatgtcgatggcggaacggcacggcagcagaaggcgatcaggaacgcgatggacagactggatcgcgaggggatcgtgcaggaggagaccagcgggcgctatcggatcacggcgctcgtcgaggtcgtcctcagcgccgagaccctgaaggaactccgcgactggctgcggtcgcaggaagcggtgcaacgatga

SEQ ID NO: 45834 - DNA, 3360 bp, Microbacterium sp. Ag1
atgacgatggtcgacacgctcttcgggctcatccccgccggctcgcggggacagcagtggatcgcggacgagctgcagctgatcaactggggtggatacgacgggggcccgcaccgggtgcgcttctcgccgaacgccacgctgctgtgcggcggctccggctccggcaagtcgacgctgatggacgcgtacatcgcgctgatgatgcctcacacgacgccgttcaacggtgcgtcgaacggcggagtgaccggccgaccgcgcggcgaggagcagcggaacatcctctcgtacgggcgagggaagatcgacgaatcccgcacggaggacggcaccaagctgcgagtcctccgcggcgacggcgaagacacatggagtgccatcgcgacgacctggctcgaccacgacgggtcgcggttcaccgccgtgcgggcctggtacatcccggcggatgcccgcgtgctggaggacacgacccgggttcgagcgaccgtgaacggggcgttcgacctggcacagctggagaaggccgcgacgcagcggctctccgatgcgtcggtgcgggcagcgggactggagacgctggcgacggaccgggagttctctgcccggctgcaggcggtgctcgggatcggggcggccgggtccggggcgaaggcgatcagcctgctggccaggatccaagcggggcagcagatcaccacggtcgacgatctgtacaagaagctcgtgctggaagagccggagacgatggccacagcggatgccgtcgtggcgcacttcgatgagttggagagcacgcgcacccggatgctgacggcgaagcagcaggtcagcgcactcgaacccatccgcggaatcaaggagcgcatcgcggcttcagccgaacgggtacggatcatcgacgaagtcggagtcttcaccgatccgtcgtccctcgccgcgctctggaacgctcagcgccgcttggatctgctgcgcgaggtcgaggtcgagctgggtgaccgctcccgcgccctcagcctcgccgtgcgggagaagcgcgccctcgtcgacgccgccgatgccgagcgggagggtctgctcgatgtcctgcggcagtccggcggtgaccgcctcgagacagcgcaacgggagctccgcgtcgccgaacgtcgcctggacgacgtgcggcgggaacgcgcgaagttcgacgccatcgtgcgggatctcggtgcggaagtggagaacgccgaccagttcgaggccctcgtggccgacagtcggggttcatcgccgagatcggggatccgggacgcgcgcgcggccttcgccgatgccgagaccgcccgcaggacgaccgagctcgagatctcacgcctgcgtcaggagcgcgagcgcaccggtctggtgcgcggcagcattccctcccacctcgacgagtcccgcgccatgctcgcggaggcggctggtctcgacccttcggagcttcccttcgtgggagagctcatcgaggtgcggacggagttcgagccgtggcgcgaggccttcaacctcgccctcggcggcttcgccaggacgctcctcgtcgacgcggagaagctgtcgtccttccgggcggcgatcaactccacgcgcaccccggagcgcctgaactacgagggcgtccccaccggactcctcgaggtgcgcaacgccgatccgcagaccctccccgggaggctcgactacctgccgacccccttcaccgggtggctccagcagcggctgcaggaccggttcggatacgtgtgcgtcgactcatcgtcccagttggacgcccatcagaaggcgctcagcatcaacggccaggtgtcgcagggcagcaggggagcccacggcggtcagggacgcgccaacgtgctcggcttcaccaacgaccgtcggcttcgcgagatcgatgaccagctgcggctgctgaccgatcgtcacgacggctacgcatcgacggcgcaggacgccgaagccgccctcgaccgcatcgaggcacgatcgaccgcattcgcgaagatcgaggacctcacgtgggagcagatcgatgtcgccgcggtcgaggccgaacgggaacgttggctctccgtcgaagcggaggtcacgacagccagccccgagatcgcacagctcaagcgtcaggcggaggatctgcggtcccgcgcgagcacgctccgggacgaggaggcgcgcctcagcaacgaactcacccagacccaggagcactggggacaggtcaccgacgacgtcgacgcctgtcagagagtgatcgattccgcggcagccacggacctctcgctcggcgagacacatgcgtcgttcctggacggccggttcctgcacgccgagagcggggcgagcgtaaccgcgtcggagcggctcacacacctggacaccgcgctcaggaccgccgctcagcgcctgcacgaggaccgtcgtgaggccgcggaggcccacgagcagcagcgcgagagcatgcggcgactgatgacggggttcctcgagcgctgggacaacctcacgatcctgccggaccccgacgagtccgtcggcgagttcgagagcattctggaggcgttgcagaccaacgggctccacgagctggagaccgagtggcgtgacagtctgctcaagctctcggggaacgacctgacgagcctcgactcgactctcagccggtcgctccgcgagatcaaggatcgcatcgacccgatcaaccgcatcatggaggagctgccgttctacgacgacgaccatcgtctgcagatcaccccgcgcgagaatcagagcgaggcacgcaagcggttccgccgcgagctccgcgaggtgcggggactgatcgacgctgccgagaccgacgccgagcgcgaggccgtgtaccgcaagatgagccgtctgatcggacggatgcgccgtacggcccccgacttcgccgagctcatcgacgtgcgcaaccacgtgcgcgtgagtgccgagcgggtcacagcgacgacgcgggagcatgtcgcgctctacgaccacatcggcgagaagtccggaggggagtcgcaggagctcgtcgcgttcatcgtgggagcagcgctgcgttaccagctcggagatgcgggcgctgcccggccgcgctacgcccccgtcttcatggacgaagcgctcatcaaggcggatgcccacttcacgaagcgcgcgattggcgcatggcgtggactcggcttccagctcgtgatcggcgcgccgaacgacaagtacagtgcgatcgagccgcacgtcgacgtcgagtacgacatcctcaaggacacccgcgggcgctcctgggcgaaggcgaaggtgggtctgccggacgcggcgatctga

SEQ ID NO: 45835 - DNA, 1461 bp, Serratia fonticola
attagtttctatgagttccaagccagattccggcgtatctatcaggaaaatattgcctggaagttattgcgcgcagataacgccccgttgatattggctttcgtcgccgatctgttcagtgaagaaaatgaagtgccctatgggcgagcccgcattctgttggaaagcatccttgaacagtgccgcctccagggcatttggatcaccgaaagtccagcgaccagctatctgaaccaatggatccaggcagggtggttacgtgagttggacggccaactgaccaaaaccgatgcctgtgagacagccctacgcttcagcctctccttagatcagcacaatgccaccaccacagcctcacatttacgcatcgtacaagatgcggtacgtgattttgtcatttctatttcccccaatcccgatcgccgtttggcggtgcttgagcagaagaggcgtgaaattcagcgcgaaatcgatgcggttaaggccggagtgatcgttgagctgtcaccttctcagcaacgagagcgcttacgggaaatctatcagttggcttcggtgctgacgggggattttcgccgtgtcgaagacgaaatccgcaccatggataaagatattcgtatccagatgatcgaacagggagcaagccgaggggaagtgctattggcggtgctggaaaaagaacagctattgaccgagaccgatgctggcagtgccttcgaggggtttttccaattattgtgcgatcaaaaccgtacgacggaatttcgtgagcagttacaggtgatcctgaatctcccggtcgcagaatcattaacggcccagcagaagcagtttcttgggcaactgatgcgtgagctgagccgtgaaagtgaacgggtatttctgatccgccgtaagaccgaagagagcttgcgtgcttatatcgaaagcgggacattgtctgaacagcgcgcggtggatcgtctgttggggcggctggagcggttggcgatccgcttcaaggaagaccagaacagcttgaaaatcagcacctcggtacgtctacccactgggcatattcgcttttactcgccagatgcgctgctgctgaagtctcccgatgagcagttggatacctctggcgtagaagttcaaaccaacggcagcattcccagcgacgatatgctggactatctggacacggtaagaatgctcgaagtggcgcagtgcctgctggaactattgcaacgtggtggccctatgacccttgccgcattggcacagcagcagccgttagagatggggctggaagagttggttgcctggttgcgcgttgccaaagcggtgaaagcgacagagctggatgaaaaggaaaccataatggtgacggataaacaaggtgtgcaactgaatgcggtgatacccggctatctgctgagtgcggccatgtttcccgcgaacttgggggagctggcgctgtga

SEQ ID NO: 45836 - DNA, 771 bp, Serratia fonticola
atgcggcgtttaagccagcttagcaaagagcaacgggaacgcactcctgagcctgaacccgtggcaaaattgccggaagagcggttggatttggagctggatttggtggtaccagagcttgctaccgctgaaccagagataacggaagttgataccgaggtgttagctccggagatccggcgtactctcgttagcctgctgcgtgttggcgtcgtactggccgcgcaaaagcccaagctgtttgaagccttatgtcgccatcaggccgtcatcggtaatcacctggccaatatgtatctacgtttattgctggatgaaccgggcggagtggcttttgtcctgcagcaagatctggaggaagatgaagagacggaaaccatttccctgattaaccgccggaccttgtccttgtatgacaccttactgctgttggtactacgcaagcattatcaggagcgggaacgcgcaggcgaacagcgtgtgatcattgacattgagcgtatcgaaagccacctgacgccctttctgccgttaaccaataacagcaaggcggatagaaagaagctgaattcggcgttagataaaatggccgagcgctatattttgtcggcgatccgtggtgagagtgagcgctatgaaattaccccggtcattcgttatgtggtcaatgcggcatttttggaggctatgctcgaagagtatgagcggctggctctgaacgcggaaacctctccggctaacaaggaggaagcagatgatggcgaagagtga

SEQ ID NO: 45837 - DNA, 3387 bp, Serratia fonticola
atggcgaagagtgaacaattgacgctggctggtgctgattgtgggcaaatcagactggctgagttatccgtctataactggggctcatttcaccaactgcatacggccgtcatcgatccgttgggcacgctggtgaccggggataacgggtcaggtaaatcgacgctgatcgatggcctgatggcgctgctgctgcccgcgggtaaagcctcgtttaatattgccgcggcgcagggggatcgcaccgatcgttcgctggtgtcctatatgcgcggtagtttcggctcggagcatgacggagccaaaacgcgggtcaaaagcaagcgtgaagggccagtgcttaccgcattaagggcgttataccgtgccgacgatggctcttgcatcgtgttggcagcgctattctggaccaccaaacacagccacgcgctggcggacattagccggatctatctggtggcccggcgcgatgtcgccttgaaagagctgttagatcgctttggtgaaggcaacgtacgtggcttgaaccaatggttgaaagaagatcccgccattacgccatgcggcgataattttagtgattatcaggaaacttaccggcgctgcctgcatatggaaaataaaaatgctccggcattgctggcgcgggcgctgggtttaaagaaaatcgatgatttaaccgaattgatccgtgaactggtgttggaagccagcggtgttaaagacgatgcccgccgagtggtggatgagtttgccgatctggtggcgatccatgaacgtttgctggatgctcgcaatcagcgggatcacctgatcagattccccgatttagatcgtagcttgcgcagcagtgaagcggagatcaaacggctgacggcccagcttgatgccttaccggtttacatgggggaatgtggttttcgcctgtgggatagccggatcaaagggttacaaaaccaactggacgcgctggcgctggaaatcaggcagttggatcgcgatgagcaagaaacccaggagcaggttgaaaaaacgcatacggattatattaacgccggtggcgaccggatcgaaatcatcaaacaagagttggcgcaggctcagcgtcaactggaaagcgtgggagttaaagcctcggagtatcagcaagaggttaaagcgctggggctggagactagcctgcgtgaaggtgtctttctgcataatcaggcgatttcgcgggaaaagctgcaaaccattagcgatgaaaagcgcgcagctcaagatggatttggcgcgctgagcgccgagttggcaaacttgcaggggcagttgcgccaacttgaacaggaattggaagggatacgcgcccggcccgattcgaatatcgatctgcgtttccaacgtttgcgtgacgaaatggtggctgccttggcgttgccacgtgaacaatgtctgtttattggggagctgttggatgttgacccggatcagcaacattggcagggggctatagaacgggcattgggcggtatacgcacgacgctagccgtgccggaggcgagttttcatttagtgacccgctggctgaatcagcgccataccgggcttcatgttcgagtgcaggtggttcgggaagctgtcgcgtcagcccagcccgcgttccatcatgatggctacctgcataaattaacctggcgcgagcatccttaccgcagctggctgcaacaccatctggcgcgttttgatttgcactgtgtcgatacggtcgaaaccctggatgccaccgcattttccatgactcagcaagggttgatccatcgcgaccaaggtcgttttgagaaaaaggatcagcataaggttgacgatcggcgggcatggcaactggggttttctaaccagacgcgtattgcgttgttagagcaggatatcaagtcatcaggcagtgagctgagcaaaacgcaaaaggcgctggaatcggcgcgcatcgatctggatgaggtgaaccagcgggaggctttgtggcaaaagctgcctcgctatcgttgggaagatatcgatgctccgttgtggcaaggcaaggttggccggattgagcagcagcttaatcagtgggtggcttcggggagcgatctccagcagtgtaaagcacgttgggaagaggccaagcagcgtttagccaccttgcggggagagaaagaccgcaagaatgccagccaaggcgggttggataacgaaaaagccaacgcgcagcgcgagcaggataaagccagcaaggctgctgagcctgggatggaagacgaagtgcgtcttctgctgcaacaacgagtcggggctttggacgacgcggagctgtctcaactggcgtttttggctgaatcacatcgcaagcggttggtgacagctcaggataaagccagcgatcgcaagaacactgccctacgggaagcggtgggcagcatgtcatccttccgtaccaagtgggaaattatcgcaggcagttggggagccggtgtcgacagcctgcccgagtatttgcaacacctcgaacagttggagcgcgaaggtctgccagccttggtggagcagttcaaagcacgtctaaacaagcacgccacccagtcaatggtgcgtattcgtcagcgcattgatgccgaacgcgatgatattctggagcggattgcgacgatcaataaagtgctggctcgcaccgagttccgggccgggagctacttgaagttgggtaccaagaccgaactgtatcctcatgtgcaggattttaatcgccagttggataaggttttcgctcaggcaaccagtgacgatcatctggcccgctatcagcagctaaggctggtggtagggatcctcgagaaagccagcaatccggtttcttcgggaacgcaggaaagcctgcgcctgttggatgcgcgttatcaaatgtctttctttgccgaagagcgagatatggccaatcatgaggtgcgtgacgtcctgctatcttcgggcggtaaatccggtggagagaaagaatccttcgctggcactattgtcgccgccagcctggcctatgtgttgacgcccgaaggccaggatcggccggtttactgtacggtgtttctggatgaggccttttccaatacggcggaggccgtcagccgccgggtattgcaggtcttccgtgagttgcacattcacgtcaatatcattacgccctataagaacctcaacctggcgcgtgaatctgcgcgctctttactgattgccgaacgtgatgccaagaaccatgaaagccgcctgtgtgaagtcacctgggcggaaatcgatcggcgcttggatacggcacgccaacgccgtgcgcaaaacctgggcatcgaattgaccgaggttggccaacatggcggatga

SEQ ID NO: 45838 - DNA, 1191 bp, Serratia fonticola
atggcggatgattgggggcgtttgcctgagcaggcttatgccatgatctcgaagcgtgagtggtttcaccggggcaatttgaaagcccgtcttttaggggaacgcccttttcccatacgcgtttcgctgaaaccaccgacgaatcgggcaatattagctgacctggcccattttcagcgttacgtcggtgcctggcggcaatttccgcagcagcaatggcttgagtgggaagaacgtaattatcgaacgttagggagccagcgggtgccgatggcgttggtgcttgaggatatcaccagcttgttggcttatctggggaaagaggcgcaagcccgcagcgatagctgggtacgaaatatggcgccattattggcgatagaggccaaattgtacccggtattggtgaattacctggagttattagcctcgttatccccaatagatattcagcggttacagcagttaattcctcagcttaaacccggcatggggaatggccagtatctgcgtgctttaccgctgcaaggcgttgataccaaatttgtcgagcaatatgttcgcttgattagcgatctgctcgattgcctgcatgatggagcgatcgaagcacaaggtggtttggctaactggctggatgttaaaggcaatcataaaggctggttaacggtacgcccgctatgcgccgccgcgcaggccaggctggggggattagggttgttgcagttaacggtggatgagctgcgacaacaaccgttaccggccaaacatattctggtggtggagaatgtgcagtcaggattgggattacccttattggcagatacgatagcggtatccggcggagggaagaatgtcagttggctggatgcaccctggctggccgataaacaggtcgcttactggggcgatatcgactcgtggggattgcatgtgttgagcgatgcccgcagcaaattgccacaactgacggctctaatgatggatcatactaccgtgatgcgttattcagcgatgatggttgatgaggattcttcgatgaccgtagtgccaacgcacctgacggcggatgaactagtgctgtttgaggcgttgatcgcgggaaattacccaggaacgcgtttggagcaggagaagctggcgccggattatatccaacagcgactcagtgaatggttgagcagtttgcagtag

SEQ ID NO: 45839 - DNA, 1455 bp, Sedimenticola sp. SIP-G1
gtgttttttgcccagggccgggagcacttcttcaaaccgctcaacggcaaataccgtggccaggtgctggactgcctgcgcactttttacgccactctgtatggctcgctggctgattacagtcgcagtttccagcgtgatcaggtgatcgagatcctggaggagaccatcgcccgcagcccggtgctggacgaggatgaagcggaggcccaccaggccccggcccgttcccagcgtgagcaggccaactggatactgaatcagctgctggagcacggctggctggagcgccaggtggacgaggccaccatgcagagcacctatgccttcacccgccttggccggctgttcacccagcccatggtggaggctgccggcggccggtttcgtacccgccatcgcaatacccggaacacccgcaacgccctgcagtcgtttctcgataagggcgaagtgtacgacctgctggatgcgttcgaatattcggaacggatcatctccgatttctccgatgtgattgccgaactggatgagcgtaagcgccagctggtccgggaggtggaggcgcagcaggtggtgcagcgcgcctcggatgagtttttcgatttcatggagcggcgcttcatgccggatctgtcgatccgtctttccgccgactcggtggagaagtaccgggacgagatcggtgaattgatcaacaaggcgcggcgcaagcggcgggagttcaaggcccgggcggagcgggagctgcgccgggcggcaccggagctgattgagcatgtcagccgatcggtctacctgcgcatactcgatggcatcgagacccgtatgcacaacgcctctgccattatgctgccggcactgcgccaggcgctgaacggcttcacccgccgggccgatatcatcatgcgccagttgagttataccggggcgtcggcccagaaccggctgttcagcctgtgcgaacagctgcgccaggccccggaagcggagcaggcgcggctgttgtccgacatggggcgggttctgtcggtgatggatatgggctttgtcgatcccgacactatccggctgcatcagggccggcggccccggctggtgaataccgcggtcgaagcggaaccgagcgacgaccgggcttcgcgcaaggcactgtttgtccagacagcggtggacctggcattcaccttcaacagccaggggcagcgggattacctggtgcgggcgctgtgtgaaggtcaccggatcaggagtcaccaactgccggtgggggacgcccgtgaactgttgatgagtgcccatgtgatcgaggtcggggccctgggagcgggcgaatttgcctttcgcgtgacgcccaccaacaaccgggttggtagtgaatattttcacgcctgtgacgaatttaccattgaactgattgagcgagagagtgatgctgagcgaagcgctgggtga

SEQ ID NO: 45840 - DNA, 666 bp, Sedimenticola sp. SIP-G1
atgctgagcgaagcgctgggtgaggccctggagacaaccggggtgacgttgcaggagttccgtgaactgctcctgcggttgctcaattacggggtgctgtgccgcgccgagagtcacaccgaacagcagctctacgaccgctatctgcgtatcgaatccctggttggggagtatctggatctgatcggtatcacgctgttccatgatcgtcgtttcgcctacctgcggctctatccccccggtgccagcgtgcccggcatggaggatgcacccgagggcgcctttgccggcggtctgcgggcgcggctgcgccaggatgaggtggcgctactgctggtactgcgcttgcagtatgacaaggcgctgcgggaggggcagctggacgagcagggctatgtcatggagtcggtggagtccctgtccatcgccatgcgcaatctgctgggccgcaccctgccggacaagatcatggagcgcaagcgggtattcaaccggctgcggcaactgcgcctgatcgagtatcgccaggacgaggagatggagagcggcgaggcctggatgcggatccatcccatgattgtcacctttgtgacggatgaggccctggcggctctggagcaggggctgccacaaaccgacccggatgaggacgacaatgtttcttaa

SEQ ID NO: 45841 - DNA, 3642 bp, Sedimenticola sp. SIP-G1
atgtttcttaagcagtttgtctatatcaactggggcaatatccccaatattgaatttgacttcggtccggtcaacctcttttccggtggcaacggctccggcaagaccaccgcggcggatgccatccagacggtgatgaccgcggcccatgagaatctgttccagtacaacccgggccaggatgagaccacccagcggggccgtggcggtaagcgggtgcgcaccctggcctcctatgtgctgggttgcgatgacggcagttatgcccggctcgatcccaccgacggctacctggcggcggtgtttcatcccacccggggggagagcggtgaacccttcaccgccattattgcggtgcgggcctggctcgacagcgccggcaacaaccgggtggcacgccaggaggatgggcagtttttcatcatcagtggtgaacagctcggcttgaatcactttgtacgccaggacagtgccggtcgctatgtggtgcctctgcccgagttgcagaccctgttgatcagtgagttcggcaagcgccgggtggagaagtacgacaccaaaaaggcctatctgcggcgcctctacggcgccctgcgcggcaaaccggatgccgtcaccgaggcggaagcggtggccgccgcccgcgccttctcccgtttcatgtcctacaagccgatcaaggggatcaaccgtttcgtggcggacgagatcctggaacggaaggatctgggtgaggcggttcgctcggtctccagccagctcaagaccattcaccacatggagcgggacgccgccaatctgctggcgtccatggcgaccctgcagcgtgccggcgatcaggtgcagcgttataacgagcagtggagtgaactgaacctgctcgattactccctggcccaggcggaataccagacccgtcaggccgattatctgcgcggtaagcgccggcagcagagccagcgcgaggcgcagcgggataccgatcaggcgctggtccggctggagcaccagatggagcaggtgcgtgatcagctgatcagcctggaggcgcagcgccagggggtgcactccctgcgccagaaggatgagctggagaagcagcgtgaccagctgaataaccggttggcgcagcaggcccaatcggtgctggcccaggaccggctggtctcggacaacatccaggccagccaggatatcgccgaggcattgcaggatggaaccctgctggagggccagtcccggatcacggctatggaggcggaggccctgacgcgggaggtggccggtaccgaccggcagctgatccaggagctgcaccacctggtgcaaagggacatctccggtgccatgccgaccctggaggctgagctggcgcaggcccaggctttgcagcagacacacaatcgctggcaccggttctggcatgacggcgaaaccggagagtcgccgcgggagcagctggcggctttgtcgcacgcacgccgatcccgttaccagcagctgaccgagcagcggcgtcagaagcagcaggagatcgagcggctgaatgccaaccaggtcagctatcccccctatgtggagcgggcgctgaaagcgatccgtcagcactgcccggcggccgatccccgggtgctttgcgaccacgtggaggtgaaggacccccgctggcaggcggctatcgaaggctacctggggggtgcgcgcttctccattctggtggagccggactacgaagctgaagcgatccgcatcgtgcgacagctgccgggccgggacaaccgggcccgggtgatccaggggacccgggcggcccgggatgcagcccgtctgagtctcgatccccaatcgattatccatgttctggcgttcagccatgcggtcgcccgtgcctacctgaccgccagctatggcagtgtgttgcgggtcgcatcagcggagtccctgcgcatgacccgccgcggtatcaccgaggatggcatgggctccggtaactacagtatgtggcgctgtgatctgccggacagtgaactggtgtttggcgcagcggcgcgggagcgggccttgcaggccaaactgcaggagctcaccgagatcgaactggagtggaaccaggccaatgaccatctgcaacagatcggccggttgctgggggcggtggaccggctgcgtgtcaccggctatggcgatgggttacaggcgatcgtggagacccatcaggcgctggcgcgggtcgagggattactgcaacagctggacctgagcgagcaccaggagctggaggagcgtctgcaggcgctgaaggcagagcagcaggagttggagaagagcaagggtcaactgcatgaaaagcgcggtgagatccgtaccgaactggagagtatcgataaacagctcaaggccctgagtgatctgcaggagcagaaccgggagcggttggatcagtgcgaggcggcactgcaggcgctggcggcgacctggcccgagttcgatctggaggcacgtctgcagctggcggacgaggaggcgcctgatctggatatcaacacagcgcgcaatttccgtcacgaactggagaaggggttgcagtactcccagcgcaaggcggaggaggagatcaaggcccacaaccagcactgtcgaccggccgataccatcatctatcccgattttaccggtgactacgatgccgccctgtttcgtgccatgtgcggcctgcgacgggagatcgaccgggtctacaatatcctgaaaaacaatatcctggtggagaaacaccagcagctggatgagttgaagggggcgtttaacaacgcctttgtaactcacctctgccacaccattcaccaggcactgaacgacggcaaacgccaggtcgaacagttgaaccgggagctgcaacaccaccgctttggcgctgaccgggagaccttccgcttcgacagcgattggataccggagtaccgggactacgcccgcttctttcaggaggtggtgaagaatccgcagttgggggatgaggctaccctgttcgaggtggagctgtcggcaaaatcacagaaggtgctggacgagttgatgggtatgctgctggacgaggacgagcagcgggcgatgcgggatctggagcgaattgccgactaccgcaactatcgtcgctacgagatctacaaggaggtggaagggaagccgcccatcccccttagcgagtacggcaccggctcgggtggtcagctggaaacgccggcttatatcatccgctccgctgccatcacctccgctttccggtttgccgaaggcagtacccacctgcgcatggtgctggtggacgaggcgttctccaagatggacgagacccgctcccgggaggtgatcgactacctgaccggcagcctgggtctgcaactgctgtttatcatgcccaccagcaagtgcggcccttacatggacctgatcagtcacgagttcgtctttgccaaggtgccgagcgagacactgcggggcgagctgcggacccgtgtactggtggatcggaagcagtgtaaccaggagcgtatccaggccctctgggccaatcaccggcgtaacgtctatcaccaggccgagctggatttcatgcaggagtttgctgccagtggggagtga

SEQ ID NO: 45842 - DNA, 1467 bp, Nitrosomonas communis
atgactcttgattacgctacctttgatttgctgcgtcagaaccatccggcctggcgtttactgcgctccgatcacgcaccattggtggcgagctttttacagcgcgtcttcatcgtgcccaatgtgcgcgtgatggcgcaagcggatttgtcggaggcgctggaagatgagttgtttgctctgcgcgaacgattaggagcagacgcatttcccaaggctgcactggagtacctcaatgactgggccagtactgagaaaggctggttgcgcaaattctacaccagtgggtcggatgagccacatttcgatctgaccccagccagtgaaaaagccattgcttggttagccacgctgatcgagcgcagttttgtcggcacggaatcgcgcctgcttaccttgtttgagttacttaaacaaatgagtgaaggcagcgaaaccgatccgcaggcacgtattgccgaattaaacaaacgccgtgatgagatcgatgccgagattgcgcgcgtgcaagctggcgacatttcgctgttggacaataccgcgctaaaagagcgctttcaacaattcacgcaattggcacgagagttgctcgccgatttccgcgaagtggagcacaattttcgcagtttagatcgacgcgtgcgcgaacgcattgcgctatgggaaggcgccaaaggcgctttattagaagaaatcatgggtgaacgcgatgccattgccgattcggatcaggggcgcagttttcgtgctttctgggattttctgatgtcaagcagtcgtcaggaggaacttacggctttgctcgaacgcgttttatccttgccaccggtcactgaactcaaaccagacgtccgcactcgccggatacattatgactggctggaagcaggggagcacacgcagcgtacagtcgcccaactctcgcaacagttgcggcgctttctggatgatcaagcttggctggaaaaccgtcgcatcatggatatcttacacggactggaagtcaaggcgctggcactgcgggaatcacctccgccaggtgagataatggacattatcgacatggctgctaccatcgagctaccaatggaacggccgttgtacacagtcagtgccaaaacggctatcgcagagatcgaactgcaagcaggcgatattgaagaaagtgaggcagggtcaatgcaagcgttgtactcacaagtgctgatcgacaaaggacggttgacgcgacatatccgccatgctttacaggatcgctcccaaatcacgttaggcaagctgtgcgagctgcagccactccagcatggactggcggaactggtagcttacctggaacttgccagcaattccttcaagaccgtggtggatgaagaagtgaccgaaacgatcgtttggccaggcaccgacacggcaggtgaagaaaagatcaagcaagcgcgtgtgccgcgcgtaatttttgtaaaatag

SEQ ID NO: 45843 - DNA, 651 bp, Nitrosomonas communis
atgacagaaccaaccattgaaaataccacaactgactatgacttgtcagcactggtcattccgttactcaaaggcgtgatttatcaggaaaatgatgccattctgtggcatgccctgttacaactccaagcacgcgtgcgagactatgtgggcgtgctggggttggaattggtgctggatgaagccgagggttacgcctttctgcgtgcgcgtaaagaagaaccggatgatgacgcagctcccaagctgccacggctgatcgccagaagaccgttgtcgtttccggtaagtttattgctggcactattgcgcaagaagctggctgaattcgatgcgggtggcagcgatacgcgattgatgctcaaccgtgaggagatcgtcgagctgatgcgagtattcctgcctgaaaggagcaatgaggcgcgcttaatcgatcagattgaaacgtatatcaacaagatcgtggaactgggattcctgcgccggctaaaaccggttactgcatctcctggcaaacaagccgtagtgttcgaagtaaagcgcatcctcaaggcgtttgtcgatgctcaatggttggcaaatctcgatgcacggctagcagactaccaggcatatcttgcaaatgaacatggagaaagtagcgatggctga

SEQ ID NO: 45844 - DNA, 3387 bp, Nitrosomonas communis
atggctgaacgacaacccctggaatttgattttgtggccgatgatactctatcgggcttccgtttgcagcgtctggaagtattcaactgggggaccttcgatagtcgcgtgtggaacttgcaactcaatggcaaaaacagtctgctgactggcgatatcggttcgggcaaatccaccctggtcgacgcaatcacgaccctgctggttcctgcgcatcgcatcgcttacaacaaggcagccggtgctgacaacaaggagcgcacattgcgttcctatgtacttgggcattacaaatccgagcgcagtgagatgggggtgagtgccaaaccggtggcactacgcgatgccagcaactattcagtgattctgggggtatttcataatgtgggctacgaccagacgatcacgctggcgcaagtattttggatgaaggatgggcaagggcaacctgcacgcttttatgtctgcgcggaacatgccttatcgatcatcaccgatttttcccagtttggctccgatattgcgcagttgcgcaaaaaactgcgcgctggaaacgagaaccgggatgtcgaactatttgaaagctttccaccctacggcgcttggtttcgccgccgctttggcatcgaaaacgaacaggcgctagagctgtttcatcaaacagtatcgatgaaatcgataggtaatctgaccgatttcgtccgcaaccacatgctggaacctttcgacgttgcgccacgcatcacggcgctactttctcacttcgatgacctcagtcgcgcccatgaagctgtgctgaaagcgaaacgccaagtggaattgctcaccccactgatcgccaactgtgaacagcatgccgcattgcgtgcacagattgaagaacgccgtgcctgtcgcgaggcgcttaaaccctattttgccagccttaagctcgacttgttggaaaaccgacttgcagccttagccattgaatggatgaatcaggatgccctggtcaaacgtagtgaagcacgtcgtgatactcagcgcgcagaagtggatgaactcaaccgcagcattgctgataacggcggcgagcgcctggaacggttggcccttgagatccatcaaaaagagcaggaacgccagctgcgggagcgcaaagcgcagcgttatgccgaactggtgcgtacgattgatgatatgcctgctgagaatgaggtcgattttcttgctcaacgacaacgcttggcggcgctggcggaaacagcacaaacacgcgatgtccagctgcaaaatgatttgaccgagtatggcgtcagcttgcgccaaagcaagcaggaacatgatgctctgactgccgaaatcatcagcttaaaagcaaggcgcagcaatgtcccggccgaacaaatcaccctgcgtactgccctttgccaggcgctggatttgcctgaggagaagatgccctttgctggcgagttactgcaaatacgtgatgatgagcgcgactgggaaggcgcagtagagcggttgttgcgcaactttggtttgtcgttgctggtgccggatgagcattatcctgctgtggtaaattgggtggataatacccatttacagggacgcctggtttatttccgggtacgagcaagtgctcgcaacaaacctccagatttgcaccgggattcgctcgcacgcaagctggtgatcaaacctgactcgcctttctatgattggcttgaacgggaggtgtcccaccgttttgaccttgcctgctgcaccacacaagagcagtttcggcgcgagacgcgtgccatcacgcgtacgggacagattaaagcgcccggcgagcgccatgaaaaagacgatcgccatcggctcaatgaccgcagccgctatgtactgggctggagcaatgcggccaagatcgctgtactcgaaaccaaagcaaaaaagctggagaggcagcttggcgaattggctagcctcatcagcaaaatccaggctgagcagagcatactcaaggcacggctgaccgcgttgtcgaaattggatgaatatactgattttggtgaactcgactggcaattggttgccgtggaactcgcaaagttacaggatgaaaagttaaagctggaattgacttccgatgtgcttaaacaattgactgaacggctaaatcaagccgtggcagccttgcagaaaacagaaagccagctcgaggtgcacaaggacaagcgctccaaaatcgagcagaaaaaaagcgataccgaggttttgcgtgcgcagacacaagcgctcgtggatgattcggcgcaggctactcacgctgcctacttcgagctgcttgacacgatgcgcagccaggcgctgggtgagcagccgctcacgatcgagtcctgcgattcacgtgaacgtgacatgcgcgactggctgcaaaagcagatcgatagcaaatccagcacgctcagttcgctggcagagcggatcatcaaggcaatgacttcctataaagaagaattcaagctggagactgcagagatcgatgccagtattgaagcggctttcgaataccgtaatatgttgcatcatctccaaagcgacgatctgccacgatttgaggcgcgcttcaaggaattacttaacgagaacacgatacgggaagtagcgaattttcactcgcaattggtgcgcgaacgggaaacgatcaaggagaggattgcctacataaatgaatcactgaccgacatcgactacaacccaggccgctacatcatcctggaagcccagtcaacgctggatgccgatatccgcgattttcaaaacgagttgcgcgcttgcaccgaaggggctttgaccggatctgatgatagtcaatattccgaagctaaatttttgcaagttcgacacatcatcgaacgctttcgtggccgacaaggattagccgagcaggaccggcgctggacagccaaggttaccgatgtgcgcaactggtttctatttgctgccagcgagcgctggcgcgaggacgacagtgaacatgaacattactctgattcgggcggcaaatctggcggtcaaaaagagaaactggcttataccattttggccgcgagcttggcttatcagtttggtctggaatggggagcagtgcgctcgcgctcatttcgctttgtcgtgatcgacgaggcgttcgggcgaggttcggacgagtcagcgcaatatggcttgcgcttgtttgcccagcttaatttgcaactgctcatcgtcactcccttgcaaaaaatccacatcatcgagcctttcgtctccagtgttggttttgttcataacgaagatggccgtacctccaaattgcgcaatctctcgatcgaagcataccaacaagaaaaggcaaggatgacgggatga

SEQ ID NO: 45845 - DNA, 1452 bp, Leptospira santarosai
atggactataaacttttgcaaagattgcttcgttcttccgcaatccgtcttctgcgaaaagacaacgccccctttatcatctactttttggaaaaatattttagaagttctgcacgtactttcgttccgttcgaggagctgaaaattctacttcgttacgaattggaaaatttaaacgatcaggaagagatctccttacaaagaagcgcggacgtttatctgggagaatggattggagaaaattttctgacccggaggatacgatccgcggagggaatcgaagagatcatattggaaccctcggtcgaattggaaaaagtattctcctggatggaagacatacgatccttggaagataaggacgtgatcggcacggaatcccgttttttttccgtattaaataaattgaaagagattgtggaagagagcgtttccgatccggaggagaaaattcgacaattggaatccaagcgggacgaattggatcttcaaattcgaaaactcaaggcgggagaacaagtatccaaatttccgagcgaaagaattcggagccaatatgtgtatgcgcgaaaggaagcgttgggattactttcggatttccgacaagtggaaggtaattttatggaaataacgaagatgattcataaaaaatatctggaggtcgttcagaaaggggaaattttacgatttgctttggacgggaacgacgagttacttcgatcggaacagggtcgtagtttccaaaccttttgggattttttacgatccgaacgaagtcaggaacaattcgaaagtatattagattctttgtattcattggaagacgttttggagctggactcgagaaagtttttccggaattttaggagaaatttaagagaagcgggttctcgggtaaacggagttgttacccgtatgtcggaacagctcaaaaaaagtttggtggaacgtacacttcgtgaaaaccgcagatcgaaagaacttatcgcggaaattaagaatttggtcttggagaatccactcgatttttctcagacggatttttattctttggaggaaatggatgttcgttttccgatggaaaggcctctttggcgcggcgatccggaggagacgtttcgaaccgtccggatcgaaaatacggatgaggatgaaaatgtattcgatattctggaatcgatccgaggaatcgatttggaaatgtacgaacaacggatccaaacgttgcttcgtatttctccggaggtttctttggaaaaggttctgcgggaatatccggacgacgtctgctttgaaagtttagtcgcttatgtttggattgcgggtaacggagaatttcattccttggacgattcggaaacctttgtatattccgtttccataatggatcatccttcggaaaaacttgcgtatcgaattcctaagggaacgtatagagtgggtcatttatga

SEQ ID NO: 45846 - DNA, 570 bp, Leptospira santarosai
atgaataaaccgcatatctacgcagcttccattctcaggttgttgaaaggatcgatcaacagcgagtccgatgcaaaaatttggcagaatcttttggacaacgaaaaatcggtgcgggaacactttgaaaaactgggtatttttttgcacttggatcgggaagacggttatgcgtttctacgacagacttcggacgacgaaagtgcagaatcggatgagaaacttcccgtgatcacccgtaaacttccgcttacgaaagaagagactttgtttctaattctactgagggaatgtatcatagaaatcgaagaaaaagatccttccggttccatcctttttagaaaggaagagctatcggataaagtgagtccttttttctccgacctctccgatgaaatcgatcggcaaaaaagattcgaaaaattacttcgcaaatccgaagaactaggctttgtcaaacagatcgagccggaaacgattcggatcgaaaaactcttaaaggcgaaattgaccgtatccgagttagagggtttacgcggtaagtttcgactaggaacggaaaaacgatga

SEQ ID NO: 45847 - DNA, 3357 bp, Leptospira santarosai
atgactgatttattttcacccggtgaaattgccgccaataccggatatagacttgaattcttggaaattttaaattggggaacttttcacggtaggatttggaaattacgaccggaaggggaaaactttcttttaaccggagcgaacggttccggcaaatcaacgttagtcgacgcgattcttacgctgctcgttccggccgcaaaacgaaattataatctggcttcgggactggaaagtaaaaagagagatcgatcggaacgatcttatgtggaaggtcactacggtagatcctcttccggtagcgaaggaattttgaaaattcgcgggaaacaagaagagtgttattccgttttatcggcggtattcgaagcgaatggaaggttcccgcgaattcggattgcgcagatcttttggttcgaatccggagaattgaaaaagatctaccttttttccgataaagagttggacttcgaaaaagatctggttttgggaaaaagaaccgtaaaggaattgaaagcggatctgaaaaattccggggcaagactttacgatcagttcaaggcgtataacgtggattttaggaaagcggtgggtttggaatcggagaaagcgatcgacctattcaatcaaatcgtagccatcaaatccttaggagtgttgaacgaattcgtccgagaacatatgctcgagtccagggataaaagatccaggatcgaggaattgaatcgtaatttttccgatctgagcgaaacatacgaggcgattgtaaacgcaaaagaacagttgaagttgttggaaccgatcgaaaaaaaagccgccgagtatagggaatggaatcggaaggcggccgatcttcaggctttgatcgtatatgttccgtattattttgcggaaaaaaattacgagcttcgtcaaatcagagaacaggattatctttttgaattatcgcgtttgaaagacagatccgacgaactatcgactgaaatcgaatccttaaatcaagaggaacggaagttattcaacgcattagaaaacaatgatactcaaaggagaatcgccgatcttgtacgaaaacgggaggggattctctccgatctcaaaacgcggggaatcgaaaggaaaaaatattcctcctatctttccaaaatcggtttggaggaaaccttctccgaagaaacattctatacgaacctgcgcatagccggaggaatgcttacggaaaccgattcgatttgggaagaaatcagggatcgattgggaaagctgacgcttcaaaaaatggaattgcaaaagaatttcgattcggttcgttccgaattggagtatctgaaaaaaaagcgggataatcttcccagaacccagtcggaaattcgggcaaaaattgcctccggaatcggactttccgaaaaaagatttccctttatttgcgaattgatccgcgtcaaagaatccgaaaaagaatggacgggggctttggaaaggctcttgagaaatttcggcttacggatgttagtcgcggaagaggactacgaggccgtgtcggcttacgtgaattcttcctatctgggagggaagttggttttttcaagaatggttcctttatcgggaccgatcttgcaacccaaagacaaggaagaagttttctacaagttggaattgaaatcggaattgtcgaacgtaaagaaagaatggttggaagcgcagatactgcgcgagttcggacatatctgcggggatctgaatcgtctccggaaagaggagaaggctcttacaaaagaaggtctgattaagtccggtagaattcgacacgagaaggacgatcgtaagaacatttcggacgcaagagattatattttaggctggaacaatacggagaaaatcgccgcgttggaatccgaatttgcccttctcgggcagaacatttatcggctgaattctgcaatcgacctagtcagagaagaggaaaacaaaaacaaaaacaaacgggacgatctgcttctctttctacgtttcgaacaattttcacaaatcgacgacgaaagtttgaaaggtccgcttcaggatacggaaagacaaatccgggaattggaattgcgttccgaagaatacgggaagttgaaggaacaatacgaactcgcaaaagctcgcctaacggatgttcaaggaagacaacgggaaaccgccaaggaattcaacgttttagaggataggcttttcactcttcggaaggacatggaagatctacagcagaggatccgaaaagtcgaccgggaaacgtcgatttcactggagccgattctcaacgaacgactgcgggaaacgatcctaaccctggagtcgatcgcggagacggaacggaatttttcggatcgtttggttgtagagcgcgatcaatatttggagaaacgagattcgatcggagaagaattgaacaaaggaatggatcgttatgtgaaacgattccgagaggaggcggatcgggaagaattgtccgtttcggtttccaacgcggaagggtttgcgaaattgaccgaaaggattcggcaggatcgattgcccgaatttcaggaaaaatttcgaacgatgatgtccgacaaagtcgcaaaacagattttggacttcaaggcggaattggacgacgacgtctcggaaatcaaggaaaggatcgacgaactgaacgattcgttaaaggatctggattattctaaaggaaaatcttatattcaaattcgatattttgataccaaggatcgggagattgtgggcgattccggctttaaggaaatgttacgcggaagcattccggatttgggagacagttctcacaacgaggaaaaattcgctaaaatcagagagttgttgaaaaagttaaagggagagggcggtagcgatcgttggtccagactcgtaacggatcccaggaactggctggatttccaagcggcggaattccttagggataacaaccaaattcttcaggtttacgattcgtccgcgggtaagtcgggaggacaaacggtaaaactcgcttacacgattctcgcttcggcgatcgcttatcaattcaaaattcgcgaacggaattcgtttcgttttgtggtgatcgatgaaatgttcaacaatctggacggagagaattcaaggtatgcgttgaacctctttcgtcaattgggtttacaattgcttgtcgtaactccgatggataagattacgatcgtcgaaccttatgtgagaagcgttcattttgtgaagaacaattcggaaggaaacgattccagagtgtatccgatttcgaaggaaaatgtatcgtccgggaaggatgaaaattcggaaaggaaagtgggaaatttatag

SEQ ID NO: 45848 - DNA, 1179 bp, Leptospira santarosai
atgatttctccggaaattttacgcaagagatcgctggcatactatcataacgaactcttacgttccatcgtcctgggaggtgttttatttccttgggagatttcgatcggtaaagttcttccggaagagatcttaaaaaatccgtctttgttacgagaattacgggccgaatcgaaagaaaacaaaggtttcggatttagaatcgtctttcgttcgaaagagacccggaaatacggaatacaaacgattcctacgaaaatcgtttttgataccgaagacgattttttgcgttttacaaaaaagaaagacgaattcctctcctatagcaccgattgtacgttgattctttccgttcttcccgagctgaaagattggattttaaaaaatacgttatccgtaatcgaagagtccggtaaatgggaaagtattctttcggtctgttcctattttttagaatataggaatcccggattgtatatccgagaactaccgattcgaattcctacgaaattcatcgaggaaaataaaaaggttttgagaagtcttttggattttctattgcctgagatcgcggatgcgaaggatttcgaaactcgttacggattaaaaaaagcggaacctttggttcgatttcgaattttggatctcgaaattgcaaagtcttccaccggaggtttaacggatttgagcattcccgtccgggattttagaaagttggaactctccggttgtggaagggtttttatcttggaaaataaaacgaatttcgcgaacctattcaattttttaagttttccgcaactgaagggaacgatctccattttcggtcagggtttcggattaaacgttttaaaggattgtagctggttggagaaaatggaaattttttattggggagatctggacgttcagggtttcgaaatcctgtcgcaactacgggaacaatatcctcaaagccgttcctttttaatggacctgaagacatttgttcggtttcgagactttgcggtagacggtattccttcttctaaatcttccgaaccgaaatttctcactccatcggagcgcgaaacttggaagtatttaagttctttagattcgaaaaatcggttggaacaggagaaaatacctcacgaatacgtgcaagaagttctgtccggtttgggtggatcgcagtaa

SEQ ID NO: 45849 - DNA, 1452 bp, Leptospira santarosai
atggactataaacttttgcaaagattgcttcgttcttccgcaatccgtcttctgcgaaaagacaacgccccctttatcatctactttttggaaaaatattttagaagttctgcacgtactttcgttccgttcgaggagctgaaaattctacttcgttacgaattggaaaacttaaacgatcaggaagagatctccttacaaagaagcgcggacgtttatctgggagaatggattggagaaaattttctgacccggaggatacgatccgcggagggaatcgaagagatcatattggaaccctcggtcgaattggaaaaagtattctcctggatggaagacatacgatccttggaagataaggacgtgatcggcacggaatcccgttttttttccgtattaaataaattgaaagagattgtggaagagagcgtttccgatccggaggagaaaattcgacaattggaatccaagcgggacgaattggatcttcaaattcgaaaactcaaggcgggagaacaagtatccaaatttccgagcgaaagaattcggagccaatatgtgtatgcgcgaaaggaagcgttgggattactttcggatttccgacaagtggaaggtaattttatggaaataacgaagatgattcataaaaaatatctggaggtcgttcagaaaggggaaattttacgatttgctttggacgggaacgacgagttacttcgatcggaacagggtcgtagtttccaaaccttttgggattttttacgatccgaacgaagtcaggaacaattcgaaagtatattagattctttgtattcactggaagacgttctagatttggactcgagaaagtttttccggaattttaggagaaatttaagagaagcgggttctcgggtaaacggagtcgttacccgtatgtcggaacagctcaaaaaaagtttggtggaacgtacacttcgtgaaaaccgcagatcgaaagaacttatcgcggaaattaagaatttggtcttggagaatccactcgatttttctcagacggatttttattctttggaggaaatggatgtgcgttttccgatggaaaggcctctttggcgcggcgatccggaggagacgtttcgaaccgtccggatcgaaaatacggatgaggatgaaaatgtattcgatattctggaatcgatccgaggaatcgatttggaaatgtacgaacaacggatccaaacgttgcttcgtatttctccggaggtttctttggaaaaggttttgcgggaatatccggacgacgtctgctttgaaagtttagtcgcttatgtttggattgcgggtaacggagaatttcattccttggacgattcggaaacctttgtatattccgtttccataatggatcatccttcggaaaaacttgcgtatcgaattcctaagggaacatatagagtgggtcatttatga

SEQ ID NO: 45850 - DNA, 570 bp, Leptospira santarosai
atgaataaaccgcatatctacgcagcttctattctcaggttgttgaaaggatcgatcaacagcgagtccgatgcaaagatttggaagaatcttttggacaacgaaaaatcggtgcgggaacactttgaaaaactgggtatttttttgcacttggatcgggaagacggttatgcgtttctacgacagacttcggacgacgaaagtgcagaatcggatgagaaacttcccgtgatcacccgtaaacttccgcttacgaaagaagagactttgtttctaattctactgagggaatgtatcatagaaatcgaagaaaaagatccttccggttccatcctttttagaaaggaagagctatcggataaagtgagtccttttttctccgacctctccgatgaaatcgatcggcaaaaaagattcgaaaaattacttcgcaaatccgaagaactaggctttgtcaaacagatcgagccggaaacgattcggatcgaaaaactcttaaaggcgaaattgaccgtatccgagttagagggtttacgcggtaagtttcgactaggaacggaaaaacgatga

SEQ ID NO: 45851 - DNA, 3357 bp, Leptospira santarosai
atgactgatttattttcacccggtgaaattgccgccaataccggatatagacttgaattcttggaaattttaaattggggaacttttcacggtaggatttggaaattacgaccggaaggggaaaactttcttttaaccggagcgaacggttccggcaaatcaacgttagtcgacgcgattcttacgctgctcgttccggccgcaaaacgaaattataatctggcttcgggactggaaagtaaaaagagagatcgatcggaacgatcttatgtggaaggtcactacggtagatcctcttccggtagcgaaggaattttgaaaattcgcgggaaacaagaagagtgttattccgttttatcggcggtattcgaagcgaatggaaggttcccgcgaattcggattgcgcagatcttttggttcgaatccggagaattgaaaaagatctaccttttttccgataaagagttggacttcgaaaaagatctggttttgggaaaaagaaccgtaaaggaattgaaagcggatctgaaaaattccggggcaagactttacgatcagttcaaggcgtataacgtggattttaggaaagcggtgggtttggaatcggagaaagcgatcgacctattcaatcaaatcgtagccatcaaatccttaggagtgttgaacgaattcgtccgagaacatatgctcgagtccagggataaaagatccaggatcgaggaattgaatcgtaatttttccgatctgagcgaaacatacgaggcgattgtaaacgcaaaagaacagttgaagttgttggaaccgatcgaaaaaaaagccgccgagtatagggaatggaatcggaaggcggccgatcttcaggctttgatcgtatatgttccgtattattttgcggaaaaaaattacgagcttcgtcaaatcagagaacaggattatctttttgaattatcgcgtttgaaagacagatccgacgaactatcgactgaaatcgaatccttaaatcaagaggaacggaagttattcaacgcattagaaaacaatgatactcaaaggagaatcgccgatcttgtacgaaaacgggaggggattctctccgatctcaaaacgcggggaatcgaaaggaaaaaatattcctcctatctttccaaaatcggtttggaggaaaccttctccgaagaaacattctatacgaacctgcgcatagccggaggaatgcttacggaaaccgattcgatttgggaagaaatcagggatcgattgggaaagctgacgcttcaaaaaatggaattgcaaaagaatttcgattcggttcgttccgaattggagtatctgaaaaaaaagcgggataatcttcccagaacccagtcggaaattcgggcaaaaattgcctccggaatcggactttccgaaaaaagatttccctttatttgcgaattgattcgcgtcaaagaatccgaaaaagaatggaccggggctttggaaaggctcttgagaaatttcggcttacggatgttagtcgcggaagaggactacgaggccgtgtcggcttacgtgaattcttcctatctgggagggaagttggttttttcaagaatggttcccttatcgggaccgatcttgcaacccaaagacaaggaagaagttttctacaagttggaattgaaatcggaattgtcgaacgtaaagaaagaatggttggaagcgcagatactgcgcgagttcggacatatctgcggggatctgaatcgtctccggaaagaggagaaggctcttacaaaagaaggtctgattaagtccggtagaattcgacacgagaaggacgatcgtaagaacatttcggacgcaagagattatattttaggctggaacaatacggagaaaatcgccgcgttggaatccgaatttgcccttctcgggcagaacatttatcggctgaattctgcaatcgacctagtcagagaagaggaaaacaaaaacaaaaacaaacgggacgacctgcttctctttctacgtttcgaacaattttcacaaatcgacgacgaaagtttgaaaggcccgcttcaggatacggaaagacaaatccgggaattggaattgcgttccgaagaatacgggaagttgaaggaacaatacgaactcgcaaaagctcgcctaacggatgttcaatggagacaacgggaaaccgccaaggaattcaacgttttagaggataggctttccactcttcggaaggacatggaagatctacggcagaggatccgaaaagtcgaccgggaaacgtcgatttcactggagccgattctcaacgaacgactgcgggaaacgatcctaaccctggagtcgatcgcggagacggaacggaatttttcggatcgtttggttgtagagcgcgatcaatatttggagaaacgagattcgatcggagaagaattgaacaaaggaatggatcgttatgtgaaacgattccgagaggaggcggatcgggaagaattgtccgtttcggtttccaacgcggaagggtttgcgaaattgaccgaaaggattcggcaggatcgattgcccgaatttcaggaaaaatttcgaacgatgatgtccgacaaagtcgcaaaacagattttggacttcaaggcggaattggacgacgacgtctcggaaatcaaggaaaggatcgacgaactgaacgattcgttaaaggatctggattattctaaaggaaaatcttatattcaaattcgatattttgataccaaggatcgggagattgtgggcgattccggctttaaggaaatgttacgcggaagcattccggatttgggagacagttctcacaacgaggaaaaattcgctaaaatcagagagttgttgaaaaagttaaagggagagggcggtagcgatcgttggtccagactcgtaacggatcccaggaactggctggatttccaagcggcggaattccttagggataacaaccaaattcttcaggtttacgattcgtccgcgggtaagtcgggaggacaaacggtaaaactcgcttacacgattctcgcttcggcgatcgcttatcaattcaaaattcgtgaacggaattcgtttcgttttgtggtgatcgatgaaatgttcaacaatctggacggagagaattcaagatatgcgttgaacctctttcgtcaattgggtttacaattgcttgtcgtaactccgatggataagattacgatcgtcgaaccttatgtgagaagcgttcattttgtgaagaacaattcggaaggaaacgattccagagtgtatccgatttcgaaggaaaatgtatcgtccgggaaggatgaaaattcggaaaggaaagtgggaaatttatag

SEQ ID NO: 45852 - DNA, 1179 bp, Leptospira santarosai
atgatttctccggaaattttacgcaagagatcgctggcatactatcataacgaactcttacgttctatcgtcctgggaggtgttttatttccttgggagatttcgatcggtaaagttcttccggaagagatcttaaaaaatccgtctttattacgagaattacgggccgaatcgaaagaaaacaaaggtttcggatttagaatcgtctttcgttcgaaagagacccggaaatacggaatacaaacgattcctacgaaaatcgtttttgataccgaagacgattttttgcgttttacaaaaaagaaagacgaattcctctcctatagcaccgattgtacgttgattctttccgttcttcccgagctgaaagattggattttaaaaaatacgttatccgtaatcgaagagtccggtaaatgggaaagtattctttcggtctgttcctattttttagaatataggaatcccggattgtatatccgagaactaccgattcgaattcctacgaaattcatcgaggaaaataaaaaggttttgagaagtcttttggattttctattgcctgagatcgcggatgcgaaggatttcgaaactcgttacggattaaaaaaagcggaacctttggttcgatttcgaattttggatctcgaaattgcaaagtcttccaccggaggtttaacggatttgagcattcccgtccgggattttagaaggttggaactctccggttgtggaagggtttttatcttggaaaataaaacgaatttcgcgaacctattcaattttttaagttttccgcaactgaagggaacgatctccattttcggtcagggtttcggattaaacgttttaaagggttgtagctggttggagaaaatggaaattttttattggggagatctggacgttcagggtttcgaaatcctgtcgcaactacgggaacaatatcctcaaagccgttcctttttaatggacctgaagacatttgttcggtttcgagactttgcggtagacggtatttcttcttctaaatcttccgaaccgaaatttctcactccatcggagcgcgaaacttggaagtatttaagttctttagattcgaaaaatcggttggaacaggagaaaatccctcacgaatacgtgcaagaagttctgtccggtttggatggatcgcagtaa

SEQ ID NO: 45853 - DNA, 1470 bp, Xanthomonas euvesicatoria; identical to SEQ ID NO: 41660

SEQ ID NO: 45854 - DNA, 702 bp, Xanthomonas euvesicatoria; identical to SEQ ID NO: 41661

SEQ ID NO: 45855 - DNA, 4056 bp, Xanthomonas euvesicatoria; identical to SEQ ID NO: 41662

SEQ ID NO: 45856 - DNA, 1470 bp, Xanthomonas euvesicatoria; identical to SEQ ID NO: 41660

SEQ ID NO: 45857 - DNA, 702 bp, Xanthomonas euvesicatoria; identical to SEQ ID NO: 41661

SEQ ID NO: 45858 - DNA, 4056 bp, Xanthomonas euvesicatoria; identical to SEQ ID NO: 41662

SEQ ID NO: 45859 - DNA, 1470 bp, Xanthomonas euvesicatoria; identical to SEQ ID NO: 41660

SEQ ID NO: 45860 - DNA, 702 bp, Xanthomonas euvesicatoria; identical to SEQ ID NO: 41661

SEQ ID NO: 45861 - DNA, 4056 bp, Xanthomonas euvesicatoria; identical to SEQ ID NO: 41662

SEQ ID NO: 45862 - DNA, 1470 bp, Xanthomonas euvesicatoria; identical to SEQ ID NO: 41660

SEQ ID NO: 45863 - DNA, 702 bp, Xanthomonas euvesicatoria; identical to SEQ ID NO: 41661

SEQ ID NO: 45864 - DNA, 4056 bp, Xanthomonas euvesicatoria; identical to SEQ ID NO: 41662

SEQ ID NO: 45865 - DNA, 1470 bp, Xanthomonas euvesicatoria; identical to SEQ ID NO: 41660

SEQ ID NO: 45866 - DNA, 702 bp, Xanthomonas euvesicatoria; identical to SEQ ID NO: 41661

SEQ ID NO: 45867 - DNA, 4056 bp, Xanthomonas euvesicatoria; identical to SEQ ID NO: 41662

SEQ ID NO: 45868 - DNA, 1470 bp, Xanthomonas euvesicatoria; identical to SEQ ID NO: 41660

SEQ ID NO: 45869 - DNA, 702 bp, Xanthomonas euvesicatoria; identical to SEQ ID NO: 41661

SEQ ID NO: 45870 - DNA, 4056 bp, Xanthomonas euvesicatoria; identical to SEQ ID NO: 41662

SEQ ID NO: 45871 - DNA, 1470 bp, Xanthomonas euvesicatoria; identical to SEQ ID NO: 41660

SEQ ID NO: 45872 - DNA, 702 bp, Xanthomonas euvesicatoria; identical to SEQ ID NO: 41661

SEQ ID NO: 45873 - DNA, 4056 bp, Xanthomonas euvesicatoria; identical to SEQ ID NO: 41662

SEQ ID NO: 45874 - DNA, 1470 bp, Xanthomonas euvesicatoria; identical to SEQ ID NO: 41660

SEQ ID NO: 45875 - DNA, 702 bp, Xanthomonas euvesicatoria; identical to SEQ ID NO: 41661

SEQ ID NO: 45876 - DNA, 4056 bp, Xanthomonas euvesicatoria; identical to SEQ ID NO: 41662

SEQ ID NO: 45877 - DNA, 1470 bp, Xanthomonas euvesicatoria; identical to SEQ ID NO: 41660

SEQ ID NO: 45878 - DNA, 702 bp, Xanthomonas euvesicatoria; identical to SEQ ID NO: 41661

SEQ ID NO: 45879 - DNA, 4056 bp, Xanthomonas euvesicatoria; identical to SEQ ID NO: 41662

SEQ ID NO: 45880 - DNA, 1470 bp, Xanthomonas euvesicatoria; identical to SEQ ID NO: 41660

SEQ ID NO: 45881 - DNA, 702 bp, Xanthomonas euvesicatoria; identical to SEQ ID NO: 41661

SEQ ID NO: 45882 - DNA, 4056 bp, Xanthomonas euvesicatoria
atgaattcccagtccaatctgtcgccagcgcaaccaggtgcctccttgtttgccgagacgctcgccgagcaacgtgcgcagcagttccgcatgcggcgcttgcaggtgcacaactggggcaccttcaacgggctgaccgaagtgccgatcgcggagaagggcttcctgttcgtcgggcgttcgggctcgggcaagtccaccttgctggatgcgatgtcggcactgctgacgccgccgagcatcgtcgacttcaacgccgccgcgcgcgaagccgagcgcagtgggcgcgatcggagtctggtgtcgtatgtgcgcggtgcgtgggccgatcagcaggacagcgcgtccggcgaaatcgctacccaatacctgcgcaagggcgccacctggaccgcgctggtgctggaatacgcaaatgcgcacggcgaggcggtgagcctgatccgcttgttctggatcgccggcagcggtaacgcggcggccgatgtgcggcgtcactacatggtcgcgccacgccgtttcgacgtggcgaccgagctggatggcttcgatcttgacctgcgcaagctcaaggcgcgattgggtgaggacgttgcgcatttcgacggcttcgccggctacgccgaacgtttccggcacgcgctgggcatcggcaacgagatggcgctgcggctgttgcacaagacccagtcggccaagaacctgggcgatctcaatgcgtttctgcgcggcttcatgctggacgagccgcgtaccttcgaagcggccgaccggctggtggaagattttgccgaactcgatggcgcgcaccatgcggtggtcaccgcccggcgccaggtggaaaccctgacccctgcgcgcgagcaccacgcggcgctgatggcgctgcgccacagcgtcggcgagttgcgcgagctgcagctgggcgtggacagctaccgcgagcagcagcggctggccttgctggaggagcggctgcaggagctcgacaaccaggaccgtggactggccggcgaagaaggccagcgccgcgaatcgctggataaccacgaacaaaaactggtcggcctggagcgcgaacagcgcgccgccggtggcgagcagatcgaggaactggaacgcgaacgcgcacgcgtcgagcgcgagcgcgacgaacgcctgcgccgccgtgcacagatcgaacaggcctgccgccagctcggcaccgccctggcggccggcgccagtggctttgccgcacagatcgcgcatgcgcagaccgtgctggataacggcaagcacgacgccagcgcgctggatgaggccatcgccgaacgcatgggtgcgcggcgcgacgacgagcgccggtttgccgaaatccgtgccgaactggaggcgctgaagcgcgcgccatcgagcatgcccgcaccgatgcaggccctgcgcgcgcgcttttgcgaagacaccggcattgccgaggccgcgctgccgttcgttggcgagctggtgcaggtgcgcgaggaccagacggcctggcgcggtgcgatcgagcgtgtgctgcacggctttgtgcaatcgctgctggtggacgagcggcattacgcgcaggtcagcgaatgggtcaaccgcacccatatcggtacgcgtctggtgtacttccgtgtgcgccgcaacgacgagctgcattcgcggcgggtcgatcccggcgcgctgcccggcaagctgcagctgcgcgagcacgcctttaccgaatggctgcgcaacgaactgacccgtcgcttcgactacgcgtgcgtggacaatgccgcagcattgcgcaacgccgaccgcgcgatcacccgcgagggccaggtcaagcatcctggcgatcgctatgagaaggacgaccgccacgcggtcaacgatcgcaagcgttggctgctcggtcacgacaaccgcgacaagctcaaggtgttcgagcgcgaagcgcaggcgctggcccagcgcatcgccagctgcgatgccgatgtggcagcgctgcgcaagcagcgtgagcaggaccaggaacgccaactcgctgcgcacaccttggtggagcgcgactgggacgaaatcgatgtcggccccaagctgcagcgcctgagcgatatcgacgaacagttggtgcagctgcgcgaaggcaacagcggcctgcgcgcgctcgggcaggccatcgacactgcacggaccctgcgcgaccaggccaagcgcacctatgaagatgtgcggctggagcgcgcgcaactggcgcgcgaacgcgtgcggctcgaacagcagcacgcggcctgcgcgggccgcgccggttccgccacgctcacgcccacccagttgcagggcttgcgggaacggcttgccgcattgacgccgctgtcgctggacaatctggaagcgcatttccgcgtggtcgaacgtggcctggccgagcagttggccgacagccagggccgcgacagccggctcagcgcgcagttgctggaatgcttccgcaagtattgccagcagtggcccgaagacagcggcgatttcaccgtgagccttgccagcgccgacgatttcctcgcgcgtctggaccggctggaaagcgatggcctgccgcgtcacgagcatcgtttcttcgacctgttgcagacccagagcaagaacaacctgctggccttgcagcgttacaccgccgaagcccacaagggcatcaagcagcgcatggacgaggtcaacgccagcctggagcaggtgccgttcaatcgcgacaccgtgctgaccatcgaggtcggcgaccgtcgcctggccgaggtgcaggaattccagcagcagttgcgcgcggtgctgtcgcatcaacagaccgaagaccgcgccctggccgaagcgcagttttccaccttgcgtgcgctggtggcgcgcctgggcgcgcaggaaccggaggcacgccgctggcgcgaacaggtgctggatgtgcgcctgcatgtggagttcatcggtgtggaactggacgcgcagacgcgcgcgcaggtggagatctaccgcagcggcgcgggcaagtccggcggtcagcgccagaaactggcaaccacctgcctggcggccgcgctgcgctaccagcttggcggcgaagacggcgaactgccgcgctactgcgcggtggtgctggacgaagccttcgacaaggccgacaacgaattcaccgcgctggcgatgaacatcttcgagaacttcggcttccagatggtggtggccacgccgttgaagtcggtgatgaccttggagcccttcatcggcggcgcatgttttgtcgaaatcagcggccgccataactccggcgtgttgctgatcgaatacgacgagcaggcacagcgattgaagctgccggagcgctcgcgtggcgatgaggcagcggtggccgatgccactgacgccgcgtcagcgatcgaggctgcgagtgagcctgtaggagtgcagggcgctgcaaacgcagacggcattacagctgatggcctcccgctacacatagccttgcccgtgcccggcgatacctcacccgcagcgcagaacacgcatagtagtaagcgcaagccggcagcggcgacggcgacggcgaacaagcagaacaaaaacaagcaaaacaagaacgccaagaccacatcgcccacacgcgctgcggcacagcctcacgcaaagcagccgaagaaatcgccttcgcgcactccagctgtggctggcaagccggtagcggacaaacgtacctcaggcgcgcagcaagcgccggcggtgtcgtcaggagctgcatccaggtccaacgtgggcaagaccacgcggtcttcaaaagcgcagggcaagccgattgtggccgcaaacgcatccaacgccacgtccagcaaggtcgccgccgcatctgcgccagtgaaaaacactgccgcagccaagccacgtgcaacagccgcatcgactggtcagccagcgcgtggcgccggcaagacaacctcggcgcgcgcggtggctgaaccgtcaccggccacgacgcgcgtcgccagggcaggcgccccgaaggcgcgcggcaagcgctga

SEQ ID NO: 45883 - DNA, 1470 bp, Xanthomonas euvesicatoria; identical to SEQ ID NO: 41660

SEQ ID NO: 45884 - DNA, 702 bp, Xanthomonas euvesicatoria; identical to SEQ ID NO: 41661

SEQ ID NO: 45885 - DNA, 4056 bp, Xanthomonas euvesicatoria; identical to SEQ ID NO: 41662

SEQ ID NO: 45886 - DNA, 1470 bp, Xanthomonas euvesicatoria; identical to SEQ ID NO: 41660

SEQ ID NO: 45887 - DNA, 702 bp, Xanthomonas euvesicatoria; identical to SEQ ID NO: 41661

SEQ ID NO: 45888 - DNA, 4056 bp, Xanthomonas euvesicatoria; identical to SEQ ID NO: 41662

SEQ ID NO: 45889 - DNA, 1470 bp, Xanthomonas euvesicatoria; identical to SEQ ID NO: 41660

SEQ ID NO: 45890 - DNA, 702 bp, Xanthomonas euvesicatoria; identical to SEQ ID NO: 41661

SEQ ID NO: 45891 - DNA, 4056 bp, Xanthomonas euvesicatoria; identical to SEQ ID NO: 41662

SEQ ID NO: 45892 - DNA, 1470 bp, Xanthomonas euvesicatoria; identical to SEQ ID NO: 41660

SEQ ID NO: 45893 - DNA, 702 bp, Xanthomonas euvesicatoria; identical to SEQ ID NO: 41661

SEQ ID NO: 45894 - DNA, 4056 bp, Xanthomonas euvesicatoria; identical to SEQ ID NO: 41662

SEQ ID NO: 45895 - DNA, 1470 bp, Xanthomonas euvesicatoria; identical to SEQ ID NO: 41660

SEQ ID NO: 45896 - DNA, 702 bp, Xanthomonas euvesicatoria; identical to SEQ ID NO: 41661

SEQ ID NO: 45897 - DNA, 4056 bp, Xanthomonas euvesicatoria; identical to SEQ ID NO: 41662

SEQ ID NO: 45898 - DNA, 1470 bp, Xanthomonas euvesicatoria; identical to SEQ ID NO: 41660

SEQ ID NO: 45899 - DNA, 702 bp, Xanthomonas euvesicatoria; identical to SEQ ID NO: 41661

SEQ ID NO: 45900 - DNA, 4056 bp, Xanthomonas euvesicatoria; identical to SEQ ID NO: 41662

SEQ ID NO: 45901 - DNA, 1470 bp, Xanthomonas euvesicatoria; identical to SEQ ID NO: 41660

SEQ ID NO: 45902 - DNA, 702 bp, Xanthomonas euvesicatoria; identical to SEQ ID NO: 41661

SEQ ID NO: 45903 - DNA, 4056 bp, Xanthomonas euvesicatoria; identical to SEQ ID NO: 41662

SEQ ID NO: 45904 - DNA, 1470 bp, Xanthomonas euvesicatoria; identical to SEQ ID NO: 41660

SEQ ID NO: 45905 - DNA, 702 bp, Xanthomonas euvesicatoria; identical to SEQ ID NO: 41661

SEQ ID NO: 45906 - DNA, 4056 bp, Xanthomonas euvesicatoria; identical to SEQ ID NO: 41662

SEQ ID NO: 45907 - DNA, 1470 bp, Xanthomonas euvesicatoria; identical to SEQ ID NO: 41660

SEQ ID NO: 45908 - DNA, 702 bp, Xanthomonas euvesicatoria; identical to SEQ ID NO: 41661

SEQ ID NO: 45909 - DNA, 4056 bp, Xanthomonas euvesicatoria; identical to SEQ ID NO: 41662

SEQ ID NO: 45910 - DNA, 1470 bp, Xanthomonas euvesicatoria; identical to SEQ ID NO: 41660

SEQ ID NO: 45911 - DNA, 702 bp, Xanthomonas euvesicatoria; identical to SEQ ID NO: 41661

SEQ ID NO: 45912 - DNA, 4056 bp, Xanthomonas euvesicatoria; identical to SEQ ID NO: 41662

SEQ ID NO: 45913 - DNA, 1470 bp, Xanthomonas euvesicatoria; identical to SEQ ID NO: 41660

SEQ ID NO: 45914 - DNA, 702 bp, Xanthomonas euvesicatoria; identical to SEQ ID NO: 41661

SEQ ID NO: 45915 - DNA, 4056 bp, Xanthomonas euvesicatoria; identical to SEQ ID NO: 41662

SEQ ID NO: 45916 - DNA, 1470 bp, Xanthomonas euvesicatoria; identical to SEQ ID NO: 41660

SEQ ID NO: 45917 - DNA, 702 bp, Xanthomonas euvesicatoria; identical to SEQ ID NO: 41661

SEQ ID NO: 45918 - DNA, 4056 bp, Xanthomonas euvesicatoria; identical to SEQ ID NO: 41662

SEQ ID NO: 45919 - DNA, 1470 bp, Xanthomonas euvesicatoria; identical to SEQ ID NO: 41660

SEQ ID NO: 45920 - DNA, 702 bp, Xanthomonas euvesicatoria; identical to SEQ ID NO: 41661

SEQ ID NO: 45921 - DNA, 4056 bp, Xanthomonas euvesicatoria; identical to SEQ ID NO: 41662

SEQ ID NO: 45922 - DNA, 1470 bp, Xanthomonas euvesicatoria; identical to SEQ ID NO: 41660

SEQ ID NO: 45923 - DNA, 702 bp, Xanthomonas euvesicatoria; identical to SEQ ID NO: 41661

SEQ ID NO: 45924 - DNA, 4056 bp, Xanthomonas euvesicatoria; identical to SEQ ID NO: 41662

SEQ ID NO: 45925 - DNA, 1470 bp, Xanthomonas gardneri; identical to SEQ ID NO: 42444

SEQ ID NO: 45926 - DNA, 705 bp, Xanthomonas gardneri; identical to SEQ ID NO: 42445

SEQ ID NO: 45927 - DNA, 1182 bp, Xanthomonas gardneri; identical to SEQ ID NO: 42447

SEQ ID NO: 45928 - DNA, 1491 bp, Xanthomonas gardneri
atgcatcgcagcagcgtcgatcggacgcaaagctatattttggcgcggcaccagcaccccgcttggcagttgctggctgggcgtcgggcgccgttggtgctggggtgcctccaagcacttttcgaagccggccaagacggggtggacgacgacgacgcccagcaggcgttggccactcttttgcgggaacatgccggacgatccgaatttgagatcgaaggcgatgtcgaggcactggcccgcaaggagctgaggacttggattcgctgcgcactgatcgtggaacgcgaaggccgcgtctatgcgactgatgcactggaattggcgctgcgcttcgtcgatggactggaaaatcgcgtcatgacctcgacggcttcacgcttggcgatcgtgcagcgcgaaattgaacggctcgaagcgcggctaaatcccgatccaaagagccgcgttgagcacttgcgtgcccagattgcgggtcttcagagggaattagaggacgcggaagatggacgtgttgagacggcagacgcgcatgaagcggccgaaggtgcgcgagaactgtatgcgcttgccaccagccttcgggcagattttcgacgtgtggaagattcctggcgcaacgccgatcttcgcttacgccatgcgatcgtgtcggaacgccagcatcgtggcgccattgtcgacgcgctattgaacgggcacgacgagctgctggaaacccccgaggggcgcgtttttcaagcattccatcagcagcttcagcaagaagttgagttggaagccatgaagcaccggctccaggccatcttgcggcaccctcaagctttgtcagcgctaagcgccttgcagcaggctgacatgcgctggctggtcacccgcttggtcaaggaagcgggcgctgtgattcgcgcccgatcgcgcagcgagcgcgatgtgcgcagcttcttacgcacgaatttggcagcagaacaccaccgcgtggggcaactgctcagcgaagccttggcgcaagcgcagcggatcgattggcaagctgcagtccgacgtggcccttctccgttccctccggtggctgccccttgtggcggtttgcccttggtggatcgcttgcgctttaaatctgccgatcacgaggccctgcgggaactggatttgaagcggcagtcaggcaacatcgaagccatcgccgatgacttttggtcatcgttagacggattggaccgtgacgccttggtccgcgatacggtcgccatccttcagaccagcgatcgccacctcagtttggctgcgttggccgagcgcatcccgttgactcatgacttggaatcgttggccttgtgggtcggcatggcgcgtgaagtcggcgctccagtcggagacgactttgagcacctcaatctcaccacacgcgacgagaagaatttaaggttcacagtgccgaaaattgagctggatcctgctgcattcgcggcattcgactgggaaccctga

SEQ ID NO: 45929 - DNA, 705 bp, Xanthomonas gardneri; identical to SEQ ID NO: 42442

SEQ ID NO: 45930 - DNA, 3312 bp, Xanthomonas gardneri
atgagcacgctagccgcgccgtccctcggaagcttggtgcttacgcacctagacatctacgactggggcgccttcggcggccgtcacagcgtacccatagacgtagccggcaccgccatcatcggccccacgggcagtggcaagacaaccttggtcgatgcgctgatgaccctcctggtcgccgttccgcgctacaacctagcctcaaccggcgggcatgacagcgatcgagacttagtgtcttatgtgcgtggtgtctcgggcgccggcatcggcggtgacaccaccgataacattagccgccccggctccgtggtgacggccgtttccgcgcgtttcagcgatggggatgcagtggtacgcatcggaggggtattttggtttgacggcagtagctcggcgacgaccgacctcaagcgccgttggatcttctgtctgggtgattccacctcgcttgatgactggctcgaagcgcaccgagaaaatggcgcgcgcgccctgaaagaactggagcgcgtccacgctggtttcaaactctacgagagcaaacaaacatttttggcacgattgcgtaaccatttcgaagtcaccgaaaacgccttcgccctgctcaaccgtgccgcgggcttgaagcagatcgacagcatcgacaaggtgttccgggaacttgtactcgatgatcgttccgcgtttgagaccgctaagtcggtggtcgatgaattcgcgaccctcgccggcatacgacaggagctggagacggctcgacgccaacgcgaaagcctcgtgcccatcgacaagagttggggtcagcacgtcgacatttcagtcaagctcgacgagcgaaagcgcctgatcagcttgctccccatctggtttgccgaacgcgtgatggggctatggcatgtccagcgtgagcgcgcggaggcagagctgcttaaacgccagagtgaaagtgacgaacttaaagggcagctctcggcagcagaggcagcagaagaggcgtgtcacgccacctacctgctggaaggtggacaggatattgagaacttatccaagcacatcgaccttcagcgcactactcgcgatcaacggcgacgcgatgcgaacgcttaccaaataatggcacgtgctctgggcttaccgtctgctctgaccgccgctgacgtcgcagcaaatcgcgccagcgttggcccgcgacgcgcggaagaacaacagcgccaccaagaacaaaagcgcgcggcctgggatatgggagcccaacacgcgagccagttggccgatcgcgagcgcgtcggccaagagcttgcagccgctaaacgccgtcccaagtccaatatccccgatgcgcaatctacctttcgcgataggctggctcagcatctgcgattggacgcagaggcgttgccgtttgtcgccgaattgatcgaggtccaatcaccccaacacgcttggcgtggtgccattgaacgggctatcggtagcgaacgcttgcgcattctcatcgcacctgagaatttggacgaggcgctgaagtgggtcaatggacgcgataccggattgcatgtgcgccttcgcaaggccagcatccctgacgggcaggctcggttcttcgatgacggcttcacccgcaagctgaacttcaagccgcacgcgcaccgtgaagcactcaaacatctcttgggcgatatcgaccgacactgcgtgcctgatgttgatacgctcaatcgcacccctcatgcaatgaccgccgagggactgatgtctggtcgcgccggcttttttgataaacatgaccaaaggccgttgcatgccgattggatgacgggattcgacaaccgcgatctcgtcgctcagttgacgcgtgatttagcagcggccattgatcttcatcaagcaagccaagaagcactcaagctcgccgaagctttggcagaggccaccgagcgtgtcttggggttccttaagagcctggaagagacgtcgttcgagaccatcaatgtagtcagcgcagaaaacgcactggttcagttagaaacccagtttgctacgctgaccaacccagaatccgacgctcaagtggctgcgaagcgctggcgcgctgcccaagaggccacgcgcgacgtgcgccaggcacagacgaacttggaagtggcaatctcgaaagtccaagacaccatcgatcgggcacacagagcaccccagaaaaatcggttgcgcattggtgagggtttgatggacgacgagcggagctgggtcgatcaaaacattgacctgccctctttcactgatcccgcgctcttggccgatgtcgaacgcacagcacgcgaacgcattgaaagcgaacgggactcttttgccaatcgccttagaggcattgaacaacaattgattcgggacatgggcaaggcaaagttggtcgacactggtgcgctcaccgaagcggcgactgaattacacgatgtgccaacctatcgcgagcgccttcggatccttgatgaggaagcccttcctgaaaagatccatcgtttccagcaatatctcaaccagtcctcagatcaaggtgtgacacaactgttgagcgacatcgccaacgaggtctctggcattgaagagcgcatcgccgacttgaatgccacgctcaaacgcgtcgatttccagcccgggcgctacctacatcttgagcctcaacgggtcgaacacgagagcttgcgcgccctgcgcctggctcagacgcacttgcgctcggcgcaactgaaagacgatggcggtgagagtcactatcaagctctcacgcacgtagtcaaactgcttcaggaagccgcagaccgacgcaaactgcaagggtctctcgccctattggatccacggtatcgactccaattcgccgtgtgggtcatcgcgcgtgatgatggccgaatcattgaaaagcgcactagctctcaaggaggaagcggcggtgagaaagagatcatcgccagctatgtgctgaccgcatcgttgagttatgccttgtgttcaccgaaccggcagcatccactctttggcacagtggtgcttgacgaggctttctcaaagagttctcacgccgtcgctggacgcatcatccgggcgctcgccgaatttggcctacatccgcttttcgtgaccccaaacgaagagctgcgcctgttacgcgatcacacccgctcagccatcgtggtgcatcgacgcggcactcaggcgaccgtgacgtcactcacgtgggaggagctggaacaccatgcccgtgaacgccggaaacgcacggagatgaccgttgaaatcgccgagtga

SEQ ID NO: 45931 - DNA, 1152 bp, Xanthomonas gardneri
ttgaaatcgccgagtgaagcagcacgacttctcgctcggcactggcaggacgccggcaagcgggagcggcagctgctgcaacccgatgcatggccaatgctcgtcccgattgggcgccccaccgcgacggaattcaccaacgagacctcgcgtgtgcgcgcgcatatggaagactggcgggcggtcactgtaggtgaagttgtcgccgaacctgtgcgctttcgcagcggagccgaaccggtgatggtgcccacgcattggtccttggcctcagctgcagaatgggcagacgcgtcgaatgacatcgccatacaaggcgagcaagccgaattaagccaattgctcgaagccatcccacctatattccatcgactgttggtccgccagcgaggtctttggcgcactcgatcccgcgaggaggtggtgcaggccacggcgctggcccttggtctagagccgggcatggccgcgggacgccctatgcgcagcatcgcggtcgcaggcatcgacagcaaattcatggagcgccacggcgctttggtgacggcgctgttggatgtgcgtttcgagggtcaggcgtccaaacagggaattgtgcgattcttggacgccgccgacgaaggcgagcattggttgctggtggcacccttatcacaaggcttgctgccgttcgcacgtcagcgtgtgcgtgctcgcgagttggtggaggttcccttgcccgccggccggatcttggtcgtggaaaacgaccgttgcttgcatctactgccacccatgccagacaccatcgccgtgttgggcgccgggctcaacttggcttggcttagcgcgccctggttgcgagagagggacattggctactggggcgacttggacacatggggactacagatgttggcccaggctcgccgccttcaacccaaggtcgaagcgattctcatgaatcacgccgtgtttgaggcacacgggtccaactcggccgtctgtgaggacactcccgcattgccggaaccgccagacggccttaaccaagaagagcaagcactctattgtcatctgcgaggcctattcaaaggacgactggagcaagaattcttacctgcagcggaggtggcaaatgcactcacaaaatgggggtattccaacggttga

SEQ ID NO: 45932 - DNA, 1470 bp, Xanthomonas gardneri; identical to SEQ ID NO: 42444

SEQ ID NO: 45933 - DNA, 705 bp, Xanthomonas gardneri; identical to SEQ ID NO: 42445

SEQ ID NO: 45934 - DNA, 1182 bp, Xanthomonas gardneri; identical to SEQ ID NO: 42447

SEQ ID NO: 45935 - DNA, 1491 bp, Xanthomonas gardneri; identical to SEQ ID NO: 45928

SEQ ID NO: 45936 - DNA, 705 bp, Xanthomonas gardneri; identical to SEQ ID NO: 42442

SEQ ID NO: 45937 - DNA, 3312 bp, Xanthomonas gardneri; identical to SEQ ID NO: 45930

SEQ ID NO: 45938 - DNA, 1152 bp, Xanthomonas gardneri; identical to SEQ ID NO: 45931

SEQ ID NO: 45939 - DNA, 1470 bp, Xanthomonas gardneri; identical to SEQ ID NO: 42444

SEQ ID NO: 45940 - DNA, 705 bp, Xanthomonas gardneri; identical to SEQ ID NO: 42445

SEQ ID NO: 45941 - DNA, 1182 bp, Xanthomonas gardneri; identical to SEQ ID NO: 42447

SEQ ID NO: 45942 - DNA, 1491 bp, Xanthomonas gardneri; identical to SEQ ID NO: 45928

SEQ ID NO: 45943 - DNA, 705 bp, Xanthomonas gardneri; identical to SEQ ID NO: 42442

SEQ ID NO: 45944 - DNA, 3312 bp, Xanthomonas gardneri; identical to SEQ ID NO: 45930

SEQ ID NO: 45945 - DNA, 1068 bp, Xanthomonas gardneri
ttgaaatcgccgagtgaagcagcacgacttctcgctcggcactggcaggacgccggcaagcgggagcggcagctgctgcaacccgatgcatggccaatgctcgtcccgattgggcgccccaccgcgacggaattcaccaacgagacctcgcgtgtgcgcgcgcatatggaagactggcgggcggtcactgtaggtgaagttgtcgccgaacctgtgcgctttcgcagcggagccgaaccggtgatggtgcccacgcattggtccttggcctcagctgcagaatgggcagacgcgtcgaatgacatcgccatacaaggcgagcaagccgaattaagccaattgctcgaagccatcccacctatattccatcgactgttggtccgccagcgaggtctttggcgcactcgatcccgcgaggaggtggtgcaggccacggcgctggcccttggtctagagccgggcatggccgcgggacgccctatgcgcagcatcgcggtcgcaggcatcgacagcaaattcatggagcgccacggcgctttggtgacggcgctgttggatgtgcgtttcgagggtcaggcgtccaaacagggaattgtgcgattcttggacgccgccgacgaaggcgagcattggttgctggtggcacccttatcacaaggcttgctgccgttcgcacgtcagcgtgtgcgtgctcgcgagttggtggaggttcccttgcccgccggccggatcttggtcgtggaaaacgaccgttgcttgcatctactgccacccatgccagacaccatcgccgtgttgggcgccgggctcaacttggcttggcttagcgcgccctggttgcgagagagggacattggctactggggcgacttggacacatggggactacagatgttggcccaggctcgccgccttcaacccaaggtcgaagcgattctcatgaatcacgccgtgtttgaggcacacgggtccaactcggccgtctgtgaggacactcccgcattgccggaaccgccagacggccttaaccaagaagagcaagcactctattgtcatctgcgaggccta

SEQ ID NO: 45946 - DNA, 1470 bp, Xanthomonas gardneri; identical to SEQ ID NO: 42444

SEQ ID NO: 45947 - DNA, 705 bp, Xanthomonas gardneri; identical to SEQ ID NO: 42445

SEQ ID NO: 45948 - DNA, 1182 bp, Xanthomonas gardneri; identical to SEQ ID NO: 42447

SEQ ID NO: 45949 - DNA, 1491 bp, Xanthomonas gardneri; identical to SEQ ID NO: 45928

SEQ ID NO: 45950 - DNA, 705 bp, Xanthomonas gardneri; identical to SEQ ID NO: 42442

SEQ ID NO: 45951 - DNA, 3312 bp, Xanthomonas gardneri; identical to SEQ ID NO: 45930

SEQ ID NO: 45952 - DNA, 1152 bp, Xanthomonas gardneri; identical to SEQ ID NO: 45931

SEQ ID NO: 45953 - DNA, 1470 bp, Xanthomonas perforans; identical to SEQ ID NO: 42438

SEQ ID NO: 45954 - DNA, 702 bp, Xanthomonas perforans; identical to SEQ ID NO: 42439

SEQ ID NO: 45955 - DNA, 4062 bp, Xanthomonas perforans
atgaattcccagtccaatctgtcgccagcgcaaccaggtgcctccttgtttgccgagacgctcgccgagcaacgtgcgcagcagttccgcatgcggcgcttgcaggtgcacaactggggcaccttcaacgggctgaccgaagtgccgatcgcggagaagggcttcctgtttgtcgggcgttcgggctcgggcaagtccaccttgctggatgcgatgtcggcactgctgacgccgccgagcatcgtcgacttcaacgccgccgcgcgcgaagccgagcgcagtgggcgcgatcggagtctggtgtcgtatgtgcgcggtgcgtgggccgatcagcaggacagcgcgtccggcgaaatcgctacccaatacctgcgcaagggcgccacctggaccgcgctggtgctggaatacgcaaatgcgcacggcgaggcggtgagcctgatccgcttgttctggatcgccggcagcggtaacgcggcggccgatgtgcggcgtcactacatggtcgcgccacgccgtttcgacgtggcgaccgagctggatggcttcgatcttgacctgcgcaagctcaaggcgcgattgggtgaggacgttgcgcatttcgacggcttcgccggctacgccgaacgtttccggcacgcgctgggcatcggcaacgagatggcgctgcggctgttgcacaagacccagtcggccaagaacctgggcgatctcaatgcgtttctgcgcggcttcatgctggacgagccgcgtaccttcgaagcggccgaccggctggtggaagattttgccgaactcgatggcgcgcaccatgcggtggtcaccgcccggcgccaggtggaaaccctgacccctgcgcgcgagcaccacgcggcgctgatggcgctgcgccacagcgtcggcgagttgcgcgagctgcagctgggcgtggacagctaccgcgagcagcagcggctggccttgctggaggagcggctgcaggagctcgacaaccaggaccgtggactggccggcgaagaaggccagcgccgcgaatcgctggataaccacgaacaaaaactggtcggcctggagcgcgaacagcgcgccgccggtggcgagcagatcgaggaactggaacgcgaacgcgcacgcgtcgagcgcgagcgcgacgaacgcctgcgccgccgtgcacagatcgaacaggcctgccgccagctcggcaccgccctggcggccggcgccagtggctttgccgcacagatcgcgcatgcgcagaccgtgctggataacggcaagcatgacgccagcgcgctggatgaggccatcgccgaacgcatgggcgcgcggcgcgacgacgagcgccggtttgccgaaatccgtgccgaactggaggcgctgaagcgcgcgccatcgagcatgcccgcaccgatgcaggccctgcgcgcgcgcttgtgcgaagacaccggcattgccgaggccgcgctgccgttcgttggcgagctggtgcaggtgcgcgaggaccagacggcctggcgcggtgcgatcgagcgtgtgctgcacggctttgcgcaatcgctgctggtggacgagcggcattacgcgcaggtcagcgaatgggtcaaccgcacccatatcggtacgcgtctggtgtacttccgtgtgcgccgcaacgacgagctgcattcgcggcgggtcgatcccggcgcgctgcccggcaagctgcagctgcgcgagcacgcctttaccgaatggctgcgcaacgagctgacccgtcgcttcgactacgcgtgcgtggacaacgccggagcattgcgcaacgccgaccgcgcgatcacccgcgagggccaggtcaagcatcctggcgatcgctatgagaaggacgaccgccacgcggtcaacgatcgcaagcgttggctgctcggtcacgacaaccgcgacaagctcaaggtgttcgagcgcgaagcgcaggcgctggcccagcgcatcgccagctgcgatgccgatgtggcagcgctgcgcaagcagcgtgagcaggaccaggaacgccaactcgctgcgcacaccttggtggagcgcgactgggacgagatcgatgtcggccccaagctgcagcgcctgagcgatatcgacgaacagttggtgcagctgcgcgaaggcaacagcggcctgcgcgcgctcgggcaggccatcgacactgcacggaccctgcgcgaccaggccaagcgcacctatgaagatgtgcggctggagcgcgcgcaactggcgcgcgaacgcgtgcggctcgaacagcagcacgcggcctgcgcgggccgcgccggttccgccacgctcacgcccacccagttgcagggcttgcgggaacggcttgccgcattgacgccgctgtcgctggacaatctggaagcgcatttgcgcgtggtcgaacgtggcctggccgagcagttggccgacagccagggccgcgacagccggctcagcgcgcagttgctggaatgcttccgcaagtattgccagcagtggcccgaagacagcggcgatttcaccgtgagccttgccagcgccgacgatttcctcgcgcgtctggaccggctggaaagcgatggcctgccgcgtcacgagcatcgtttcttcgacctgttgcagacccagagcaagaacaacctgctggccttgcagcgttacaccgccgaagcccacaagggcatcaagcagcgcatggacgaggtcaacgccagcctggagcaggtgccgttcaatcgcgacaccgtgctgaccatcgaggtcggcgaccgtcgcctggccgaggtgcaggaattccagcagcagttgcgcgcggtgctgtcgcatcaacagaccgaagaccgcgccctggccgaagcgcagttttccaccttgcgtgcgctggtggcgcgcctgggcgcgcaggaaccggaggcacgccgctggcgcgaacaggtgctggatgtgcgcctgcatgtggagttcatcggtgtggaactggacgcgcagacgcgcgcgcaggtggagatctaccgcagcggcgcgggcaagtccggcggtcagcgccagaaactggcaaccacctgcctggcggccgcgctgcgctaccagcttggcggcgaagacggcgaactgccgcgctactgcgcggtggtgctggacgaagccttcgacaaggccgacaacgaattcaccgcgctggcgatgaacatcttcgagaacttcggcttccagatggtggtggccacgccgttgaagtcggtgatgaccttggagcccttcatcggcggcgcatgttttgtcgaaatcagcggccgccataactccggcgtgttgctgatcgaatacgacgagcaggcacagcgattgaagctgccggagcgctcgcgtggcgatgaggcagcggtggccgatgccactgacgccgcgtcagcgatcgaggctgcgagtgagcctgtaggagtgcagggcgctgcaaacgcagacggcattacagctgatggcctcccgctacacatagccttgcccgtgcccggcgatacctcacccgcagcgcagaacacgcatagtagtaagcgcaagccggcagcggcgacggcgacggcgacggcgaacaagcagaacaaaaacaagcaaaacaagaacgccaagaccacatcgcccacacgcgctgcggcacagcctcacgcaaagcagccgaagaaatcgccttcgcgcactccagctgtggctggcaagccggtagcggacaaacgtacctcaggcgcgcagcaagcgccggcggtgtcgtcaggagctgcatccaggtccaacgtgggcaagaccacgcggtcttcaaaagcgcagggcaagccgattgtggccgcaaacgcatccaacgccacgtccagcaaggtcgccgccgcatctgcgccagtgaaaaacactgccgcagccaagccacgtgcaacagccgcatcgactggtcagccagcgcgtggcgccggcaagacaacctcggcgcgcgcggtggctgaaccgtcaccggccacgacgcgcgtcgccagggcaggcgccccgaaggcgcgcggcaagcgctga

SEQ ID NO: 45956 - DNA, 1470 bp, Xanthomonas perforans; identical to SEQ ID NO: 42438

SEQ ID NO: 45957 - DNA, 702 bp, Xanthomonas perforans; identical to SEQ ID NO: 42439

SEQ ID NO: 45958 - DNA, 4062 bp, Xanthomonas perforans; identical to SEQ ID NO: 45955

SEQ ID NO: 45959 - DNA, 1470 bp, Xanthomonas perforans; identical to SEQ ID NO: 42438

SEQ ID NO: 45960 - DNA, 702 bp, Xanthomonas perforans; identical to SEQ ID NO: 42439

SEQ ID NO: 45961 - DNA, 4062 bp, Xanthomonas perforans; identical to SEQ ID NO: 45955

SEQ ID NO: 45962 - DNA, 1470 bp, Xanthomonas perforans; identical to SEQ ID NO: 42438

SEQ ID NO: 45963 - DNA, 702 bp, Xanthomonas perforans; identical to SEQ ID NO: 42439

SEQ ID NO: 45964 - DNA, 4062 bp, Xanthomonas perforans; identical to SEQ ID NO: 45955

SEQ ID NO: 45965 - DNA, 1470 bp, Xanthomonas perforans; identical to SEQ ID NO: 42438

SEQ ID NO: 45966 - DNA, 702 bp, Xanthomonas perforans; identical to SEQ ID NO: 42439

SEQ ID NO: 45967 - DNA, 4062 bp, Xanthomonas perforans; identical to SEQ ID NO: 45955

SEQ ID NO: 45968 - DNA, 1470 bp, Xanthomonas perforans; identical to SEQ ID NO: 42438

SEQ ID NO: 45969 - DNA, 702 bp, Xanthomonas perforans; identical to SEQ ID NO: 42439

SEQ ID NO: 45970 - DNA, 4062 bp, Xanthomonas perforans; identical to SEQ ID NO: 45955

SEQ ID NO: 45971 - DNA, 1470 bp, Xanthomonas perforans; identical to SEQ ID NO: 42438

SEQ ID NO: 45972 - DNA, 702 bp, Xanthomonas perforans; identical to SEQ ID NO: 42439

SEQ ID NO: 45973 - DNA, 4062 bp, Xanthomonas perforans; identical to SEQ ID NO: 45955

SEQ ID NO: 45974 - DNA, 1470 bp, Xanthomonas perforans
atgaagcaccaggcacgtatcgccggttatcggcaactgcgcgagcagccggtatggaaactgctcgccgccgaccacgcacccgagctgatcggcctgctgcagacggtgctgatggatggcgaacgccgcctgccttcggccgtgttgcacgaacgtttgcagcgccagctcgacgccttgcgcgccgacgagctctcgcgcgaactgccgcgcaccgcacaggcatatctggcgcattggttggcacagggctggctggaacgccgcctgcctgaaggcgcagccgaagaagaatacgaactctcgcgtgccgcgacccaggccatccgcttcatcgccggcctgcgcgaaagcagcagcagcgccaccgaaagccgcctgtcgctggtgatccagcaactggtgcagctggccggacagaccgaggccgatccagagctccggctggccgcgctgcgcgatgaacgtgcgcgcatcgatgccgaaatcgaacgcgtggcctccggccgcgtggcggcgctggacggcaaacgcgcgctggaacgcgcgcgcgacctgatccatctctctgacgagctggccgaggatttccaccgcgtgcgcgacgacttcgagcagctcaaccgccaattccgcgagcgcatcatcgacgacgaaggcgcgcgcggcgacgtgctcgaacaattgttcaacggcgtggatgtgattgcagacagcgaagccgggcgcaccttcgaggcgttctggagtctgctcaacgacacccagcaaagcagccagctcgaccaggcgctggatgcgctgcttgcccgtgggtttgcccgcaagctcgatcgccgcgaacgcgccttcttgcgcgggctgaccggcacgctgctggaacgcggcggcgaggtgcacacggtgatgcagcatttcgcgcgcagcctgcgcgggttcgtgcaaagccgtgggtatctggaacagcgccggctcaatcaattgctcaagcaggcgcagggcgaagccttgcaattgcgcgacagcctgcacgccaccaccgccaccggctatacgcaggcactcagcagcagccgcctgcgctcgctgtcgcaatggcggctgcacgatccacggctcacccaggtcgatggacgcgtgcaggccgccgacgcggccgagatctcgctggacagcgtgggcgatctggtcgcgcaatcggagatcgatgtgcgcagcctgcgcaacgacctgcatgagctgctcggccaacgcccgcggctgaccatcggcgacgccttgcaacaacgcccggccgtgcagggcctgggcagcgtgatcggatacctgtcgctgggcacgcgccacggcatggtgatcgaaggacagatggaaacggtgcaatgggaaggcagcgacggcgccgtgcggcgcgcgcgcattcccttggtgtggtttacccgggagaaacgcaatgaactggtctga

SEQ ID NO: 45975 - DNA, 702 bp, Xanthomonas perforans; identical to SEQ ID NO: 42439

SEQ ID NO: 45976 - DNA, 4056 bp, Xanthomonas perforans
atgaattcccagtccaatctgtcgccagcgcaaccaggtgcctccttgtttgccgagacgctcgccgagcaacgtgcgcagcagttccgcatgcggcgcttgcaggtgcacaactggggcaccttcaacgggctgaccgaagtgccgatcgcggagaagggcttcctgtttgtcgggcgttcgggctcgggcaagtccaccttgctggatgcgatgtcggcactgctgacgccgccgagcatcgtcgacttcaacgccgccgcgcgcgaagccgagcgcagtgggcgcgatcggagtctggtgtcgtatgtgcgcggtgcgtgggccgatcagcaggacagcgcgtccggcgaaatcgctacccaatacctgcgcaagggcgccacctggaccgcgctggtgctggaatacgcaaatgcgcacggcgaggcggtgagcctgatccgcttgttctggatcgccggcagcggtaacgcggcggccgatgtgcggcgtcactacatggtcgcgccacgccgtttcgacgtggcgaccgagctggatggcttcgatcttgacctgcgcaagctcaaggcgcgattgggtgaggacgttgcgcatttcgacggcttcgccggctacgccgaacgtttccggcacgcgctgggcatcggcaacgagatggcgctgcggctgttgcacaagacccagtcggccaagaacctgggcgatctcaatgcgtttctgcgcggcttcatgctggacgagccgcgtaccttcgaagcggccgaccggctggtggaagattttgccgaactcgatggcgcgcaccatgcggtggtcaccgcccggcgccaggtggaaaccctgacccctgcgcgcgagcaccacgcggcgctgatggcgctgcgccacagcgtcggcgagttgcgcgagctgcagctgggcgtggacagctaccgcgagcagcagcggctggccttgctggaggagcggctgcaggagctcgacaaccaggaccgtggactggccggcgaagaaggccagcgccgcgaatcgctggataaccacgaacaaaaactggtcggcctggagcgcgaacagcgcgccgccggtggcgagcagatcgaggaactggaacgcgaacgcgcacgcgtcgagcgcgagcgcgacgaacgcctgcgccgccgtgcacagatcgaacaggcctgccgccagctcggcaccgccctggcggccggcgccagtggctttgccgcacagatcgcgcatgcgcagaccgtgctggataacggcaagcacgacgccagcgcgctggatgaggccatcgccgaacgcatgggtgcgcggcgcgacgacgagcgccggtttgccgaaatccgtgccgaactggaggcgctgaagcgcgcgccatcgagcatgcccgcaccgatgcaggccctgcgcgcgcgcttttgcgaagacaccggcattgccgaggccgcgctgccgttcgttggcgagctggtgcaggtgcgcgaggaccagacggcctggcgcggtgcgatcgagcgtgtgctgcacggctttgcgcaatcgctgctggtggacgagcggcattacgcgcaggtcagcgaatgggtcaaccgcacccatatcggtacgcgtctggtgtacttccgtgtgcgccgcaacgacgagctgcattcgcggcgggtcgatcccggcgcgctgcccggcaagctgcagctgcgcgagcacgcctttaccgaatggctgcgcaacgaactgacccgtcgcttcgactacgcgtgcgtggacaatgccgcagcattgcgcaacgccgaccgcgcgatcacccgcgagggccaggtcaagcatcctggcgatcgctatgagaaggacgaccgccacgcggtcaacgatcgcaagcgttggctgctcggtcacgacaaccgcgacaagctcaaggtgttcgagcgcgaagcgcaggcgctggcccagcgcatcgccagctgcgatgccgatgtggcagcgctgcgcaagcagcgtgagcaggaccaggaacgccaactcgctgcgcacaccttggtggagcgcgactgggacgaaatcgatgtcggccccaagctgcagcgcctgagcgatatcgacgaacagttggtgcagctgcgcgaaggcaacagcggcctgcgcgcgctcgggcaggccatcgacactgcacggaccctgcgcgaccaggccaagcgcacctatgaagatgtgcggctggagcgcgcgcaactggcgcgcgaacgcgtgcggctcgaacagcagcacgcggcctgcgcgggccgcgccggttccgccacgctcacgcccacccagttgcagggcttgcgggaacggcttgccgcattgacgccgctgtcgctggacaatctggaagcgcatttccgcgtggtcgaacgtggcctggccgagcagttggccgacagccagggccgcgacagccggctcagcgcgcagttgctggaatgcttccgcaagtattgccagcagtggcccgaagacagcggcgatttcaccgtgagccttgccagcgccgacgatttcctcgcgcgtctggaccggctggaaagcgatggcctgccgcgtcacgagcatcgtttcttcgacctgttgcagacccagagcaagaacaacctgctggccttgcagcgttacaccgccgaagcccacaagggcatcaagcagcgcatggacgaggtcaacgccagcctggagcaggtgccgttcaatcgcgacaccgtgctgaccatcgaggtcggcgaccgtcgcctggccgaggtgcaggaattccagcagcagttgcgcgcggtgctgtcgcatcaacagaccgaagaccgcgccctggccgaagcgcagttttccaccttgcgtgcgctggtggcgcgcctgggcgcgcaggaaccggaggcacgccgctggcgcgaacaggtgctggatgtgcgcctgcatgtggagttcatcggtgtggaactggacgcgcagacgcgcgcgcaggtggagatctaccgcagcggcgcgggcaagtccggcggtcagcgccagaaactggcaaccacctgcctggcggccgcgctgcgctaccagcttggcggcgaagacggcgaactgccgcgctactgcgcggtggtgctggacgaagccttcgacaaggccgacaacgaattcaccgcgctggcgatgaacatcttcgagaacttcggcttccagatggtggtggccacgccgttgaagtcggtgatgaccttggagcccttcatcggcggcgcatgttttgtcgaaatcagcggccgccataactccggcgtgttgctgatcgaatacgacgagcaggcacagcgattgaagctgccggagcgctcgcgtggcgatgaggcagcggtggccgatgccactgacgccgcgtcagcgatcgaggctgcgagtgagcctgtaggagtgcagggcgctgcaaacgcagacggcattacagctgatggcctcccgctacacatagccttgcccgtgcccggcgatacctcacccgcagcgcagaacacgcatagtagtaagcgcaagccggcagcggcgacggcgacggcgaacaagcagaacaaaaacaagcaaaacaagaacgccaagaccacatcgcccacacgcgctgcggcacagcctcacgcaaagcagccgaagaaatcgccttcgcgcactccagctgtggctggcaagccggtagcggacaaacgtacctcaggcgcgcagcaagcgccggcggtgtcgtcaggagctgcatccaggtccaacgtgggcaagaccacgcggtcttcaaaagcgcagggcaagccgattgtggccgcaaacgcatccaacgccacgtccagcaaggtcgccgccgcatctgcgccagtgaaaaacactgccgcagccaagccacgtgcaacagccgcatcgactggtcagccagcgcgtggcgccggcaagacaacctcggcgcgcgcggtggctgaaccgtcaccggccacgacgcgcgtcgccagggcaggcgccccgaaggcgcgcggcaagcgctga

SEQ ID NO: 45977 - DNA, 1470 bp, Xanthomonas gardneri; identical to SEQ ID NO: 42444

SEQ ID NO: 45978 - DNA, 705 bp, Xanthomonas gardneri; identical to SEQ ID NO: 42445

SEQ ID NO: 45979 - DNA, 1182 bp, Xanthomonas gardneri; identical to SEQ ID NO: 42447

SEQ ID NO: 45980 - DNA, 1491 bp, Xanthomonas gardneri; identical to SEQ ID NO: 45928

SEQ ID NO: 45981 - DNA, 705 bp, Xanthomonas gardneri; identical to SEQ ID NO: 42442

SEQ ID NO: 45982 - DNA, 3312 bp, Xanthomonas gardneri; identical to SEQ ID NO: 45930

SEQ ID NO: 45983 - DNA, 1152 bp, Xanthomonas gardneri; identical to SEQ ID NO: 45931

SEQ ID NO: 45984 - DNA, 1491 bp, Xanthomonas gardneri; identical to SEQ ID NO: 45928

SEQ ID NO: 45985 - DNA, 705 bp, Xanthomonas gardneri; identical to SEQ ID NO: 42442

SEQ ID NO: 45986 - DNA, 3312 bp, Xanthomonas gardneri; identical to SEQ ID NO: 45930

SEQ ID NO: 45987 - DNA, 1152 bp, Xanthomonas gardneri; identical to SEQ ID NO: 45931

SEQ ID NO: 45988 - DNA, 1470 bp, Xanthomonas gardneri; identical to SEQ ID NO: 42444

SEQ ID NO: 45989 - DNA, 705 bp, Xanthomonas gardneri; identical to SEQ ID NO: 42445

SEQ ID NO: 45990 - DNA, 1182 bp, Xanthomonas gardneri; identical to SEQ ID NO: 42447

SEQ ID NO: 45991 - DNA, 1470 bp, Xanthomonas perforans; identical to SEQ ID NO: 45974

SEQ ID NO: 45992 - DNA, 702 bp, Xanthomonas perforans; identical to SEQ ID NO: 42439

SEQ ID NO: 45993 - DNA, 4056 bp, Xanthomonas perforans; identical to SEQ ID NO: 45976

SEQ ID NO: 45994 - DNA, 1470 bp, Xanthomonas gardneri; identical to SEQ ID NO: 42444

SEQ ID NO: 45995 - DNA, 705 bp, Xanthomonas gardneri; identical to SEQ ID NO: 42445

SEQ ID NO: 45996 - DNA, 1182 bp, Xanthomonas gardneri; identical to SEQ ID NO: 42447

SEQ ID NO: 45997 - DNA, 1491 bp, Xanthomonas gardneri; identical to SEQ ID NO: 45928

SEQ ID NO: 45998 - DNA, 705 bp, Xanthomonas gardneri; identical to SEQ ID NO: 42442

SEQ ID NO: 45999 - DNA, 3312 bp, Xanthomonas gardneri; identical to SEQ ID NO: 45930

SEQ ID NO: 46000 - DNA, 1152 bp, Xanthomonas gardneri; identical to SEQ ID NO: 45931

SEQ ID NO: 46001 - DNA, 1491 bp, Xanthomonas gardneri; identical to SEQ ID NO: 45928

SEQ ID NO: 46002 - DNA, 705 bp, Xanthomonas gardneri; identical to SEQ ID NO: 42442

SEQ ID NO: 46003 - DNA, 3312 bp, Xanthomonas gardneri; identical to SEQ ID NO: 45930

SEQ ID NO: 46004 - DNA, 1152 bp, Xanthomonas gardneri; identical to SEQ ID NO: 45931

SEQ ID NO: 46005 - DNA, 1470 bp, Xanthomonas gardneri; identical to SEQ ID NO: 42444

SEQ ID NO: 46006 - DNA, 705 bp, Xanthomonas gardneri; identical to SEQ ID NO: 42445

SEQ ID NO: 46007 - DNA, 1182 bp, Xanthomonas gardneri; identical to SEQ ID NO: 42447

SEQ ID NO: 46008 - DNA, 1470 bp, Xanthomonas gardneri; identical to SEQ ID NO: 42444

SEQ ID NO: 46009 - DNA, 705 bp, Xanthomonas gardneri; identical to SEQ ID NO: 42445

SEQ ID NO: 46010 - DNA, 1182 bp, Xanthomonas gardneri; identical to SEQ ID NO: 42447

SEQ ID NO: 46011 - DNA, 1491 bp, Xanthomonas gardneri; identical to SEQ ID NO: 45928

SEQ ID NO: 46012 - DNA, 705 bp, Xanthomonas gardneri; identical to SEQ ID NO: 42442

SEQ ID NO: 46013 - DNA, 3312 bp, Xanthomonas gardneri; identical to SEQ ID NO: 45930

SEQ ID NO: 46014 - DNA, 1152 bp, Xanthomonas gardneri; identical to SEQ ID NO: 45931

SEQ ID NO: 46015 - DNA, 1470 bp, Xanthomonas gardneri; identical to SEQ ID NO: 42444

SEQ ID NO: 46016 - DNA, 705 bp, Xanthomonas gardneri; identical to SEQ ID NO: 42445

SEQ ID NO: 46017 - DNA, 1182 bp, Xanthomonas gardneri; identical to SEQ ID NO: 42447

SEQ ID NO: 46018 - DNA, 1491 bp, Xanthomonas gardneri; identical to SEQ ID NO: 45928

SEQ ID NO: 46019 - DNA, 705 bp, Xanthomonas gardneri; identical to SEQ ID NO: 42442

SEQ ID NO: 46020 - DNA, 3312 bp, Xanthomonas gardneri; identical to SEQ ID NO: 45930

SEQ ID NO: 46021 - DNA, 1152 bp, Xanthomonas gardneri; identical to SEQ ID NO: 45931

SEQ ID NO: 46022 - DNA, 1470 bp, Xanthomonas perforans; identical to SEQ ID NO: 42438

SEQ ID NO: 46023 - DNA, 702 bp, Xanthomonas perforans; identical to SEQ ID NO: 42439

SEQ ID NO: 46024 - DNA, 4062 bp, Xanthomonas perforans; identical to SEQ ID NO: 45955

SEQ ID NO: 46025 - DNA, 1470 bp, Xanthomonas perforans; identical to SEQ ID NO: 42438

SEQ ID NO: 46026 - DNA, 702 bp, Xanthomonas perforans; identical to SEQ ID NO: 42439

SEQ ID NO: 46027 - DNA, 4062 bp, Xanthomonas perforans; identical to SEQ ID NO: 45955

SEQ ID NO: 46028 - DNA, 1470 bp, Xanthomonas perforans; identical to SEQ ID NO: 42438

SEQ ID NO: 46029 - DNA, 702 bp, Xanthomonas perforans; identical to SEQ ID NO: 42439

SEQ ID NO: 46030 - DNA, 4062 bp, Xanthomonas perforans; identical to SEQ ID NO: 45955

SEQ ID NO: 46031 - DNA, 1470 bp, Xanthomonas perforans; identical to SEQ ID NO: 42438

SEQ ID NO: 46032 - DNA, 702 bp, Xanthomonas perforans; identical to SEQ ID NO: 42439

SEQ ID NO: 46033 - DNA, 4062 bp, Xanthomonas perforans; identical to SEQ ID NO: 45955

SEQ ID NO: 46034 - DNA, 1470 bp, Xanthomonas perforans; identical to SEQ ID NO: 42438

SEQ ID NO: 46035 - DNA, 702 bp, Xanthomonas perforans; identical to SEQ ID NO: 42439

SEQ ID NO: 46036 - DNA, 4062 bp, Xanthomonas perforans
atgaattcccagtccaatctgtcgccagcgcaaccaggtgcctccttgtttgccgagacgctcgccgagcaacgtgcgcagcagttccgcatgcggcgcttgcaggtgcacaactggggcaccttcaacgggctgaccgaagtgccgatcgcggagaagggcttcctgtttgtcgggcgttcgggctcgggcaagtccaccttgctggatgcgatgtcggcactgctgacgccgccgagcatcgtcgacttcaacgccgccgcgcgcgaagccgagcgcagtgggcgcgatcggagtctggtgtcgtatgtgcgcggtgcgtgggccgatcagcaggacagcgcgtccggcgaaatcgctacccaatacctgcgcaagggcgccacctggaccgcgctggtgctggaatacgcaaatgcgcacggcgaggcggtgagcctgatccgcttgttctggatcgccggcagcggtaacgcggcggccgatgtgcggcgtcactacatggtcgcgccacgccgtttcgacgtggcgaccgagctggatggcttcgatcttgacctgcgcaagctcaaggcgcgattgggtgaggacgttgcgcatttcgacggcttcgccggctacgccgaacgtttccggcacgcgctgggcatcggcaacgagatggcgctgcggctgttgcacaagacccagtcggccaagaacctgggcgatctcaatgcgtttctgcgcggcttcatgctggacgagccgcgtaccttcgaagcggccgaccggctggtggaagattttgccgaactcgatggcgcgcaccatgcggtggtcaccgcccggcgccaggtggaaaccctgacccctgcgcgcgagcaccacgcggcgctgatggcgctgcgccacagcgtcggcgagttgcgcgagctgcagctgggcgtggacagctaccgcgagcagcagcggctggccttgctggaggagcggctgcaggagctcgacaaccaggaccgtggactggccggcgaagaaggccagcgccgcgaatcgctggataaccacgaacaaaaactggtcggcctggagcgcgaacagcgcgccgccggtggcgagcagatcgaggaactggaacgcgaacgcgcacgcgtcgagcgcgagcgcgacgaacgcctgcgccgccgtgcacagatcgaacaggcctgccgccagctcggcaccgccctggcggccggcgccagtggctttgccgcacagatcgcgcatgcgcagaccgtgctggataacggcaagcatgacgccagcgcgctggatgaggccatcgccgaacgcatgggcgcgcggcgcgacgacgagcgccggtttgccgaaatccgtgccgaactggaggcgctgaagcgcgcgccatcgagcatgcccgcaccgatgcaggccctgcgcgcgcgcttgtgcgaagacaccggcattgccgaggccgcgctgccgttcgttggcgagctggtgcaggtgcgcgaggaccagacggcctggcgcggtgcgatcgagcgtgtgctgcacggctttgcgcaatcgctgctggtggacgagcggcattacgcgcaggtcagcgaatgggtcaaccgcacccatatcggtacgcgtctggtgtacttccgtgtgcgccgcaacgacgagctgcattcgcggcgggtcgatcccggcgcgctgcccggcaagctgcagctgcgcgagcacgcctttaccgaatggctgcgcaacgagctgacccgtcgcttcgactacgcgtgcgtggacaacgccggagcattgcgcaacgccgaccgcgcgatcacccgcgagggccaggtcaagcatcctggcgatcgctatgagaaggacgaccgccacgcggtcaacgatcgcaagcgttggctgctcggtcacgacaaccgcgacaagctcaaggtgttcgagcgcgaagcgcaggcgctggcccagcgcatcgccagctgcgatgccgatgtggcagcgctgcgcaagcagcgtgagcaggaccaggaacgccaactcgctgcgcacaccttggtggagcgcgactgggacgagatcgatgtcggccccaagctgcagcgcctgagcgatatcgacgaacagttggtgcagctgcgcgaaggcaacagcggcctgcgcgcgctcgggcaggccatcgacactgcacggaccctgcgcgaccaggccaagcgcacctatgaagatgtgcggctggagcgcgcgcaactggcgcgcgaacgcgtgcggctcgaacagcagcacgcggcctgcgcgggccgcgccggttccgccacgctcacgcccacccagttgcagggcttgcgggaacggcttgccgcattgacgccgctgtcgctggacaatctggaagcgcatttgcgcgtggtcgaacgtggcctggccgagcagttggccgacagccagggccgcgacagccggctcagcgcgcagttgctggaatgcttccgcaagtattgccagcagtggcccgaagacagcggcgatttcaccgtgagccttgccagcgccgacgatttcctcgcgcgtctggaccggctggaaagcgatggcctgccgcgtcacgagcatcgtttcttcgacctgttgcagacccagagcaagaacaacctgctggccttgcagcgttacaccgccgaagcccacaagggcatcaagcagcgcatggacgaggtcaacgccagcctggagcaggtgccgttcaatcgcgacaccgtgctgaccatcgaggtcggcgaccgtcgcctggccgaggtgcaggaattccagcagcagttgcgcgcggtgctgtcgcatcaacagaccgaagaccgcgccctggccgaagcgcagttttccaccttgcgtgcgctggtggcgcgcctgggcgcgcaggaaccggaggcacgccgctggcgcgaacaggtgctggatgtgcgcctgcatgtggagttcatcggtgtggaactggacgcgcagacgcgcgcgcaggtggagatctaccgcagcggcgcgggcaagtccggcggtcagcgccagaaactggcaaccacctgcctggcggccgcgctgcgctaccagcttggcggcgaagacggcgaactgccgcgctactgcgcggtggtgctggacgaagccttcgacaaggccgacaacgaattcaccgcgctggcgatgaacatcttcgagaacttcggcttccagatggtggtggccacgccgttgaagtcggtgatgaccttggagcccttcatcggcggcgcatgttttgtcgaaatcagcggccgccataactccggcgtgttgctgaccgaatacgacgagcaggcacagcgattgaagctgccggagcgctcgcgtggcgatgaggcagcggtggccgatgccactgacgccgcgtcagcgatcgaggctgcgagtgagcctgtaggagtgcagggcgctgcaaacgcagacggcattacagctgatggcctcccgctacacatagccttgcccgtgcccggcgatacctcacccgcagcgcagaacacgcatagtagtaagcgcaagccggcagcggcgacggcgacggcgacggcgaacaagcagaacaaaaacaagcaaaacaagaacgccaagaccacatcgcccacacgcgctgcggcacagcctcacgcaaagcagccgaagaaatcgccttcgcgcactccagctgtggctggcaagccggtagcggacaaacgtacctcaggcgcgcagcaagcgccggcggtgtcgtcaggagctgcatccaggtccaacgtgggcaagaccacgcggtcttcaaaagcgcagggcaagccgattgtggccgcaaacgcatccaacgccacgtccagcaaggtcgccgccgcatctgcgccagtgaaaaacactgccgcagccaagccacgtgcaacagccgcatcgactggtcagccagcgcgtggcgccggcaagacaacctcggcgcgcgcggtggctgaaccgtcaccggccacgacgcgcgtcgccagggcaggcgccccgaaggcgcgcggcaagcgctga

SEQ ID NO: 46037 - DNA, 1470 bp, Xanthomonas perforans; identical to SEQ ID NO: 42438

SEQ ID NO: 46038 - DNA, 702 bp, Xanthomonas perforans; identical to SEQ ID NO: 42439

SEQ ID NO: 46039 - DNA, 4062 bp, Xanthomonas perforans; identical to SEQ ID NO: 45955

SEQ ID NO: 46040 - DNA, 1470 bp, Xanthomonas perforans; identical to SEQ ID NO: 42438

SEQ ID NO: 46041 - DNA, 702 bp, Xanthomonas perforans; identical to SEQ ID NO: 42439

SEQ ID NO: 46042 - DNA, 4062 bp, Xanthomonas perforans; identical to SEQ ID NO: 45955

SEQ ID NO: 46043 - DNA, 1470 bp, Xanthomonas perforans; identical to SEQ ID NO: 45974

SEQ ID NO: 46044 - DNA, 702 bp, Xanthomonas perforans; identical to SEQ ID NO: 42439

SEQ ID NO: 46045 - DNA, 4056 bp, Xanthomonas perforans; identical to SEQ ID NO: 45976

SEQ ID NO: 46046 - DNA, 1470 bp, Xanthomonas perforans; identical to SEQ ID NO: 45974

SEQ ID NO: 46047 - DNA, 702 bp, Xanthomonas perforans; identical to SEQ ID NO: 42439

SEQ ID NO: 46048 - DNA, 4056 bp, Xanthomonas perforans; identical to SEQ ID NO: 45976

SEQ ID NO: 46049 - DNA, 1470 bp, Xanthomonas perforans; identical to SEQ ID NO: 45974

SEQ ID NO: 46050 - DNA, 702 bp, Xanthomonas perforans; identical to SEQ ID NO: 42439

SEQ ID NO: 46051 - DNA, 4056 bp, Xanthomonas perforans; identical to SEQ ID NO: 45976

SEQ ID NO: 46052 - DNA, 1470 bp, Xanthomonas perforans; identical to SEQ ID NO: 45974

SEQ ID NO: 46053 - DNA, 702 bp, Xanthomonas perforans; identical to SEQ ID NO: 42439

SEQ ID NO: 46054 - DNA, 4056 bp, Xanthomonas perforans; identical to SEQ ID NO: 45976

SEQ ID NO: 46055 - DNA, 1470 bp, Xanthomonas perforans; identical to SEQ ID NO: 45974

SEQ ID NO: 46056 - DNA, 702 bp, Xanthomonas perforans; identical to SEQ ID NO: 42439

SEQ ID NO: 46057 - DNA, 4056 bp, Xanthomonas perforans; identical to SEQ ID NO: 45976

SEQ ID NO: 46058 - DNA, 1470 bp, Xanthomonas perforans; identical to SEQ ID NO: 45974

SEQ ID NO: 46059 - DNA, 702 bp, Xanthomonas perforans; identical to SEQ ID NO: 42439

SEQ ID NO: 46060 - DNA, 4056 bp, Xanthomonas perforans; identical to SEQ ID NO: 45976

SEQ ID NO: 46061 - DNA, 1470 bp, Xanthomonas perforans; identical to SEQ ID NO: 42438

SEQ ID NO: 46062 - DNA, 702 bp, Xanthomonas perforans; identical to SEQ ID NO: 42439

SEQ ID NO: 46063 - DNA, 4062 bp, Xanthomonas perforans; identical to SEQ ID NO: 45955

SEQ ID NO: 46064 - DNA, 1470 bp, Xanthomonas perforans; identical to SEQ ID NO: 42438

SEQ ID NO: 46065 - DNA, 702 bp, Xanthomonas perforans; identical to SEQ ID NO: 42439

SEQ ID NO: 46066 - DNA, 4062 bp, Xanthomonas perforans; identical to SEQ ID NO: 45955

SEQ ID NO: 46067 - DNA, 1470 bp, Xanthomonas perforans; identical to SEQ ID NO: 42438

SEQ ID NO: 46068 - DNA, 702 bp, Xanthomonas perforans; identical to SEQ ID NO: 42439

SEQ ID NO: 46069 - DNA, 4062 bp, Xanthomonas perforans; identical to SEQ ID NO: 45955

SEQ ID NO: 46070 - DNA, 1470 bp, Xanthomonas perforans; identical to SEQ ID NO: 42438

SEQ ID NO: 46071 - DNA, 702 bp, Xanthomonas perforans; identical to SEQ ID NO: 42439

SEQ ID NO: 46072 - DNA, 4062 bp, Xanthomonas perforans; identical to SEQ ID NO: 45955

SEQ ID NO: 46073 - DNA, 1470 bp, Xanthomonas perforans; identical to SEQ ID NO: 45974

SEQ ID NO: 46074 - DNA, 702 bp, Xanthomonas perforans; identical to SEQ ID NO: 42439

SEQ ID NO: 46075 - DNA, 4056 bp, Xanthomonas perforans; identical to SEQ ID NO: 45976

SEQ ID NO: 46076 - DNA, 1470 bp, Xanthomonas perforans; identical to SEQ ID NO: 45974

SEQ ID NO: 46077 - DNA, 702 bp, Xanthomonas perforans; identical to SEQ ID NO: 42439

SEQ ID NO: 46078 - DNA, 4056 bp, Xanthomonas perforans; identical to SEQ ID NO: 45976

SEQ ID NO: 46079 - DNA, 1470 bp, Xanthomonas perforans; identical to SEQ ID NO: 42438

SEQ ID NO: 46080 - DNA, 702 bp, Xanthomonas perforans; identical to SEQ ID NO: 42439

SEQ ID NO: 46081 - DNA, 4062 bp, Xanthomonas perforans; identical to SEQ ID NO: 45955

SEQ ID NO: 46082 - DNA, 1470 bp, Xanthomonas perforans; identical to SEQ ID NO: 45974

SEQ ID NO: 46083 - DNA, 702 bp, Xanthomonas perforans; identical to SEQ ID NO: 42439

SEQ ID NO: 46084 - DNA, 4056 bp, Xanthomonas perforans; identical to SEQ ID NO: 45976

SEQ ID NO: 46085 - DNA, 1470 bp, Xanthomonas perforans; identical to SEQ ID NO: 42438

SEQ ID NO: 46086 - DNA, 702 bp, Xanthomonas perforans; identical to SEQ ID NO: 42439

SEQ ID NO: 46087 - DNA, 4062 bp, Xanthomonas perforans; identical to SEQ ID NO: 45955

SEQ ID NO: 46088 - DNA, 1470 bp, Xanthomonas euvesicatoria; identical to SEQ ID NO: 41660

SEQ ID NO: 46089 - DNA, 702 bp, Xanthomonas euvesicatoria; identical to SEQ ID NO: 41661

SEQ ID NO: 46090 - DNA, 4056 bp, Xanthomonas euvesicatoria; identical to SEQ ID NO: 45882

SEQ ID NO: 46091 - DNA, 1470 bp, Xanthomonas perforans; identical to SEQ ID NO: 42438

SEQ ID NO: 46092 - DNA, 702 bp, Xanthomonas perforans; identical to SEQ ID NO: 42439

SEQ ID NO: 46093 - DNA, 4062 bp, Xanthomonas perforans; identical to SEQ ID NO: 45955

SEQ ID NO: 46094 - DNA, 1461 bp, Photorhabdus temperata subsp. thracensis
ttgaacttccaagggttacaggcaaaataccgccgtttatttcaggaaagtgcggcctggaaactgttaagagcggataattcccctttaattttggcatttttgggggagttattttcggaggatagtgaagtcccttttagtcgtgcccgcgtgtcactcgatgcagagttggtacgttgtcgtgaacttggtctttgggaaacggaaacaggtgccggcacgtatctcaataaatggattcgggaaggctggttgcgtgagatggatgacacattaacaaaaacggatgccagtgaaattgcgctccgatttagtcaggggcttgacgagcgcagttcaggaactactgcgtctcatcttcgaattgttcaggaagcggtcagggactttgcggtggcgattagcccaaatgtcgatgagcgtgtcacgcttttggaagatagaaaatccgaaattcagagagagattgatgccctgagggcaggtgttgtaaccgagctgaccgaggttgagcagcgggaaagaattcgtgaaatctaccagttggcttctgttttaacgggtgattttcgccgggttgaagatgaaattcgtcggttggatcaggaaattcgtattcaaattattgagggagactccaccagaggagatatccttcttgctgttttagagaaagaagcgttgttggctaaaacagatgccggtagtgcgtttgaaagcttttttgatttgttatgtgatcaaaatagaactatggagctgcgggatcagcttcgaagcattttaaatcgtccggtcgcagaatacttaacgacccagcaacggcaattcttgagtcagctcatgcgagaattgagccgcgagagtgacagagtttttcaaatcaggcgaagaacggaagagagcttgcgtgcttacatagagagtggcactgctcaagaaaatcgtgctgttgatagattgcttggtcaattggaacgactcgctgttgaattgaagaatgcggattgcgacttgcaaacaacaacagctctttcattgcccgttggggcggcaagtattagctctcccgaaagcatgctccttaaatcacccgatgaaaagctggatacctcaggtgttgaagaacagcttaactctcgagaaccgagtatacagatgctggattgccttgatgctgttcaaattcgattgatcgctgagaaggcgttagtaacgttaaaagagtttggtccaatgacgattgcatctattgcacattatcacccgcttaattcagggttggaggagttagttgcctatttgcgggttgcgaaatctgtcggggctgcatcattggaagagaaggaatcaattgaaattagtgacaaacagggcgttcgcttgcgggtgtctatccccacttttcttctgagtgccgacctgtttccagacagtttggatgaattggttctgtaa

SEQ ID NO: 46095 - DNA, 891 bp, Photorhabdus temperata subsp. thracensis
ttgaataaagatcgtggcacccgcgcaacccttgggaaatctgattcagatcctcagaaagagcagcaaacagggttttttgatcagttgataaaacatcatactcaattagagtataacccgcttacaggcacatccgttgttgaatctgctgtcgctgccaataaaagttcatccgttgaagttgatgatgtattagtcaatgatcaccctgaaagctcaaacagtggtatgccgcctgatgcacgccgggtgctggttagcttgctgcgtcagggcgttatattgtcttcgcagaaagccaagttgtttgaatcgctttgtcgataccaatgtgctgtacgcaaacatctgtcagaagtctatttgaagctggttttagatgagaaagcgggtgtcgcctttatagccggctttcaaaatgaggaagatactgaatcattgggcatagatggtgaagaggttgtctctctgattagccgaaggacgctctctttatacgatacgttgttgctgttagtgctgcgcaaacactaccaagatcgggaaacatccggcgagcaaaggattatcattgatatcgagcgtatagaatcccatctgacaccgtttttaccgctgacaaacagtactaaatctgatcggagaaaactcaagggtgctcttgagaaaatggtgacgaaaaaaatattgagttcggtgcggggaagtgaggatcgcttcgagattacaccggtgatccgttacgtagttagtgctgaatttctcgagaatatgctgaatgaatacctgaaaatggcgggcgagaagggtattgagctaaataaaaacggcagcaacgctgttgattatcaagacgaagaggaggaaacaggagatgaaaatgactga

SEQ ID NO: 46096 - DNA, 3399 bp, Photorhabdus temperata subsp. thracensis
atgactgatcaaactctttcggctgattcattatttcatgttggtcaaatcagattagccgaactttcagtttataattgggggtcatttaacggcttgcataccgcgttgatcgatcctatgggaactttggtcactggggataacggcgcgggaaaatcgacgtttattgatggtcttatggctttgctccttcctgccggaaaggcaacctttaatgtggctgcggcgcagggtgatcgttctgaccggactttactttcttatatgcggggaagttttggatctgctcatgatggagcgggtacgagagtcagaagtaagcgtgaatctggcgtggtgactgggcttagagcgttatatcagggtgatgatggttcaaaaatcacacttgcggcacttttctggatcactaaatcgacgaatgtgctggcggacgtgacgcgagtttatgttgtcgctaagagagacctgactcttaaggaaatgcttgatgcctttggggatggtaatgcccgatcattcaagcaatggctccgtgatgacccggcaatgacatgctgtgatgataatttttccgattatcaggagttgtaccgaaagcttctgtatatggacaataagaatgcgcctgcactgttgtcgcgggcgttgggcctgaaaaaaattgatgatttaaccgggttgattcgtgaattggtacttgaaccgagtacagtcaaagatgatgccaaaaaggtagtggaagagtttgctgatctggtggcgattcatagtcaattagtggatgcaagagcacaacaggtgcacttatccaggttacccgaactcagctcaattatcgaaaaaacgacgaaagaatttgaggcgctaacggtcgaaagaaatagtcttccggtctactttggggaaatcttcgcacaattgtggagtgagaaaattgccgatattgaggctgaacttgaagcactatccctcaaaattaagcaagctgaagggcagaaagtcgatgcggataagctggttgaacgaagacatgaggaatatcttcagtttggcggggataaaatagaatcgcttcgaaaagagatgggtcatacccaagatcaattgaatcgggtggtcaggaactcatcacaatatcaaactcatgccaacgagctggctcttccttctgtattagaggaggctgtatttctcaaaaatcaatccgaagcatcagccaggcttgccagtattcagcgagacgaagaggagtatcaggacaggtttgccaccatcagtgccaaattcagtgagttgcaagcaaatatccatgatatctctcaggaaattcgggaaattgaggcaaggccggattctaatattgatgtgaaatatcagcaattgcgggatgagctggttaattccttagaattaagtaaagaccaatgtgtatttatcggtgagcttatcgacgtcgaagatcatgaaaagatatggcaaggcgcgatagagagggcgttaggcgggttacgaacaacactggctgtgccacatcattgttattcgatggtgactcgctggttaaacgcccggcatacgggtttacatgtacgtgttcaagttgtgaataatgctgagactaaccagggtcaatcggcggagtttaagcctgatggttatttaaggaagctggtatggcgcactcacccttatcgggagtggctcaagcgtcacttgcagagatttgacctgcaatgtgtttcgaatacggaagaattggatcaaaccccgttttcgatgacacaacaggggttaatgcacatggataaggggcgctttgagaaaaaagatcagcaccggatagatgatagaagacgctggtgtctgggcttttcaaacaaatcacgtttagccattcttaataacgataaaaaagatttaggtttgaaactggaggaaaccggaaaaaaggtgagccaggcccgtcaggatttgaatgctgtttctgatcgtaaaatactttgggagaagctccaaagttaccgttgggatgatattaatgctccttactggcacgaaaagttttctgatttgcagactgaccttaaggtgttagaacagtcaggcggtgatcttgataaggccagagaacgttgggaattggctaaagagcaattggctcaaattcaatcggcattaaatcaactcaactctgattctggtggcgttaaaaatacgctgagaaatgcacaagaagaatggaataaagcgcgggcaaaagcggagaaaggattacctgattcagccaggcagttacttgcgattcgggtaggcgtgcttaatacaaacgatttaagccggatggctgaattggtgtcgaaagttgaagaagagttggatcgtctattagattctaggcggaacaataaagacagagcggaaagatcagccatcagcattatggtttcgttcaggtctaatgataaatggcaagtcttcacggttgactggcaaagtgatattggcagcttacctgattatcttaatcatttacgacaactggaagaggaagggcttcccaaccttgtggagcagtttattgaacgtttgaataagcatgcaacgcagtcgctggcgcggattaaaactaagcttgaatctgaacgggaagatatccttgagcggattgacattattaaccgggtcctcaagcgtacagagtttcgatcaggtacacatttaaagctgggttcaaagagggagaaattcccgcatgttaatgagtttgaacagcatctgcgtaaggtgcttagtcaggtaaccagtgatgaccatgaagcacggttccgtcagttggctaaggtagttgagatccttgggaaagcaagtgcgccaggttcttcaaatacattggaaagtttaaggctgcttgatccccgttatcagatgtcattttatgccgaagaattggatatcaatacgggtgagattcgtgatgtattggagtcatccagtggaaagtccggtggggaaaaagagtcttttgcggcaactattgtcgcagcaagtttggcctatgttttgacgcctaatggctatgatcgacccgtctactgtactgttttcctggatgaagcgttctcgaatacggccgaaacagtaagtcggcgtgtgcttagggtgtttagggaactgcatattcacgttaatttgattacaccttataaaaacctgaatttggcgagagaatcggcccgctcgttgctcattgcggaaagagatcaggaaaaccacgacagccatttatgtgaagtcacctgggaagaaattgaccggagaatgggggaagagaaggagaaaaagttagcagctgaggcttctggtttaggtatcgaacttgagaaactgatatga

SEQ ID NO: 46097 - DNA, 1197 bp, Photorhabdus temperata subsp. thracensis
atgaaaagagagctgaatggggggcgctgggggttattaccggcgcaggttaagaatctcattaggcaacgtgagtgggataatctttcctcactaagggctcgattactgggcagcagagcattccctgttcgcgttggtttaaaaccccctagaggcagttctgccatatcagatatggttcattttcagcggtttgttgatgagtggaaatcatttccctatcaagaccatgtggagtggtcttctaaaaatttccgggagttgtctgagcagcgaatcccggcttttgttgttattgaatcgatgcaacatttgattcaatttttagggaatgatgccctttcccgaagtaaggtatgggaaagaaatatgaagccattcttgcggattgataaagatctctatcctgcattggttaaatgtatagatattgtggaaaaactctctctgaaagatgcggaattattggcaaagctgctcccacaattaaagcaaggtttgggggaaggacaatatttaagagcattacccctcattggtattgatactaagtttcttgagaaccaccaaatcctgatagaagagctgaccgatgtgattcacaaaggtgccgtttcagcatttggtggtcttactgcttggttgggttgtttaacaaatcccaagggctggttaactatcagaccgctttgccatactgcgatggccgcgcttggtggaattccgatacttcaaataccgggtgaattacttaaacagcacgaacttccggcatcgaatatattagtcgtcgaaaacttacagtctggtttggcgttgcccgacatgcctgacacgatagcggtgataggaggagggaaaaacattgcctggatggatgcggcatggttaaaaggcaagcgtgtagggtattggggagatattgatacctggggcttgtcgattctcagtgacgccagagacaagtttgtggatattgaatccctgatgatggatgttgaaaccgttaaagttcatgaagatagaatggttcctgaaccaaatccagttgaatccagtccttcatcgctaaatgaagatgaagcaaggttgtttaatgatctcatctctggccggttccactcttcacgtttagagcaggagcgtctttcatctgattacattagaagcaaacttatagattggctgtcctaa

SEQ ID NO: 46098 - DNA, 1470 bp, Xanthomonas pisi DSM 18956
atgaagcaccaggcacgtatcgccggctatcgccaattgcgcgagcagccggtctggaaactgctggccgccgaccacgcgccggagctgatcggcctgctgcagacggtgttgctggacggcgaacgccgcctgccctcggccgtgttgcacgagcgcctgcagcgccagctcgacgcgctgcgcgccgacgaactctcgcgcgagctgccgcgcaccgcgcaggcctatctggcgcattggctggcgcagggctggctggaacgccgcctgcccgagggcgcggccgaagaagaatacgagttgtcgcgcgcggccacccaggccatccgcttcatcgtcggcctgcgcgagagcagcagcagcgccaccgaaagccgcctgtcgctggtgatccagcagctggtgcagctggcgggccagaccgaagtcgatccggagctgcgtctggccgccctgcgcgaagaacgcgcacgcatcgatgccgagatcgaacgcgtggcctccggccgcgtggccgcgctcgatggcaagcgtgcgctggagcgcgcccgcgacctgatccatctctccgacgagctggccgaagatttccatcgcgtgcgcgacgatttcgaacagctcaaccgccagttccgcgaacgcatcatcgacgacgaaggcgcacgcggcgatgtgctggagcagctgttcaacggcgtggacgtgatcgccgacagcgaggccgggcgcaccttcgaggcgttctggagcctgctcaacgacacccagcaaagcagccagctcgatcaggcgctggatgcgctgctggcacgcggcttcgcgcgcaagctcgaccggcgcgaacgcgccttcctgcgcggcttgaccggcacgctgctggagcgcggcggcgaggtgcacacggtgatgcagcacttcgcccgcagcctgcgcggtttcgtgcagagccgcggctatctggagcagcgccggctcaatcaactgctcaagcaggcgcagggcgaggccttgcagctgcgcgacagcctgcatgccaccgctgccaccggttacacccaggcgttgagcgctgcccgcctgcggtcgctgtcgcaatggcgcctgcacgacccgcgcctgacccaggtcgatggccgcgtgcaggccgccgatgcggcagacatctcgctcgacagcgtgggcgatctggtcgcgcaatcggagatcgacgtgcgcagcctgcgccgcgacctgcacgagctgctcggccagcgcccgcgcctgaccatcggcgatgcgctgcagcagcgcccggccgcgcagggcctgggcagcgtgatcggttacctgtcgctgggcacgcgccacggcgtggtgatcgacggacagatggaaacggtgcaatgggaaggcggcgacggcgccctgcggcgcgcacgcattccgctggtgtggttcacccgggagaaacgcaatgaactggactga

SEQ ID NO: 46099 - DNA, 702 bp, Xanthomonas pisi DSM 18956
atgaactggactgaggacacccgcctggatgcggacgaggacagcggcgcgtcggccgatgccggccgcacgccgctgacggagacatcgcctgcacagccgcgcggcgaactgttcctgggcgacaccggcacgctgccgttcgacgcgcggcgcgcgctgtgccagctgctggccggccccagtatcgacgcgcaacgccacggtgcgttatggcctgcgctgctgcgcaacgaggcggcgatccgccaggtgttgtgcgagctgttcctggagctggtgctggaccgcgagggcggggtggccttcacccgtcaggccgacaccgccgagctggaatcgccgaccctgctgcgcagcgccccgctgacctttatcgagtcggtgctgctgctgttcctgcgccagcaactggccgaagccgatacgcgcggcgagcgggcggtggtggacgaggcgcagttggtggaggccttgtcggtctacgagaagaacgtgtccaccgaccgcgccggattcgcgcgacgggtgctgacggcgatcggcaagatgcgcgagaaccagttgctgtcgcggctgcgcggtagcgaggagcgctacgaggtctcgccggtgctgaagttgctgttctcggccgaagacgtgcaggccctggtggtggcgtatcgcggcttgcgcgagggagacgttgcgctcgactaa

SEQ ID NO: 46100 - DNA, 4038 bp, Xanthomonas pisi DSM 18956
atgaattcccagtccaacctgtcgccggcgcagccgggcgcgtccctgttcactgattcgcttgccgagcagcgcgcgcagcagttccgcatgcggcgcttgcaggtgcacaactggggcacgttcaacgacttgaccgaggtgccgatcgccgagaagggcttcctgttcgtcgggcgctccgggtcgggcaagtcgaccttgctggatgcgatgtcggcactgctgactccacccagcatcgtcgacttcaacgccgccgcacgcgaggccgagcgcagcgggcgcgatcgcagcctggtgtcgtatgtgcgtggtgcctgggccgatcagcaggacagcgcgtcgggcgagatcgccacgcaatacctgcgcaagggcgccacctggtcggcactggtgctggaataccgcaatgcgcacggcgaggcggtcagcctgattcgcctgttctggatcgccggcagcggcaatgccgcggccgatgtgcgccgccattacatggtcgcgccgcgcagcttcgatgtggccagcgagctggacggcttcgatctggatctgcgcaggctcaaggcgcgtcttggcgaggagatcgcgcatttcgacggctttgccggctacgcagagcgcttccggcatgtgctgggcatcggcaacgaaatggcgttgcgattgctgcacaagacccagtcggccaagaacctgggcgatctcaatgtgttcctgcgcggcttcatgctggacgagccgcgcacgttcgaggcggccgaccggctggtggaagacttcgccgaactcgacggcgcacaccatgcagtggtcaccgcacgccggcaggtggaaacgctgagcccggcacgcgagcaccatgcggcgctgatggccctgcgccacagcgtcggcgagttgcgcgagctgcagctgggcgtggacagctaccgcgaacagcagcgtctggccttgctggagacgcgcctgcacgaactcgacagccaggaccgcgggctggccggcgaagaaggccagcggcgtgagtcgctggacaatcacgaacagaaactcgccgggctggaacgcgaacaacgcgccgccggtggcgaacagatcgaggaactcgaacgcgagcgcgcccgggtcgagcgcgagcgcgacgaacgcctgcggcgtcgcgtgcagatcgaacaggcttgccgccagctcggtacggccctggccgcaggcgccagcggctttgccgagcagatcgcgtacgcgcagaccgtgctcgagaacggcaagcacgacgccagcgcgctggatgaggcgatcgccgagcgcatgggcgcgcgccgcgacgacgagcggcgctttgccgagatccgcgccgaactggatgcgttgaagcgcgccccgtcgagcatgccggcaccgatgcaggccttgcgcgcgcgcctgtgcgaggacaccggcattgccgaagcagcgctgccgttcgtcggcgaactggtgcaggtgcgcgaggatcagtcagcctggcgcggtgcgatcgagcgcgtgctgagcggttttgcgcagtcgctgctggtggacgaccgccattacgcgcaggtcagcgagtgggtcaaccgcacccagctcggcacgcggctggtgtatttccgggtacgccgcaacgatgcgctgcatgcgcgcacgccggatgcgcgtgcactgccgggcaagctgcagctgcgcgatcatgcctttaccgagtggttgcgcaacgagttgatgcgtcgcttcgattacgaatgcgtcgataacgccgccgcgctgcgcaatgccgaccgcgccatcacccgcgaagggcaggtcaagcatcccggcgaccgttacgaaaaggacgaccgccatgcggtcaacgaccgcaagcgctggctgctgggtcacgacaaccgcgacaagctcaaggtgttcgagcgcgaagcgcagacgcttgcccagcgtatcgccggttgcgatgccgacgtggccgcgctgcgcaagcaacgcgagcaggaccaggaacggcagctggccgcgcacaccctggtggagcgcgactgggacgagatcgatgtcggccccaagctgcagcgcctgagcgatatcgacgaacagctgcagcagctgcgcgaaggcaacagcggcctgcgcgcgctcggccaggcgatcgagaccgcacgtaccttgcgcgaccaggccaagcgcacctacgaggaggtgcggctggagcgcgcgcaactggcacgcgagcgggtccggctcgaacagcagcacgccgcctgtgccgggcgtgccggcaccgctgcgctcacgcctacccagctgcagggcctgcgcgaacgcctggcggcgctggcaccgctgtcgctggacaacctggaggcgcatttccgcgtggtcgagcgtggcctggccgagcaactggccgaaagccagggccgcgacagccggctcagcgcgcagctgctcgattgcttccgcaagtactgccagcaatggccggaagacagcggcgatttcaccgtgagcctggccagtgccgacgattttctcgcgcgcctggatcggctggagagcgatggcctgccgcgccacgagcaccgtttcttcgatctgctgcagacccagagcaagaacaatctgctggccctgcagcgccacaccgccgaggcccacaagggcatcaagcagcgcatggacgaggtcaacgccagcctggagcaggtgccgttcaatcgcggcacgctgctgaccatcgaggtcagcgaccgtcgcctgggcgaggtgcaggaattccagcaacagttgcgtgcggtgctgtcgcatcaacagaccgaagaccgcgcgctggccgaagcgcagttttccaccttgcgcgaactggtggcacgcctgggcgcgcaggaaccggacgcacgccgctggcgcgagcaggtgctggacgtgcgcctgcatgtggaattcatcggtgtcgagctggatgcgcagacccgcgcgcaggtggagatctaccgcagcggcgccggcaaatccggcggtcagcgccagaagctggcgaccacctgcctggccgcggcattgcgctatcagctcggcggcgaagacggcgagctgccgcgctactgcgcggtggtgctggacgaagccttcgacaaggccgacaacgagttcaccgcgctggcaatgaacatcttcgagaatttcggtttccagatggtggtggccacgccgctgaaatcggtgatgacgctggagccgttcatcggcggtgcctgctttgtggaaatcagcggccggcacaactccggcgtgctgctgatcgaatacgacgagcaggcgcagcgactcaagttgcccgagcgctcgcgtgcggacgaggcgggtcctgcaattgcggagcagcctgcgagcgtgacgcagcgcgaggctgcaccggattgggcgcaggcccggacgcgtgcggacagcaccggtgctgtctctggcgctgagggtgcggcacctcaacgcgaccctgcacaggacgaggcgacggccaaggcgagcaggggtgccggcaaggttgcgtctgcatcggcgcaggctgttcaaaccgcgccgaagccatcaaaaacagccgctgccagcgcaggtgcgggatcaggcaagtcggaatcagcgaagaccgcagcgggcagggccgcatccgccaaacctgcctcggccaggcgtgcatcgcctgcagcgggcacagcacgcaatccggcaacgccgaccaaatccgccaggacgccggcaaacacccggacgccatccgggcgtaccgcctccgtcaagccgattgccaagccaaagaacgccgcgactacagctgcagcaccgaaaaagcctgccgacaagccgacggtggcgagcctacgcgccaccgcatcgctacgtggtgcagccgcaaccaaggcaaccgcggcgcgtggcgcggccaagcctgcgtcagtggccaaggcgcgtaccgcctcgacgcgcgggtctgcaggcaagccgcgcgcaaagcgctga

SEQ ID NO: 46101 - DNA, 1461 bp, Xanthomonas hyacinthi DSM 19077
atgcgcttcgattacgccagcatggatatgctccgccagcaccatccggcatggcggctattgcgcgccgaccacgcggcgctggtagctagcttcctgtatcgggccttcgtggcaccgaatgtacgcaatgttgcccagggcgacctggtggaagccctcgaggatgagctgttcggtctacgtgagcagctgggcaacgacgcgttcccaaggacggccctgcagtatctcgacgactgggcggccaatgacaagggctggctgcgcaagttctacgggcctgattccgacgaaccgcagttcgacctgacccccgcggccgaaaaggcgatcctctggctcagcacattgggcgaacgcggcttcgtcgctaccgaatcgcgcctgctgaccctgttcgaattgctgcgccagatcagcgagggcacccagaccgatccggcggcgcgggtagcggaactgcagcggcggcgcgccgagatcgacgctgagatcagccaggttctgggtggatctccaccactgctggacgatacggcggtgcgcgatcgcttccagcagttcctgcagctggcgcgcgagctgctcggcgatttccgcgaagtcgagcacaacttccgccagctcgaccggcgggtccgcgagcgcatcgcgctctgggaaggcggcaagggggcgctgctggaagatgtcatgggcgaacgcgatgccatcgccgagtccgaccagggtcgcagcttccgtgcgttctgggacttcctcatgtccagccgccgacaggaagagctgtccgagctgctagaacgggttctgaccttgccggcggtgaacgagcagcaaccggacatgcggttgcggcgcgtgcactacgactggctggaagccggcgaacacacacagcgcaccgtggccgaactcagccgtcagctgcgccgctttctcgacgaccaagcctggctggagaatcgccgcatcatggacctgctgcattcgatcgaagcccatgccctggcactgcgcgacgcaccgcctgccgacgtgaccatgcacatcgacggcaccgctgcctcagttgaactgccgatggagcggccgctgtacacggccgccctgcaacccaagatcgtggacgtggtgctggaagccgacggcaccgacgtggacgatgccgcgctgtatgcgcaggtcttcgtcgacaaggcccggctggtccgccacatccgccacgcattgcacgggcgcagccagatcacgctggccgaactggttcggatgcagccaatgcagcaagggctggccgagctggtcgcctatttgcaactggccgacgatggctttcggagcacagtcgacgagcacgcgtacgatccggtggactgggaaggtctagatgccgggggcaacccctaccatcgccaggcccgcttgccgcgggtgatcttcctgggggccgcatga

SEQ ID NO: 46102 - DNA, 645 bp, Xanthomonas hyacinthi DSM 19077
atgatggacaacccgtccgcctcgcctgccgtagacggtttgcccgtgctggcggtgaagctgctcaagggtgtgctctaccaggaatccgatccgcagctatggggcagcttgctcggattgcagtcgcaggtacgcgactacctctccgtgctggggctggagctgattctggacgaagccgagggctacgccttcttgcggtcgcggcgtgcgcccgaggccgatgatggcgttgccgacccgactccaagactggtggcgcgccggcagctgtcgtttcccgtcagcctgctgctcgccttgctgcgccgcaaattggccgaagccgacgccagtggcggcgatacccggctcgtgctcacgctcgaggacatcgtcgagatggtgcgggtgttcctgcccccctcgagcaacgaggcgcgggtactcgaccagctcgaagcccatctgggcaagatcgtagagcttggcttcctgcgccgcatgaagccagccgcgggacaggttggctcgcaacctgcgttgtatgaggtacgccgcatcctcaaggcattcgtggatgcgcagtggctggcggacttcgatgcgcgcctggccgcgtatcgggcgcaaataggggggatcgaggatgaaccgggttga

SEQ ID NO: 46103 - DNA, 1176 bp, Xanthomonas hyacinthi DSM 19077
atgagctggacacggccggtagacctggtcgcacaggttggcaaggcttgggacagcggcacgctgctggccctcctggccggcggcaaatcaccgttcccgatgcggttgaggttgcgcggtcccacctcggccgacctggtcgatcgttttgacgacgtgcgggtctgggttgccgagctgcaggcactgccgcacattcgcatcgagacgcgccagttccgccaccgcgtgcgcggcaataccactcttcccaacgaagcctgggtcgatacgttggacgatgcgctcgcgttgatcgaccgcaggaatgaggttgccaccttcgatgcgcaggtccagcagacccgcgaccgtcagcccagtttactcggctggctgcataaatggccgttgcgggcgttggccctaggtgcgtactggccacgcttgctggacgtcgtcgattggatgcaggcgcacccgcgtcccggcctctacctgcggcaggtcgatattcccggtgtgcacagcaagttcatcgagcgccatctcggcgtgctgagcgagctgctcgatgccgtccttccggaaagtgccatcgacaccgcggctagtggtgtcggcggattcaaccgccggtacggtttcgctgctaagcccgagcgcgtgcgctttcgggtcctcgacccggcgctttcgctgctgcctggtgtgactggaggagatgtcaccctagacgtgggcagcttccgcgccctgcgctgcaacctcacgcgcgtgttcatcaccgagaacgaaaccaacttcctggcctttcctgcagtgacgggaagcctggtgctgttcggcgccggctatggtttcgatacgttggacggaaacgactggctccggcaaggccagctgtactactggggcgacatcgatacccacggctttgccatccttgatcagctgcgcgcccgccttcctgaagtgcagggttttctgatggaccgggctacgctgatggcatgcgagccgttctggggtcgagaggaacatcaactgacacgcgacttgccgcggctgcgcgatgaggagtacagcctgtacgacgatctgcgcgatcaacgcattcgcgacaatctgcggctggagcaggagttcatcggtttcgaccgcgtgcatagagcactggaggcgctatgttga

SEQ ID NO: 46104 - DNA, 1497 bp, Bifidobacterium adolescentis
atggaacggctccggcccgtgtatgagaccggggtgctgcgattgctgctgcgcggcaattccatgctgtacgtcgcgctgctgcgctccacgttcgacccgctcaccggcgagctgccacgcgagatcgtcgaggaacggttctcccgcagtctgacccgacttgcggaaacgggcgattacacgcccaaggaagggcagacgtccgcggaagccgcgcacacgatcctgcagcagctgacgaaggaaggcgaaggcgactatgcctggctcgccaattcgctcgacgtcgcagcccaccgctacctgtaccgtctcacggcgcgcgcccaccgtgcgatcgaggcgctcgaccggctcgaggacaccacgaaagcgctgtccggcgcgcaggccaacagcatcatcatggagatcgagcatgcgcgcatgcagctgaccgccgacccccgcgaacgcatccgcctgctcgaacgcgacatcgaggagcggcaaaagcagatcgacgaattgaagcacagcgacacgttggacaagctcacctcgcagcaggtgggcgacatcatcggcgtcatccacaacacgctgcgcggcgtgccgatcgacctgcgcgaactggcgctcgaggaacgcgacaacggcgacaatctgcgccgaagcatgcagtcgggctccatcagcgtggagcaggcgctcggcacctaccatgacgaataccacagggcgttccacgaatccgacagcggccggcgtttcgaggacgcgttccaggtgatcgtcactgacgagggacgccgcgaaatcgacgaggcggtgcgagacatcgcccagaacccgtatctcgagggcgagcccggcatcctgctcgcccaggtacgcgccgaactcaaacgcatctacgagggcatcgaggacgtgcgccggcagatccgcatatccgacgaggcggtgagccgtctggtgcgccagcagaccgacacgcattaccgcaccatgctcgacaagctccatagactgttcgtgcgggccagcgacgacgcgaagacgcaccccggctcggacgaacgcccataccgtacggacaccggcacggcgcaattccaggcattgccgtccaggcccgcgaaatcgatggcgcgcgcggccacggccggattggacgacgcgccttcgacgaacgtcgacgcgccggacctgaaggccatggtcgagatgtgcggcccgcggctgacgcacatgatcggactcatcaggcgcgatccggtcaaaacggcggacggcaggttcgtggatttcgcggcgagcttcaaccggctgccccgggaggaacggcgcgaaagcgagctgatcggcttcctaagcgccctacgcacgcaggacggaccggcaaccgtggcatggcattgcgtatccatcgacggaggcgagcgcgtgtggcgcaccaggccgatcctcaccaccgaggcggcgcttgacgagatcatcgaggagggatga

SEQ ID NO: 46105 - DNA, 846 bp, Bifidobacterium adolescentis
atgagcatgacggacaacaccgacggattcgacactggcatcggcatcgaagaggagacaggcccgaaatccggcatgccgtccgaagggccggatatgacgagggacaggccggcattgttcgacggggatacgggagacatgcctcttgaggcgcgtatggccgcgatcgcgctgaaacgcgaacgctacatcgacggcagcctgtacgacagggcgtgccagtaccgtgaggccgtggaacggtcgttgaacaacgacatgctcagactggtcgacaacacgaaataccggatcatgtacgcgtcgccggtcacggacgcggagacgaacatccgctcgttgaagacgcgtgtgagcctcacccgcgaggaggccgccacgctcgcggccttgcgcatcaaggtgctggagtacgagaaccagaagacgaagccgggcgactggctcatcagcttcgacgacatccgcgcgctgctcgccacgggagcgggcttcctcacggccagcaacgacgaggagggcacggcgaagaagatcacgtccgtcatctcgcgcatgcgcacctacgggtatctcgcggaaacgggggacgagaacatgtacgtgctcacgccattggtgccgatggtgctcgaccagaagctcgccgaccggtggctcggctccgatgatacggacggcgatggtatgaaagacgcggatggcgatggttatgacgattcgtccatcggcgcggatggtggcgatacttccgattcgaccgggacggtttcatccggcgtcgagcaggacgcgttcgatttcgattcggccgatgacgcttttgatgggggggaacactga

SEQ ID NO: 46106 - DNA, 3459 bp, Bifidobacterium adolescentis
atggaagacggcatgaaaatcgtttccgaccgttggatgctgcaaagccggcagatcgtcaactggggctcctacggcggctaccacgtgttccgcccgtccatggacgatgcgatgccggtgaccctgctcgccggcgcgagcgaatcgggcaaatccacgctcgtcgacgcgcagatctcgctgctctacccatccggcaccccctacaataaggcgtcgaattcgggacgttcggaacgcaacgactacacgtacctgcgcggcatgatcggcatcagcgacggcgaaaacggtgagaccccgatcttcctgcgcggcagggacgcggacggcaccccgcagaacatctggggcgcgatcgtcgacacatacgcgaaccgcagcgacggcggactgttgtcctgcgcaaaattcctctacctgaccgcaggcgacgggccggacggactgcgccgccaatacgtcacctggaaccagaccatcgacccgcgcctcatggaccggcaccgcgacacgtcattcacgcgaggactgatggaacagacctacccaggatgcacgacgcacgtcaacgcgcaggcgttccacgcctccatctggcaggacatgggcctaagcgccgaagcatgcaggctcctgcacaagatccaatccgccgacgcgccctccaaactcgacgacatcttcaaacagggtgtgctcgacgtgcccgaatccatccggctcgcccgcgaaaccgtcgacgactacaaccggttcagcgagaacttccacagcatggaagacaaaatggaacgcgtcgccatcctgcaggacatacaagcccgctacggcgaatacgccaaacaagccagcgaacgccgcgaatacacgcccatcgaccccgaccgcgagcaaggcgagacgacgctcgccgcatggacatggtcgcgcatggccagcgaagtacgcgccggactgccatcggcgcaacgcaaagccaaggaatcccaggacgccatcgaccggtctcagcagcgcatcgacgaactcgacacgcaaatcgaagccgtcaaagaacgcatgaacggcatcgacggcggcagcctgcagcaactcggcaaggacttcgaacgcgcacgccaggacgccgacgaggcgcgcagacaacggcacgccatcgccgaacggttcgaacgcgtcgaaggcagactccccgccgacgagcagacatggaacgccaaacgcgccgcgctcgccttgtcgctcgacacgtacgacaagcgtttggaagacgcgcgatccgaataccagcgaatggtggtggaacgtcacgcccggcagggcgaacgcgacctgttgaggcaggattaccggcgcaagatcgaacacaggacgcgcatcagcgacgacatggaccatgcgcgcacgctcatcgcacgggcgacgggcttggacgagacggaactgccgtacgtggccgaactgatggacgtggacgagggggacgagcaatggcgtctggcgatggacgtcacgtacgcgcccatcgcgcagaccattctcgtggacaagcggcatgagcaggggttcgccgcgaaggtcagcgcgatcgatccgacgcgtatgacgcggcgtgcctggcgtttcgtcgataccgacgcgcaatacgattcggcctgcaacgaggggtggatgtcgtcgaagctgcggtacaaggaggattcgccgttcgtcggatggttgaaggagcagaccgcgtcgcaacggttcgacgcgcgttgcgtggaggcgatcgacgacatggaccgggccgaacggcaggtgcaggtcgacgggcagatcaaatccggcgaccgtggattccatggcgtcaaaggcctgcgtcaggtcatcggcttcgtgaacgaacggtatctggccgaattggaacgccagcttgacggggcggaacgggcgttggaggacgccgaccgccgcggcaggcagatggccaacgccatgactctgctgcaggacgagcatgagctcgcattgaccgtcgcggatctgccatggggcaagatcgacgtggacgggctcgagacgaaggcggaacggatccgtctgcagatcgaacggatcgaaagcgatccggaactggcacaattgcaggacgagttgaaacagctgctacggcagaaggacgacgagggcaagaacaggtaccgtgccgaagcggaattggaaaacgcgcagcatgccgtccatgccgaacaggcatggctcgacatgcatggcgactccgatttcgacgatgccgcattgtccgacatggtgtcgaatctgctggccgacacgtatgagacctgtttcgacacgtcgcgtccgcaggaacggccgcagcgcatcgccggcggtttcgaccgtgaggggacggcgccgttcgacgtgcgcgtgctgcgcagaatcggcaacaccgtgcgtgcgagactccagcagatcgacgagcgtgccgtccaattgcgcgccgacacggaacgcgccatgggcgactatctgaagcaccattccacggagggcgacaccgtcatggcgagcgtggaggactatccgtatttccttgacgagctcaagaacctcaacatgctcgtcacccgcgccgcgaccgacgaggagtatgcgaacagcgtcgaaaagctgtatatgagcttccaacagctcaaccgcgcgttcaacaccgacgaggagaacgtcagggagcagctcgaccgcatcaacggcatgctcaaaggccaacagttcggcccccgcggcggcaggctctcgctccacgtggacttccacccgatcgaccggcagttcaaatcctcgttgggccgcatcatgtcgaagctcgacgattggacacgcaacgcgcgcagcaatcccatggagacgcgcaaggcgttcgcaggctgcgaaacgttcatcggcaggctccaggcggaactcggccagatccgcgacacgaacggcatcaaggaatacggtgcgcgcaacctcgatccacgcgtgcgcagctcgttctacgcgatcgtgcaccataacgatctgcccgacgaacgcatcagctccaccggcggcaagtccggcggcgcgttgcaggaactcacctcgttcgtctacggcgcggccctgatctacctgttcggcggcgacctgaccagcaagcccacctacaccacactgttcctggacgaagccctcatcaaagccgacggacgctacacgaaacgcgccctgaccgtgctgccgcgcctcggcttccagatcatcgtatccgcgccggaaagcaaaaccgccgaaatcctcagcatcgcagacaaagcgtacgtggcatacaaggatcccgcaaccggcaactcgtacctgcaggagctcgaccgcgagccggcaacgcaagccgaaacacaagacgccaccgtcgagcagacgcaacccgcgacggaggcataa

SEQ ID NO: 46107 - DNA, 1200 bp, Bifidobacterium adolescentis
atccgccggaaactcgacgaatacgtcgacgcccacctcaccaggcacatgtacgacaccgacgaatcctggccgctgcgcaaaaccatccgactgcccaaacaagccgaactagagcagcactacaaccaaatccgcgcccaaaacgaaaccatccgcgactgggcgcggcaacaccactgcgaaaccagcgagaaaaccaaaatcgtctccagcggactcatccaacaaaaaagcccgctcatcgactccgtgaccatacccgacctcgacaccgccctccgcatcgccaccaaacaaacccgcgaacgctacctacgcgaacacgaccgcatgagcgcgctcgccaaagaattcggcctcgaaccagcgaacgccatgaacgtcgccaaaaccctcaaagaccacgacgacaccgacttccacctcgtcatccaagccgcccactacttcgcaaaccacgactgccacaccatgaccccacgcatggcgcccatcccaggattcagcgccaaatggctcggcacacccaactcccaacgccgcaaagcgatatgccagctcaccggacaagacaacctcaccttccaggaacgcccgaacgaactccgactacgcctcatggacgccgaacaccacgaccaacccgacctcatcgtcacccaaccatgggtccgcagccagccaaccgacatcgaacacgccatcatcatcgaaaacaaagacacctaccaggccatgcccaccgtcgaacacgccatctgcatcctcggcaacggatacgccgcaacatcacacatcacaacactcctgccatggctcaccaccatccccaacatcatctactggggcgacatggacgccaacggactcgacatcctctccaaactacgcgccaccggcatcccatgcacatccatactgatggacaccaccgcataccggacatacgaacaatacggcacccaattcgacgccaaaaacaaacccctcaccacacaaaccccacaacccacacccgggctcaccaccgaagaacgcaaactctacgaaacactctgcacaggaacagacatccaatacctacgcatcgaacaggaacgcatccccatacgcgacgccacaaccatcctgcacgaccaacaccactggccaatcgacatacccggcaacgacataccaaacaacaacaccaaatag

SEQ ID NO: 46108 - DNA, 1356 bp, Enterobacter aerogenes
atcccccttgaggaagcgattcagtctcttaccggcattcttgtcgagcacgtgagtcaggaacagtatgacattaatcaggacaatccgtctcttcaggccagccgtgaactgcgggaatggattaaacgccgtttaattgtcgaacgggatggccgtgtctttgctaccgatgcgcttgaggtcgcgattacgtttgttgagtcgctggataatcgtttcatgacctctacggcttcccgtttgtccaccgtacagcgagaaattgaaaacctggaaacccggcttaatcctaatccggcaaaccgggttacaaccttacgtcgtcgtattgccgaactagaacgtgaattacaggaagccgaagctgggcatattgaggtgctggaaacgcatcaggcggttgaacatattcgagaggtcttcaacttagcttccagcctgagggctgactttcgtcgtgttgaagactcctggcgcgaggccgaccgtgcgcttcggcaatccattattggtgagcaatatcatcgcggcgatatcgtagaacgcctgctcaacgatcaggacgcgctgcttaatactcccgagggaagagttttcgacagttttcagcagcaactccgtcaatcctctgaacttaaggcgatgagtgaacggctacgtgtgatccttagccatccgtctgcttccgatgcgcttaaccgtctacagcgtcacgatttgcgctggctggttaaacgcctggtagatgaatcgcaaaccgtactccaggctcgcgcccgaagcgagcgcgatgtccgcggttttatgaaaaccggtcttgctgctgagcaccaccgcgttggtcacctgcttaacgaatttctaaaccaggcgttaaaactcgactggcagcgccagattgttcgcaaacaagaggttccgcttcctgctgttggtgtggcggtaacaggcgtccccgcgattgaacgtttacgttttaaagaggtggatgatgaagcggaacaaacgttggatctcagtaatcatgcggcggatttaacgcagattggcgatgatttctgggatgctttcaatggcctcgatcgtgaggcgctgattcagcagacgttgcaggttctggcaaatgaaaatcgccccgttagtctggctgaactggcggcgctgttgcccccggctcacgatcttgaaaccttcgccatatggattggcatggcgagagaagcgggcattgcggttattgattcacagcgcgaatttgctgagcttagtgatggggaaggtcgccgctggcgatttaatctgcccactaccggtctggaaagccaggcattaatggatatcgattgggagtaa

SEQ ID NO: 46109 - DNA, 627 bp, Enterobacter aerogenes
atgcgaacgctgaaaaaaatacgcgaagcggctcaggaattgctcaaatacggcctgctggaagaggccagtaaacccaatctgtaccgcgttgtactggcccatccagaagaggttactcgcattctggaacctctcgatcttgatatcggcattgatgagatccgcggtttgctgtatgtcaaagtcaggcttgatgaaacgccagagcaggatgaatggtcccaccctctggtgagacggcaacggcttaacctggaacaatcattattagttgccatactgcgccagcattttgttgcctgggagcaggaaagtggaacaggcgccagccaggcgcagatcgctatcgacgatctcctccctcagctccagatttaccttggcgatccggggagtgaatcaaaagaacgcacccggttgcttaccctattggatcaattaaagggccatgggctggtcacgtcgccggatgcgcatgagcggatcgtgattcgcccgattattgctcatcttgccgatccgatgaatcttcaggcattactggcatggctacaggaccaagttgctcaacaaacctcccctgctgattcgtcagaaaaggagagtagtggggaggaagtatga

SEQ ID NO: 46110 - DNA, 2922 bp, Enterobacter aerogenes
ctgggagctctgctgtggtttgattccaccagctccagcgtgacggatatgaaaaggctttggcttttcagcgataaccccgagcagacgctggagcactggttgaacgtttaccatgacggcggcacacgattgctgcggcaaatggaaaaagaagtgaccgggatctggacatacccgaataaaaaacagtatctggcgcgcctgcgggattttttcgaagtaggggaaaacgcgtttacattgctaaatcgggcggcagggttaaaacagctaaacagcattgatgagatttttcgtgagctggtgttggacgatcactccgccttcgatcgcgcgacggaagtggccgatagttttgatggtctgacagaaatccatcaggaactggaaacggcgcgcaaacagcagcagtcattgcaacctgttgccctgagttgggataagtaccagaagcaagagcgacaacttgctgaaaggaaagcgctggaatcgctattgcccatctggtttgcacaacaggcaagccagctctggagggaaaaggtcagccatcttgaaatcgagtttggtgaggcacagattcgcgaagaacagatccagtcgcagcttgagttgcaaaaaaaggttgtggctgactgcatgcagcactactaccaggctggcggcgccaatattgatgaactgaacgagcgcatcaatgactggcaaaaaacgctcggtagacgagaagcgctggcgcgccagtatcaacagctgatccataatctggggttgccgcctgacctgagtcagcaacagctagaggcgaatcagcatgaagccgaagcccgctgtgtgcagcttgctgatgatataaagctgaagcaggaagaggcttatcaaaaaggcgcgctaagccataacattactgtagaactgcgcgaacgggaaactgaacgcgccgagatcgcacgtcgtccggattctaacctgcccgcccattatcaggcatttcgcagcgaactggcgaaagcgttgaacgttggtgagtctgaactgcctttcgtcgctgaactgatacaggttaaaccggaagaggcgcaatggcgcggagcgattgagcgcgctgtcgggagtaacaggctgcgtattctggttgcgcctgaatctgcacaggaagcgctacgctgggtaaaccagcgcaacaatcgtctgcacgtgcgcctattggaggtcaagttaccgcactctcccgccaggttttttgatgatggttttacccgcaagctgttgtggaaagatcatccgtggcgagaggccgtcaaagcattactggccgaaagcgacaggcattgtgttgacagccctgaacagttgcgtaacacacctcacgctatgacggtgcaggggctaatgtctggtaaacagcgtttttatgacaaacaggatcagaaacgccttgatgaagactggctgacgggattcgataaccgcgatcgtctgaactttcttgccagagaagttgccgcgcttcaggagcagactaaaaccgcaaacgcggcatttgaggttgcgaaaggcgaggtggcgcttttgcaaaatcaggccatttcattccagaaaatacaacagattgattacgatagcattgatgttcccggcgcaaagagccaactggaagcgctcaaggagcggctggagaatctgatccatcctgattccgatgccagcgtggcgaaagcaaaacttgatgaggctcaaacggttgagtctgaatttgataagcagctcagggccgccaataaagtcactaacgggctggatacagagctcacctccgccaaggccgcagaacgtaaggcccagcaaaccgcgcaacaaggtatgcaggatgaagagcgagagttgtgtaccttacattttccggcggtgactctggagcaactgcctgacattcgcgatctggaacgtcaccatgagcggggaattcagcaagaaattgagggtgttaaaggtgaactgcatcggctgagtattgagttgaccaaacgtatgtctgaagccaaacgtgtggataccggggcgctcgttgaggcaggggctgatttggacgatatttctgtttatttacagcgtttgcaggagctgaccgaagaagccctgccggaaaagctcaaccgctttcttgactatctgaaccgttcatctgacgacggcgtaacgcaattgctcagtcatattgaacatgaggtgttagtcattgaagagcgtctcaatgaactcaatgaaaccatgtttcgggtagattttcagccggatcgttacctgcgtctggatacgaaaaaagttgtccatgaaagcctgcgtacgcttgaaaaagcacagcgtcagcttaataccgcccggtttgttgatgataacggtgagagccattataaggccttacaggtgctggtggcgcaactgcgggatgcctgtgaacgaaaccgcaccctgggggcgaaggcgttgctggatccccgttttcgtctggagttcgccgtatcggtgatggatcgtcagagcggaaatgtgattgagtcgcgtactggctcgcagggcggtagcggtggagaaaaagagattattgcgtcttacgtgctgaccgcatcactgagctacgcgctatgtcctgcagggagtcgttatccgcttttcggcaccattgtccttgatgaagctttctcccgcagctctcatgccgtggcgggcaggattattgccgcgcttagagaattcggcttacatgccgtatttatcacccccaataaggaaatgcgcctgctgcgtgaccatacccgttcggcgattgtcgtccaccggcgcggtcaggattcaaatatggcttcgctgagctgggaagagcttgaacaacacttccgacgacgggagaacgcgtaa

SEQ ID NO: 46111 - DNA, 1158 bp, Enterobacter aerogenes
atgtattctcctgatgaactgcgtgaaaagcttgcccggcagtgggataacgcaaagctccgggccgagcgtttacttccacccggtaactggccgctttgtctgaccattggcaaaccttccgcgaaaatattcgcagagcagcctcagcgcgttttacaacatgtgcagttatggcggcaagtcgcggttgggcgtgtggactggggagaggtcagttatcgggcgagcgatggaccggtctcaatgccgctgcgctggatcctgaatggcccttctgactggatcagcgccgcggcggatcaggcggtgagccgggagtttcgcttgctggagggaattattgagcaggttgaccctatttttcatccgctgttggtcagtcatcgttcactctggcggcacaaaagcccacaggacatcatcagcgccgccaggctggcctgccgattagagcccggttgcgcaaaagggctgccgttaaggctgctttccgggcaaggggtggataccaaatttattgagaataatatttcattattaacccgactgctggacgtgcgtttttccggcgaagccagcgagcaggggttaactacctttcttgatgcttttgatgagtccagccactgggttttggttgtgccattatcgcccggattgctcccttttaaaaaatgccgggtgacaacggcggaactggcggaaacgacattgcccgcgtcgcgtgtgctggtgattgaaaatgaacagtgtctgcatcaacttccagcgttatctgacactatcgcgatcttagggtgtggccttgacgtgcaatggttatccagctctgttctggatgaaaaacgcgttgcctattggggggacatggatagctgggggctactgatgctggcgagagccaggcgctgttgcccgacgcttgatgttctgcttatgaaccgtgagttgtttgagcaatatgccagccatagcgccgttcctgaaccggtaaaagcgcagcaagcaatacctgatggcttgcttaatgaagaggccgatttttatcgttacttgacccgctcgccgcgtggtcgtctggagcaggaatttttgcctgcggggatagttgaagaggcattgctcagatgggcaaaatctgaggttcacatataa

SEQ ID NO: 46112 - DNA, 1476 bp, Mycobacterium senegalense
atgcctgaaccgggtatgagcggcccctcgctgaaccagctctaccagctcaatcgcgaggtcgccgactcgcgttcggcccggctgctggtgacgaacaacctggccacctacctcacgctgatggaacgccacctggaccgcggcgccaagctcaccgagatggaactcgtggttcgactcgaacgtgatctggccgacctgggcaccgaaaccgagcagtccggcctggcgctgatcaagtactgggccagccagggctggctgcatcggatcaccgagcagtccggcgataccgaacgcaacgtctgctacctcacctacgaggcgcgggccgtcctggatttcgcccgccgaatgcgtcgggaggacaccctcgccaccggcggctcgatcacgggcatcgcggctgggttgcgccgggtggcgggtcaggtcagcaacgatccggaacgcatccgggctgacatcgaagccgaaatcgccaagctccgcgacgaattggatgccctggaccaagggcagcgtcccgagccggacctggtggacgtcgaggacgaggcacgcgccatcgcgttgcagatggaacagatcatctccgacatcggccagtacggcagcatgctcaaccgcatcaccacccggctgctggatgcctccgccgacaccgatctcgggtaccgggagcggcagcgccagttgttcgacgactacgagtcactgttcgcctcccgtgagagcgcgtcgtacaccgccttcacccggatgattcaggaccccgagcagcgggcggcgttggtggccgacatcgacgcggtcacccgtgagctcccacatctggacccgggcctgcgtgaggtgatgacgggattcttcagcctggtgtcagcgcagaccgcagaggtcggccggacgcggcagcgttgcgcccgtcgtatcaaacgcttcgtcgcctccggaaccctggaacacagccgcggcgtcacccgccagctcaacgatgccttggccagtgcgcacgacctgctcagcgtctccctggccgacagccgcatcggtatcgaggtgccgttggtgcgcaccgacttcaattcgatcggtgctgtggcgttcaagatccgtgacgcgatcccgccgtcgcaggccgagccgtcggaaggtgaggtgaatctgtcggcgttctcggccctggcctcgcaggtggatgccgccgaactggctcagctggtcaacggtgccctcgctcgggggccgttgccgctgcccgatgcgatcggcatgctggactcggcctacctcgggcatgtgatcgtgctgtggtcctgggcgctcaagcaacaacctgctgacggaaccgaatccgggaattcggtgcgggtgcggttccggtcattggagggcgccgaccgcgaaatcgaaattccccgactggttttcaccgaaccgatccctactgtcagcgagagcctgctatga

SEQ ID NO: 46113 - DNA, 756 bp, Mycobacterium senegalense
atgaccgacaacccggacccgtcgcccgtcaaagacggggtgatcgatttcgacgccctgccgagcatcgacgccgtcgagcggtccaccgaccagcggcgtgcaccccgcttcgacggggatgtcagcgaactgcccgaccgcgcctgctgggccttgcagcacctgttgtcgcgccgctacatcagcaaggacaaccactccgagctgtggtcctgggtcacccgctaccgcgccgagctcaccgtccggttgtcggaactcgatatgcgactgtgcatctcggacgatcacgacatcgcctacgtcgagcaggccgactacgaatcgcattggcggcgccgcctgctgcggcgtgagaccctcaatacctacgactcgatcctggcgctgcacctggccaagctcatgcgcgccgcggcgcgcgacgagaacgtcttgatcagccgtgacgagatccacgagctgttcgccggggtgaacaacgacaccgatcgcgacaccgcctcgttcgacaagcggatcgacaacgcgatcgagcggctcaccgacatcgagatgctcgcgcgcaaccgggaggacgaggacagtttcaccatcagcccggtggtcaacgcgatcatgacggcatcgatgatcaccgaattgcagcagcagttcgagcagctcaagcgggccgcgaacggcactgtcgatgatcccgacgacctcgatgtatccgaccggctctccgacgatgtggacgctcatggctga

SEQ ID NO: 46114 - DNA, 3363 bp, Mycobacterium senegalense
atggctgaaccgaccaaccagttctctctgtcgcgcctgcaggtgatcaactggggcgtgttcgacgggtatcactcgatcccgttcagtccgcacggcaccctgatcaccggctcctcgggtagcggcaaatcctcactgctggatgcgatctcgctggctttcctgccgtcgcaccgccgcaacttcaacgcttcgggcgataccaccgcggcgggctcgggcaccggcaagcgcacggtggacaagtacgtccgcggcgcgtggggcgagcgccgcgaggggaccagccgccagatcatgtacctgcgcgggacgggtccggcctggtcggcggtcgcggtcacctacagcgatcgcaccgggcgctcggtcaccggtttggtactcaaatggcttgctgccgagaaaaattcggatccgggcagccgctactacctgatcgacgccgaccgtgacatcttcgggctgtgcaaccggtgggcggccaacgggtatgacgccgcggtgttccgcgatgacggttggaccggtgggcgcagtgagagccagtacctggcccagctgtactccagcatcggcatccgtgcctccgacgctgcccagcagctgctcggcaaggcgaaatccctcaaaagtgtcggcggcctggagcaattcgtccgggagttcatgctcgacgagccggccagcctcagcggcgtagaggaagcactcgaacagatcaacccgctggtcgaggcccgcggcttgctcgacgtggctcggcgtaagcgcaacaccctgggcaacatcgccgcggtgcaagcgcgttacgccgacgaggcggccaagttcggggtgatcgacaccatcgacaacgcgatgatccgcgattacgtcgaccatgtgcggctggcccaggcgggtccggaaatcgccaatctcgacgatcagatcacccaactcggcgcccagcgtgatgagttcggcacccagcagcgtcagctgaagaatgagcacaattccctcatggcccagatcaacacggtcaccgtggatctggtgccgctgcagcaacggctgaccgaggccgagcggatcagcgaggaggtgtcgcgccgacgcagcgcctacgaggacaaggtcacgtcgctgggcctgaccccgccggacaacggtgaggagttctggtcgctgcgtgagactttgatggaggaagccgaccggctgcaccgcgagctgttcaccggcaaccagccctacgtcgaggcctcggccaaggaagtccgggcccgcgaggcgcgggagagtgtggaggccgagctggaacgcgtgcagcggctgggctcgccgctgccgaagaccgagtacgagatgcgggcccgcatcgcccgtgccctcgacatctccgaacgcgatctggtgtacgtcgccgagttgatggagctcaagcccgacgagacgcggtggcggctggccgtcgaaaaggttttgcgcggtgcgggattgcgcctactggtgcccgatgcctacatggagcgagcgttgcgcttcgtcaacgagaacgacatgcgcggccggatccagttgcagcacgtccagcacggcgcgcaactgcgtacccccgccccgggcacgctggccaccaaacttcagctggccgacccgacacacgacagcgcggtggaggcactcaacgtggtcgccgctgtcggcgattacgtgtgtgtcgacgggcccggggagttcaccgagcaatcccgtgcggtcaccgaccagggtctgcgcaaagacagcggtcggctctcgatcaaggatgaccgctcgaggctgcgaccgtcggactacatcttcctcggcggcaccgccgccaaagtcgaagcgctgcaggatgatctggcggccgcgcacgatgtgtaccaggtggcccgtaccgcgcgtgagcggctcgacgaacaccgcggtcagctgcaatcgcgggagcgggcctgccgggcgctgtgcgatcagtacatgcagtggagcgacatcgacaccgattcggtcgatgagatgctcgagcggctgcaggacgaacacgatctgctggtctctgacaacccggacgccgaacggctgcaacagcgggccgacgaatgctgggagcgggtggagaaggtcatccagcagatcggctcgctcaacgaacgtgagaccgcgctggatcgccggcgcaccgcgttgctggagctgagcgaggccttgaccgagaggctcgggtccagtgagttcccgtcgcatgcccgcgacacgatcgacggatatgccgccgacatcgcgctaaccctggaattgctcgaacctgagccgtaccgaaacgagctgatccgggtcatcagccgggagcgagatcggctgcgggcggatcgcaaccgctcgcacgacgagttggccggcatcatggccgcctacgacagctcgttcccggatgcgatccccaacgacagcgatgtcttcgacgagcgggtgcacgactatgtggcgctgtgccgccggatcgacgagcgggaactgcccgacgcctatgagcggatgcagcggctgatcaccgagcaggcgccgggcgcgatcctgaacctgcacatgatcgccgacaacgaggcccggcggatcaccgagcagatcgcccgggtgaacacgggcctgggagcggtggagttcaaccgcggcacccggctgaccctgcacgccgggacccggcacctggcggcggtcgacgaactgaacgagaaggctcagcgcatctcggcgcgggtctcgctggtcagcttcggtgacgagaccgcgatgttcgagcagtacaccgacattctgcaattgcgaaagttgttggccggcaacacacccgaggatcgacagtggacccgcgacgcactcgatgtacgcaaccggttcgtgttgtactgcgaggagcgcgacgccgagaccggcgaggtgatccgcacctacagcaactccggtgacaactccggtggtgagcaggagaagctgatggcgttctgcctggccggcgcgttgagcttcaacctggccagcccggacagcaacgacacccggccgctgttcgcgcagctgatgctggacgaggcgttctccaagtcggatccgcagttcgcccagcaggcgctctcggcgttccgaaagttcggcttccagttggtgatcgtctctaccgtgcagaacagcacgacgatccagccctacatcgacaacgtggtgatggtgtccaagtccgacgcgtcggcgcctaacgcgcggccggtcgcctcggtcacctcggcatcgatctccgaattcgccgatctacgacggacttcgggggacgcggtaccgagcgcctga

SEQ ID NO: 46115 - DNA, 1407 bp, Vibrio alginolyticus; identical to SEQ ID NO: 42363

SEQ ID NO: 46116 - DNA, 651 bp, Vibrio alginolyticus
atggcaagtgaaattattcttcgagaacttaaagatatagaggtaaaaacctctgccgattacaccgacaatttgcggaaaacttcagcttatttaattcggaatcaatgggtttggaaagaaaagcgaggtcacaaagagcacttcaaacggtgcgaagataaccaaacgtacttccataaattgttcgatagcttagatatgacatggcactttgatcgtaattttggctatgcgggagtccttccacgaggtgttggtaaacgcctcgatgttacgaccacgattttcttactgattttacgcaagatgtatgacacggaagcatcgatgggacgtacagagcttgggcgagtaaaacctcctgcaacagaacttataaaccaatatgagttaataaaagggagtcgtccacaagttacagaaacctctcatgcactagaaaacttaaaacggaaaggtgtcattgagcttggggtgaaggatttggacaccaagttatttgaaataacggtactccctaacatcacgagagtagtaagtgctacttatttgggtctcttagacgagtttatggatagcttttctagcgacgaattaaaagacggctcagcagaatgtgacgaagcagtggaggtatcttatgactag

SEQ ID NO: 46117 - DNA, 2481 bp, Vibrio alginolyticus
gtgtttgcatggcagaattcagattcagccaatttaaacagagaagtggctgctgctgaaagagctgtccaatcatcccttaacaaagttatgacagccataaaatcatttcaaactactactctcgacatcaaatcatttcaatttcccgacacattcgatatacaaagctttgaactgtttgccacgcaatggaccgagtgcctaagtgatttagagcaaataaaggtacatgagttatcagcctctacgcccgatagtattgttttggtagcggataaactcatagcattaaaaccaacactgtctagtattggtagcttggttgagaaggctgataaggatgtcagcaaaactgtagagagattaaagactcacggaagttctattcagcaacgcattaagcgtttatctaagggactatcagatattaatcaatcaacagcactgacgattgatttgctaaaaagtgctggaatttcagtgacaccagtatgtgatgtttgtgaaattaatgataaagagtggcagccagcaattgagtcttatttaggagctaaccgagaagccttacttattgctcctaatgactttgaacgagcccttgaactatatgaaatcgcacagttgaaagatggaagaatcaaacgtgctcgtattatcaacccagatcatgcattaaagcaaagtagacttccgtcaataggtatggtgtcgaccttggttgagacctcagactctaccgctcgtggttttatgaatattctgctaaatcgcacgcgcattgccagaacacgtagcgatttacgaagagagacgaaggcgctgatggtttctggtcttgcaacgggtagcggtaccgttggtggaacgtctcatattgatgggctaatgataggtaagaatgctaaaactgagcagaaaatagcacttgaggcagagctgctcgaggtgacacagcgtttagtcaatgtaaatgcccctgcaatgatgttaagcagactaaaccagcaatgggcgaaacttttttcagccctcatgcaaggagctgaggatgcccagaatataaattcacaatatcgcattgaattagaccgactggagcaggctaaagagcagttgaagcctctatcatcagcagatgagcgattaaagttagcaaaagaagaagcggaaaaagcgtggagtgattgcaacaataatattagtcaagctgaaaatgatagagaaaatgcttctcttgaaatgactaaattgactgttgttattgaggagctatcaactaaacgtgaagaagcggaacagtttcgaactcaaattgagcagtcgttcttgcatgatactactaaagcagatcaacaatggcagaagatcgagaagcaatttgaaaatcaagaggatttgtactcgttgatccagaatgaagcgagtttacgagctcaagattttcgtgagaaagaaatacgtgcacggggtgcattgcgagaaaatactattgcctttactaattacttctctgaggacattgccaatcgacaagagctgttggaggctgcaaggccagataacagtaacgttgaagcctacttgtttattgaggcagattgtcgagattggattgaacgtattttgtccgttcaacttctgcaacaccagcaagctgctcaggcagcagcagaacaaatggagcagaattttagaggtattattgtcggagagttgcagagtcggtttgagcagatgaaatttacttttaatcagcttaaccgtttactcaaagaaattccattccacgacaatatttatagctttcactatagcgttgtagaatcagaaagtttaaataaagtatatgactacatcaccacagcagatcgtgaagaaactgagctcgtagggactatgtttgatttaccttctgagcatgaagccattgggttgctaaaaagtgcacttataaatggggatgatcttattaccgagataagagattatcgaaatttctttacttatgacatgaaaatgaaaaacaaagaaacaggtgaggaaaatcgcataagtaagatgcaaggtacggggtcaggtggtgagcaacaaactccagcatatatagcgctggctgctagctttatgaatgtctacaagataggtagtgaatcagggcaaggggcatcgttagttttacttgatgaggcattcaataatatggatgctggcaatgcgagcgccgctgtagcatttctcaaagagatcggtttacagctattaatagcagctcccccggaggttacgttaaagataggcaaagagatggatcagatctatacaatttgtcgtgagggaagagatgttgcaatcgatcatactaagatttttgagcgtggtcaggaacttattgatcaacgtaatccagtataccacccagagttgattactgagagagtcgctgaattgaaatcaaaggctacgtctgatgtttga

SEQ ID NO: 46118 - DNA, 1251 bp, Vibrio alginolyticus
atgtttgatatgagtcaaaacctagagaggctgctgacacagttgagcaagaagattgacctctcagaagaggtcaaatctggggtcactatacgtataaccgatcgagcgtataagtggtactttgctctaagcgacactaccaaagatgccttacatcgagagatggagaatcttgggtttgttcgcctccggtaccgaaaaaaggtgatgctcggagcatttaagcatattgaatccattcatgtggttgatggtggcgttttgcttgatagtttaggtattacgccaagaatgaagcttatatgtgatttgagcactcaacttgaaagtgtatctttccaagtgtcatggtgggaagaaacgcgtgacgagattattattgcgtggtcgcagagcaaaacttttcatggcatcaaacctgtacaaattgagctgattttggacgctatgaagttggtcgagatcatttcatcatcggtttctgtgtctctaccagatatgcgaactctaagtgttaaactctattacgactcaaagcggttggagaataaaacgcttgttaatcttgtttataagttgatgtcgccgcatttagaacctgacgttgctaagatgattgaaactggagaggagttgctagagcactgtggtatttgtaagtacccagtcccgatgcgttttaaagcgaaaggaacattgatctgccaaggcagaattgatttatcagctttgcaatacggtattggtgtttcaccggatgaggttttgggagttgagtgggtacaggatgtaccttatgttctttttattgaaaatagaactagctttgaacgatatgtccgagaagttgatgatgaagggcttgtcatttataccgcaggattccctcctagcgcatggatgagagccattaacctcctggtgaagaatctcataaaccatgtgccactgtatcattggggagatcgtgatgtcggaggatatagaatcttagcgtttttgaccaagtggcttaatgctgacatcaccccatatttgatgggtcttgacttggaaataggtctcaaacttgatgaagccaaaactacaagacctgtctctgaacttattctcgctttggagtctgctagagattacccatccatatcagtgctttatgacaagcttgtagcattgaatcaaagtgaactgacttggatagagcaagagcaaatccctccgaggagcccagttactttattgcgataa

SEQ ID NO: 46119 - DNA, 1461 bp, Arthrobacter sp. YC-RL1
atgcagccctcgcaccgcgcgaatagcctgtggatccagtcccagcagttcagaagctcggcggcgtaccggctcttaacggcccagccctgggcggtcgccttcatccgcgccgagttcaccgcggaccgcccgcgcatcgcgctggaactgttccacgcttcgctggattccttcctgaaaaccgcccgcacgagcgacgagcagatcccgcagacctacagtgcgcaggacttcgccgaaacctgggtcaagcagggattgctggcccgtccgctgatcgacgggcgcttcgtctacgagcccagcgcccagaccctgcgcacgctgcgcttcctagccgatttctccaccgacgactcgcacctgaactcctcgcgcctgaacacgctgctgtcctcgctggaatccctggcccacgaaaccgacccggatcccgaggcgcgcatccgcgcgctggaatcccagatcgcccagcgccaggcgcagatcgaccagctgcgctccggcaccgatccggcggtgctctcccgcaccaccgcgctgtccgcggcccgctcggtgctggatctggccgcgagcctgccggcggacttccgccgcatgcgcgacggggtgcaggacatgctgcattcgctgcgcgagggaatcctggacgcctccaccgccaagggcgtggcggtgggccaggtgctggaagccgaccggcagctgcgctcaaccgccgagggcgagaccttccgcggcttcaccgagttcctgaattcccccgaagcccagcagcgtttccgcgcggcgctggccgaggtgctggagcgcgacttcgtggacgacctggacaccccggaacgccagatcctcaccaacctgctgcgcgagctgcgccgccaggccgccgaggtgcacacctcctacggcaagctctccgagtccctgcatgccttcgtgcagtccgaggactacaagcaggccgagttgctgcgccgggcggtgcgcgaggcggaggccgcgatcagcaagtccgcgggtctgaagccgcgcagcgggctggccccgctggaactgttcgccccgcagttcgtcaccctgcacgggctgggcatctacgatccctccgagcacgtggccccgccgccgctggcccatgccccggaattcagcgccgaggacatcgtgcgcacccccagcaccccggaggccgacatgccggcgctgcgcagcgcgatcgcgcagcggctgcgcggcgccgcgcaggacccggtgccgctggatcaggtgttcgcggccttgcccgccgagcaccagcacctgaataccatccgcgcgctgatcgagatcgggcgcaccaacggcgagaacctcgacgagtcgcagctgctgggcatcgaattcacccagcttgatggttccacgcgcaccgcctacctgcccgccctgagcttcacgaaggagccgctatga

SEQ ID NO: 46120 - DNA, 693 bp, Arthrobacter sp. YC-RL1
atgacctacaccgactcatatgccgcaccgatcaccgatccgctgttcgatggggataccggcagcttcccgctcccgctgcgccagctgctggtgcggctgctgcgcggcccgtacctcgacggctccgtggacgccgcggcctggcagctgctgctggattcgcaaggcgctgtcaccaagtacttctcggagatcttcctggcgctgagcctggacatggaccgcaagatcgccatgctggcgccggtggacatcgagcaggcgcacaccgcgccgatcgccccgcgccgcccgctcaagcgcgacgagaccctgctggcgctgcggctgcggctgctgctggagcagcagtcgggcaccggggccgatgcggtgatctcccgcgcgggcatgcacgagatcctggccgagcaccgcgccgccgccgaccgcgacgacaagcgcttcgccgagtcctgcgatgcggccatcgcccggctgggctcgctgcggctgctgaccaataccgagctggccgacgagttccgcatttccccggcgctggccatggccctgcccttggcctccatccaggacatcccgcgctacatcgcggcgatcgacgccaacgagggcgtgctgaacctcgcggaggcggagcccgacgaggccgacgcatccgaacagaccgacgcactggtgcaggagtag

SEQ ID NO: 46121 - DNA, 3324 bp, Arthrobacter sp. YC-RL1
atgagcattgaaatgacgctgccgctgggcggcgagatcaaccccggccagcaccgcctctcgcgcgtccagctggtgaactggggaaccttccacgggctgcacgacctgggggtggaccgcgccggaacgctggtcaccggccatcccggcgtgggcaagtccacgctcttcgacgccatgggccacgtgttcttcgccagcccgcggctgaacgagtcggccaacgacgcggccacccgcgaggaccgccgcaccacctattcctacatgcgcggacgcaagttcaagaccagctccggcaccgtgttccagcgccccggcgccacctggagcgccgtgctgctcagctaccaggacggcctgggcaacaccgtcagcgccggcgcggtcttcgacctgccggacgccgggctggaaggccaggtgtccaagcactacctcttgtgcgagggcgcgctggacatcgccgaactggagaaccacggcccgcgccgcttcacggtctcctcgctgtccaaggcgctgtccccggccgaggccttcgacacccacaaggctttcatcgaccggctgcgccgccgcctgggcgtggaaagcgacaaggccttcgccctgctgcgcaccctgcagaacggcaagggcctggccaagggcgtgaaccagttcttccgccacgaggtgctggaggaacctgccacgctgaaggccgccgccgccgcggtggaggacttcgcgcacctgcgcggcatctaccggcagctggacaccgcccgcgcgcagcgcgacgtgctggccgccgtgccggagcaggaccgcgcctaccgctcgctggccgagaggatcggcaccacccgccagctgctggaaaccgagctggcgcagctcgaagcgcaggtgcgccagctggtgctgcgcaacgacctggcagcgcaccgcgccgagcatgcgcagctcacggccaggcaggccgagctgggcgaacgcaaggccaagctcgatgaccagctgcagtcgctggaggccgcgcacgacgcggccggctccgcctcgctgatgctgctggaacgcgaagccgacgccgcccgcaaggcgctgagcgagaaggagcgcgtgctgcgagccctgcaggagcaggccgaccaagccgggctggccttcgaattcagcgccaccgggctggacgagctgcgtgccaacgccgcccgcaccctgcagcagctggactccatcaccaaggacgcgcagaccgttgaatacgaggccatggcctcgctggtcaacctgcgcaagcgcgctgacacgctggccgagcagatccgctcctaccagcgccgcagcaccaacatcgacgaccgctcggtcgcggcccggcgcgccatcgcctcggcctgttcgctgcgcgaggagcagctgcccttcgccggcgagctgatggacgtctccgccgactgcgccatgtggcggctggccgcggagaaggcgctgcactcggtggcccgcaccctcctggtgcccggcgagttcctggcccaggtcacccacgccatcgacaagctcgacgggctgggccgggtgcgctgggcggacatctcgctggccccgcgcgaggccgaggccggcccggcggacctggtcaccaagctggacttcgccccgggcgaggccggcgcctggctgcgtgcaaagatcacctccgactatccgctggcctgcgtggagaacgacgcggccatgcacatccatcccaaggccatcaccccggccggcaccatcaagaccggcaccggcctcttcgagcgcgacacccgcaccctgccggcctccgaatacctgctgggcttcaccaacgaggcgaagatctccgagctgcagtccaaggccgcgcgcctggaaatcaaggtgcaggacgccaagaatgccgcggatgaccgcagcgccgccaaggccaaggtgctggccaaggcgcagctgcttggcgcgctgatcgaggacgagcgcaccttcgcgcagctggatgcggcccccgcgctccaggcgctgcgccgcagcgagcagaagctgggcgacgcgctcacgctctccggggattcctcccgggtccgcgcgcagatcgaggcagccaaagccgagtccgagcagctggtcggagacctggcgctggtccgctcccgagccggcgagctgggcctgcagatcgagcgggccgaaaaggtcctggccgccgatcccgcggacagcggcgactggctggagcgggtcccggcggcgctgcgcggccacgagctgctcggcggattgctggaaaccatcggcgccggcagcagcccggcctccgaggagatctccagcgccttcgccgaggccaggctgcagctggcgggccagctgagcgagctgaccgcgcggcgccaggaaatcggcggggcgctgagcgagaccttccgccgtttcgcccgtgaattcggcggctcccacgcgcagacccacggcacctccccggaggccgcggagcactacgcccagctgcatgagcagatcgtcgccgacggcctgccgcaccatgaggcgcagttccgcgaatacttcgccaaccgctcctacgaacgtttcagcgacctattgcagctgctggacgaggagcgccggatgatttccgagcgcatcaagccgctgaaccagatcctcggcgaggtggccttcgagcacggctcgctgctgcgcctggaggtggaaaactccatcccggtggaggccgccaccttccgcaaggacctgaagaacgcgctgcaggacgcctacaccaccaaggacgagggcacgctggccagctcctaccaggcgctggaggcgctggtctcggcgctgagcgacccgggcctttcggcctggcgttcgacggtgctggacgtgcgccagcatgtggtgatcagctgcaacgagcacaagccgaacggcgaggtggaaaccgggctggaaccgggcaccctctccggcggcgaggggcagcgtttcacctcgttcatcatgggcgccgcgctggcctaccagctcggcttcgccaccgccgggttcacgtccttcggcacggtgatgatcgacgaggcgttcatccaggccaactccgaatatgccgcggcgggtatccgcgcgctgcaggaattcggtttccacctggtgctggcagccccggaggacaaaatcgatttgagccgccacctgggatccatcacggacatcatcaagcatccgggatccaacatctcgggcttcgtcaccaccggccgctccccggccatggccaccaccatcacgctgcgctag

SEQ ID NO: 46122 - DNA, 1452 bp, Luteimonas sp. FCS-9
atgagcgatccgactccgccctcgctgttctcggtcgtgccggccggggtgttcggcccgctggcctcggccaaccgcgagcactactggctgctgctgcaccggttgttcgacgaattcttcggccccgacgcgccgatgccgcccagccacgggctgccgcggcgcgagatcaccgccgcgatcgagcgctatctcgtcgccgacgatccctgggaggacgaggacgggcaggggcctgacacgccgtcgggcacgcgtgcgcacgtgatctacgagcgtttccgcagcgccggctggctgcgtcaggagcgcatcggcgcgcgcgagatggtgtccatgccgccggcggtctcgcagctgctgtcgacgctggtcgagttcgccgagcacggcccgacgttcgtctcggccaaggtgcgctcgatcgagctgcagatgcagcaggtcgtcgagggcgccggtgcgggtgacgcgctcgacgaggccgccgaccaggcgcgccggttgctggtctcgctgtccgcgatgagcctgcaggtgcgcgacctgatgcccgagctcagccgcgccgagaccactgcgcagttcgcgcggcagtggttcgagcagtacgtatcgcgcttcttcatcggcgactatgccgggctgcaccgcgccgaccatccgctggcgcgccgcagctcgatcctggcgatggtgcagcaggtcgagaccggtccgcggcacgaggcgctgctggcctggtaccgcgagcacctggcaggcggcgacgacgcgcgcgccgcgctgcggctggcgcgcagcctgcgccggctgcgtgaactcgagcggatcgacgagtatctcggccggctcgacgacgacatccgccaggccaaccgtcgtgcgctggcgtttctcgactaccgcctgcgcgcgcccgaccggctcgacatcctgctgcgccgtgcctgccgcggcgtgtcgaccgcaccggccgaggcgctgcggttgccggtcgcgcccggcgcgctggtggacgaggcccgcctgcgcccgccgcggacccggccgcagcccatcccgcgcagcgccaatgccgcccaggtcccgacgcccgagcagctcgcgcggctgagcctgctgcggcgcatgaaacgcgcgcgcctggtcaccgccgaggacatggcccgctacgtcggccggcacctgggcgaggccgacagcgtcgactcgtcgggcatggccgtggcctcgatcgaggacctgcgcgcctaccagaccctgctcacgctcgcgctgcgcagccgccggatcggtggcctgcgccgcgacgacccgctcggccggctgctgcgcggtttccgcgtcgagctcctcgactcaggcgatccggtggacaacggcctgctgcgcgccccgcgcttcgtcgtccgccggctcgcgcccgcttcccggaacaccgcatga

SEQ ID NO: 46123 - DNA, 627 bp, Luteimonas sp. FCS-9
atgaaacgcagctggaacaccttgagccaacagtccaacggcctgtacgccgtccaggacttcgagcgcgccgcctaccgcctggtcaccgagcaggtgctctacgcggccgaccgcacgtcgcgcgtggcctaccatctggtcgaggaccatttcgacgacttcgtcggcgcgctcgcaccgctgggcatccgcctggagcgcaatgcgcactaccgctacctggtcgcgctgcccgcgcatggcgaaggcgtcgcggttacgctcgacgagaccctgctgctgctggtgctgcgccagcgctacgacgaggcgatgcgccaggggcagatcgaggagcacggcgaggtcgtcgtcgagctgcccgagctgcaggaggcctaccaggcgctcgccggccgcgcgatgccggacgtcggcgcgttgcgcacgctcgcgcgcatgctgcgccgctggggcgtggcgcggctggtcgactccgaccgcgacgacccgcagccgttccacctgctggtgcgcccggcgatcgtggagatcgtgggcgggctgtggctgcagcggctcgaccagcacaaccgcgacgacggcgccgacgccgatccggaggacgacgatgcagctgcttga

SEQ ID NO: 46124 - DNA, 3429 bp, Luteimonas sp. FCS-9
atgcagctgcttgagcgcgtccacctggtgcagttcttcctgttcgaggcgcagacgctcgaactcgacgcgaccagcgcgatcatcgcgcccaacggcgccggcaagagcgcgctgctcgacgcgctgcagatcgtgctgctgggcggcgaccgcagccgcatccgcttcaacgcgcaggccggcggcagcgcccgcgcgcggacgatccgcgactactgcctgggcgtgtaccgcagcggcgacgacggccgcaagcgccgcaccgcgaccacctacatcagcctggtgttccgcgaccaggagaccggtcgggcgctgacggccggcatcgcgctgggcgcgtccgtcgacgagcccgagcaccgcctgcacgggccgtacctgttgcccggcgtcgcgctcgaactcgacgaccacctcgagcgcgtcaagggccgcgaactgccgctggcctgggcgacgttccgcgaactggccgcgcgccgttgccgcgaggccggcgacaaggtcgagctgcacaccaccagcgagcgcttcgtgcgcgacctgctgttccgcctgcgggccgcgcccggtgcccagcccgacctcaatgcctatcgcaaggcattccagaacgcgttgaacctgcagcgggtcgaggacgtcgacctgttcgtccgcacgctggtcgccgaggatcgcccgaccgacatcgcccggttccgcgcgctgctcgacagcttccgccagatccgcgacaagatcgagcaggtccgccagcgcatcgagtcggccgaagaggtcgagcgccagtacggcaaggtcgccgcccaggcggtgcgcgccgcgtcctaccgcgcgctcgcggccgagtaccggcgcgacctgctcggagagcaggtggagcaggccgagcaggccggcgaagcggcccggcaggcgcttgccgccgcgcggctgcaactgcaggaggcgcgcagcgagcgcgagagcctcaagcacgaactcgagctcgcccagcagcagttgcagggcagccggggctacggcgagcaggcctcgttcgacgaactcgccggccgcgatcgcgaggagctggcccgcctcaagcgcgaactggcccggcagatcggctacgtgcgcgaccagttgcacgcgctgcgcggcgtggccgcacccgagctcgacgacgcgcggatcgaggccgcgctcgcgccgtggcgcgactgggccgcggcgctgtcgggcctcgcgcccgacgccgcgatcgacctggcgcccgaccgcttccatgccgacgcgcgggacgcgctcgcggccgccgcgccgctgcgcgcggcggtatcggcccgcgcacgtgccgcccacgacgcctggcaggcggtgcgcagccgccgtgacgcgctcaagggcaaccagcagcgcctgagcgccggcaaggccggcctgcgcgacgacgtcatgcggctgatgaactacctgcgcgaggccggtatcgaggcgcagccggtctgcgacctggtgcgcgtgcgcgacccggcctggcagccggccgtcgaggcctaccttcgcagccacgtcgaggcgttgctggtgccggccggccaggaggagcaggcggtgcgcgtgtaccgcgcgctgcagggcgcgcgcgcggtctacggcgtcaagctggcgttgcccaacgcggggcgcggcgcccgtggggagcgtgccgccgtcgacagtgtcgccgcgctgatcgagggcgacgatgccgacgcggtcgcctacctgcgccggcagctcggcgacctgcgctgcgtcgagaccgaggccgaggtcgtccgcagccgccaggggctgacccgcgacggcctggtggccaagggcggcggcatcgagcggcgcaggctgccggccggttcggaactgcgcatcggtgcgaacgacggccgcgagcggctgcgcgtgctacgcgaggaactcgaggccgccgaacgcgagctgcgcgagcgcgagcccgaggcgcggcgcctggaggcgctccagcaggcgctcgcgcgcttcgccgacgccgacgagaccgcggatgcactgcatgcgcagttgctgcagcaccgccagatcgagtcgcgctaccgggcccgcgcgcgcagccaggccgatgcgatcgatcccgacctgctgcgcctgggcgagcaggtgcgggcgctgcgcgagcgacacgacgagaacgaacgcaggatcgaagccctgatcggcaccgaggcgctgtcgcgcaacggcgtcgagcaggcgcagcgcgtgctcgaaggcctgcaggcgcaggaaacgctggtcgcgcaggccgcggtcgaggccttccgcgacgcggatgtcgatccgaaccgggtcgagcgccagcgcgaggaactcgacaccaagtggccctcgctcgaggagcgcagccgtcgctgcgacgagcgcgcccgcgacagcgacggccagctcgcccggctgctgcccgaggcctggagcgcattgtcgcaatacgcccgcgaccacggcctgggcctggacttcgacgccagcgcctggcgacaggcgcgcgggctgctgcagcgcgagctcggccagttgcgcgacaccgacctggtgcgctaccagggcgaggccgagcaggcctacgccaccgcggtcgagaccttccgcgccggcgtcgcctcggccctgtacgacaacttcagccggctcaagcagcagatcgctacgctcaaccgcaccctgcgcagcagtccggcgttctccaacaacgagcgctaccagttccactacgaggtcgtccccgagttccgcgacctggagcgcttcatccgccgggccgcggacgtcggcggcgaggacggcctgttcggcagcgccggcgaggtgccggccgcgttccgcgagctgatcgaggacggcgccgccgcgcgcagtgcgagctccccgctcgacgactatcgccgcttcttccggttcgaggtgcagatccgccaggacgaccgcgtgatcggttcgctgagcgagcgcatgcgctcgggctcgggcggcgagcaccgcgcaccgctgtacgtcatcgccggcgccgcgctcgccgcggcgtacggcaagagcgatgggaaccccggcggcatggggctgatcctgctcgacgaattcggcgacaagatcgacgcccagaacgcccgcgccacgaccaactacctgcgctcgctcggcctgcagctcgtgcttgccgcgcccgacaccgcccagggcacgctcagcggcgtgctcgacagctatgtcgagctgttccgcgacggtgacctgctgcaggtcgagcggattgaggtcaaggcggccgcccgcgcgctgctgctcagcgaccagttcgacctccaccccgaactccttgacgaggaggctgcccgcatcgcccgcgagcgcgccacgacgtga

SEQ ID NO: 46125 - DNA, 1437 bp, Polyangium brachysporum
atgatgttctttacgccaccccgcgaacactttttccgcccgctcacccatgacaaccgtgagctgtgcgccgccgtgctgcgcttgctgcacgagcgggtgcacggggccaacgcagactatgcggaagtgctgacacgcgagctggtgctggaggtgatccagcgcgcgcttggcgatgccgcgctgcgcgcgctggcgttcggtgcaagccagacgacggtgcgagccgaagacgaacgcacgtatgccagcgaactgctgcgcaagctcaaggagcatggctggttggaggattaccgcgaccccatcgaccttaggcccacgctcaagctcagccgcgcgggcaaggccttcagcgaaaccttcgccaacctggacgattcgcgcgccaagacccgccagcgcaacatgcgctcggcgcgcaaggcgctggcggccttcatcgccacgcgtgacgcggacgagctgctggacgcgcacgaattcgccagccgtgtagtgcaggacctacaggacgacatcgagtatttccggcacctgatccagagtctgacgcgcgaggcgctggcgcagaaagtggcctggaacgagttcaacgatttcatagagaagcgctttgcacgtgaatacgcggtacgcctggtggccgattcggccgagcgccatcgcggccagatcaacgaggcgctggaagaagtgcgtgccctggatggcaacctgcgtgcactggccgatgctcatctgttgcagcgcgcgccctggctggagcagcaggtgcaggggcgcagccccatgctgtggctggccgaccgcatcgagagcatggtggaggccgcttgtggcctgaagctaccgatgctgcgctcggagatgaacaactacgtgcgccgcttcaccagcctgctgcgccaggcgctctcgctggactacggcgccgagtcgcccctgggccgtaccgtggcgtggctgaaggagcggccaacagcggaacatgacctgctgctggatgtactggctcgccgcctcgccgccagcgagatccgcctgcccggtggcgtgctccgctggacggtacgcgaccgtgaagccgcggtgcccgagcagacgccgctggtggtggacaaggccagccgcctgaacgcgctgctgcgtcaggccgaagccgaagctttcgccttcagcgaccagcaggtgctgcaaggtctgttgccgcacctgtcgcaggggccgatcacgctggcctcactgcccgtcgccaccgccgaggatgccgtgcgcgtgctgcatgcggtgggtgcggtgcgttcgaccgaggggcgtcgtctggtgcgggcgcgtaagacgacgggtcaggtgcgcaccccgtacttccaggctgacgactacgaattgcgccccgaaccgtcggattcggtctctgacaaggcggtctga

SEQ ID NO: 46126 - DNA, 705 bp, Polyangium brachysporum
atgctgcaatcccttgcccagtttctagaccagcgcctggccaccgaggggaccggcaccgtcaagcctgcgcgctttgccgagctggcggggcgcctgctggccagcggcgtggtgtggcgcgagcaatcgcagcccgaggccgggctgtacgatgatgcccttcaatgcgagcaattgttgcgcgaatggtttgcctgtatcggtttcgtgctggtgcacgacagcgacgcgcgcctgctgcggctgtatccgccgggtgaaggtggtggcgaggacgaagaagacggcgtgcgccggctgcgcgctcgtttgtcgcgcgacttcgtcgccgccgtgatcgcgctgcggtttctctacaccgaggccctcaccggccgccgccccctagtggacgaacgactgacgatcagcttggaggagttgtcgcaggccgtggtatcgctgctggcgcacaagctgcccaacgcggccagcgagcgcctggccttgctgcgagaactgcgcaaacaccgcgtgctgcatttcgtcgagggtgacgatgccggcgacatgcagatgggtctggccgtgctgcgcccggtgatgagcttcgtcagcgacgaggctatggaagaggccttgcggatggtgggccgcaggctggacagccgggtgccgcagccacctgccggagggccgcggcacgaggaccgcagcacatga

SEQ ID NO: 46127 - DNA, 3693 bp, Polyangium brachysporum
atgaagatcggcaagctgctgacctggcactggggctcgctggaggatcgcgagtggccgttcgccgataccgtgctgctgacgggcgagtcgggctctggcaagtccaccctgctcgacgccatccagacagtgttgacggccgcccaccagcacgtggtgcagttcaacgtcggccaggacgaatccacgcaaagccgtcgcggcggcaaggagccgcgcacgctggcagcttatgcgctcgggcagcaggccgacggtgtgttcttgcgctcgcgctcgaccagctacgcaggcatcgtgttcgaggcgtccgaacagtccgcagagcagttggagcccttcacggcgctggtcgccgtggaggctttcgaggatggccggcgcgcggtgctgcagggcgcgccgcagttcttcatcgtgcgccgcgcgctttcgctcgatcatctggcccgtcgtgcaggggaggcgctcgccgcttcgccgctgccactgaaggagctgtacgtgcaactgcagcaccggctgcaggtgggccgtgacaaggccggcactgtcgtgcagcgctttccggacaagggaagctacctgcaacacctgtatggcgcgctgatgggcaagacagcggtgggcgagagcgacgccacgcgggcggccaagtccatcgtcaaggccatggcctacaaggaactgggcaacgtcaacgacctggtgcgagacgagatcctggagccgcacgacttcagccgggacctggacaagatgcgcgagctgatgcgttccatcgccggcctcaaggccgaagccgagcgcttggcattgaatctggagcggctggagaccgctgcggccagtgccaaccaggtgctggacgaggcgcggcgctttgtcaccaccaccatcgcgcatgcgctgcgcgctcgcagcgaagcgcaggacgagctggcatcggtgcagcgccagatcggcattcaagacaagaagcaggcacaactgcaagaaaagctggcctcgctcgaagcgcaggaaacccagttgcgggagcagctgcgcctggtggacaagcgcctggacgacagcgatgtggcgcgcgagaagcaggcgctggagaaccagatcaggctgcaggccgaccagttccgcctgcattgggggcgtgtgcaggaggccgcgcgcggcatcggcgggatggtggcacagcttggccagttgctgacgctcgacctgtctgccgtccccgcgctggctgctgcggtcgaggccttgcgccccgccgcgcagcaagtgctcaaaccctggccggcgatggcgggtgcctactcgcgcgatgccgcgttggacgtgatgctgcccgccttcgagctggaggtgttcgatgcccaactggtcgccttgcgccagggtatccacgagggcgatgcctcggtgcagggcgccgtgctgcaggcgctgaccgacgtgggcatgcggctgaaccagttgagggacgacgccacgcaacgtgatgccgaactgcgtcggctgcaggccggccgtgcgcaggggccaaaggatgcgcatgacgcggtggcgctgatcgagggcgaactcccgtcggcaagaccacacctgctggcgcagttggtggagccgcgtgccggcacgcgctggcagaacgccatcgagggttacatgggcggcgaccgcttcgcgatcattgtcgaggccggcatggaggcgcgttgcgcgcgactggtgaagcagcactaccccgtgcggtcgccaaaggtcgtgcagggccgaaaggcgatggaggacaccgaaggccgtcagctcgaagctcgcgccgtgctgcacgaactgcagtgtcggcacccggtggccaacgccttcctgatggcgcagtatggccgggtgcgcaaggtggacagcgaagaggaactggctcgcaccccgcagggcctgatggagcaaggcctgggcagccgaggctatggcatgttcgcgtgccgggcgccggacggcgaattggcctttggtgaagccgcccggcagcggcggcggcagtggtgcgaagacgaactgcagaggttggccggggaaatccgtgcgatggaatcgttgcgccagtcgctgcagatgatcacccgcatgttcaacggtgccgtgttcacgccgctcacgcctctgctgctggcggtgctggagagccaggcccagcatgcgcacgccgcgcaggcgttgaaggcgctggacttgtccgccatcgacgccttgctgatcgagcagaaggacttgaaagaccgcatcgaagccgtccgcacgcaccacagcgacgaaacggagcaggtcggggccacgaagcaggccttgagcggcttgtaccgacgtgaggccgacctggagatccgcctgcccgagctggacatcgcctgcaccaacgcgacagtctgggcctcgcgcttcgccgacgccgtccccacattggccacggagccgcaactgctggccgaggccgaggcactggcggccgaagccgacaccagcctggacgcgctgcgccaccgcgtgctgagtctgcgcgagagcctgccgcgcactttgcgcgaactggcccagggtgtgggcgcctacctttccggggcgcgcgacgacagcgagcgcttcgcctggaccgacccaccgcgcagcatcgaccgcctggaagaactgctcccccttgtcgagcgcacccgggctgccgtggccgagcaggcacaacgccagcgcgccatcggcttggccgacaacgcccgcttgctgcgcgaggccgaagcgcagttcaaccacgtctttaccagcagcttctgcttcaaggtgcgcgacgacgtcaagcaaggagcgctcacgctgcagcgactcaatcgccatctgcaggacatccgcttcgggcacgacagcttcaagctagagtgggactgggtgccgcgcttgcagaaggttcaggagtttttcgaggctgtcgaaggtgccgtcgaagggatggagcacgatcgcggctcgattttttcctcaccccgcctcaccgacgagcagcgcgccaccgccgaggagatccgccgcctactgctggccaacgaccagggcgccagcgagcgtgcgctgcgagagctggcggactaccgcaactaccggcgctacgacatcgtgcgcagcagcccagtgggcagcacgcggctgtccacctggggcacagggtcaggcggtgagcttgagacgcctttttatgtggtgcgctcggccgtgctggcgcatgccctcgggcacttcggccgcgaccggcgcggggcaccggccttgcgcctgatgctcagcgacgaggctttctccaagatggatgaatcgcgctcgcgcagcgtgctgcgctttctgtcgcagacgctggggctgcaactggtcgtggccatgcccacctccaagtcaggggcggtcaagcccgagtttgacaaggagttcaccttctcgaaggtcatcgcccaccgcggcggccaggaactgtttgtcagcgaagcgcaggaaaagacgctgaaccgcccggctctggcccgcttgtgggacgcgcatgccgagcaggcgcgcgaagccgcacgagcgcgatggcaggtggaacagaatgcgcaacccgggcacgccgtcaacccggtgccgacatctagtgatgatcccgcagcctga

SEQ ID NO: 46128 - DNA, 1113 bp, Polyangium brachysporum
ttgccgctcgaccgcaagactgcgcccgaactgtatgacgctgctgacgcggaccagatcgagttgctgcgcatgcaactggacgacctgctcggtaccggctggatggcattgcaacttgcgccgccgcgcgccttcgcgggtttcaccgatcgcaagccccggctggagttgtgcgacttcgacgcgcttgcagcctgggccggctacacgcctcaagcccagcgctggcagcggcaatggcgagagcatctggcggcgcactgggccgcgcacccgcacgcagcccctgccgaccccgtggccgtgctcgactacctggcccgcaacccgctggcgcagatggaggccctgccgctggccgatgctacctgcagcctcgtcacattgaccgcgctgtgccgctcggggcgtcggatggcgttgcgtgaggcctcggcgcaatccttccagggccgctccaagctgctggatcatcgtgaggaactgctgcgcctgctcggcgcagcgtccggccagttctgcgagtcgccgatccagttgctgctggcccctcccgctcggccacatgcaggtccggacggcttcgcggacgtgttgttcatcgaaaacctggctacgttcgagcacatggccgatgcacgcgcgcccgactggggcggcagcttgttggtctacgccgcgggttttcgtggcagtgcgcggcggctgcgatcaaccggcggctgccgcctttacttgcgggcgcccgcgtccgtcggtcatctgccggtcatcgaatcctggctgttcgacacgcaaagcgagcaccaccaactgcctgtccattttttcggggatcttgaccatgccggtatgcagatcctcgccagcctgcgcgccgtgtttccgcacgccagtgcctggcgaccggggtacgcaacgctggcacgcttgctggcacagggcggcggccacgctccgggcttggccgacaaggcgcagcaggtcgacccgggtcaaacgggctgcgcttatgcagacggtgagctgctccccttgctgcgggagcaggggcgggtcattgaccaggaggctttcgatccggagcgcatcgacggagacagcgcatga

SEQ ID NO: 46129 - DNA, 1701 bp, Cellulosimicrobium funkei
gtgcagcacgacgacgtcgacaccctgcgacggtcgagcgcggcgtggcggctcctgcgcgcggacacggcgccgctcgtgctgtcgttcctcggctcgctgttcgtcgaggacaacgtgcgcgcgatccccgagagcgagctcgtcgcgcggctcgacgaccacctgtgggcggtcgacggccggtccgcccgggcgtccggctcggaaccccgctacccgcgcgccccgcaggcatacgtcgaccactgggcccacccggaccaggggtggctgcgcgcctggtacccgccgggctccggcgagccgcactacgacgcgacgcccgccgtcgagcaggcggtgcgctgggtcgcgtcgctgcgcgggcgcgggttcgtgggtacggagtcacggctcaacaccgtcttcgagctcctgcgccagctcgccgtcgggacgcagaccgaccctgccgagcgcctgcgcgagctcgaggagcgacgcgccgcgatcgacgaggagatcgcgcaggtgcgcgccggacgcgtggccgtgctcgacgccgcggcgcagcgcgaccgctaccagcagctcacgcagaccgcggccgacctgctctccgacttccgcgaggtcgaggcgaacttccgctcgctcgaccgcgagctgcgcgagcgcatcaccggctgggacggcgccaagggcgagctgctggaggaggtcgtgcggtcgcgcacggccatcgccgagtccgaccagggccggtcgttccacgccttctacgacttcctgctcgaccgccgccgccaggaggagttcgccgcgctcgtcgagcgcgtgcagtccctcgacgcgatcgcgcccgacgtcgtccggccggccccgggggcccccggcccggtcccggacgccgccgcgacggacgcggcggcacgggagcaggagcaccgccggctgcggcgcgtccactacgactggctcgacgccggcgagcgcacgcaggcgaccgtgcggacgctctcggagcagctccgccgcttcctcgacgaccaggtgtggctggagaaccgccgcgtcatggacatcctgcgcggcgtcgaggcgaaggcgctcgccgcgcgcgacgtccgccgcggaccgggcggcccgcccggcatggcgatcgatgccgtcgctccggacgtcgtgctgccgacggagcggccgctgttcacgccgcgacccacggcccggctcgactccgaccacgtcgaggccggcgacgacgacttcgaggtcgacgccctctacgaccaggtgcacgtggaccccgagcggctcgcgcgcacggtccgggcgacgctcaccgccccgggcggaccgggggaggtcgcgctcgccgacctgctcgaggcggcgccgctcgagcacggcctggccgagctcgtgacgtacctgtcgctcgaggacccgcgcttcgtcgtcgtgcacgacgacgagcgcaccgacgaggtgcgctgggagggcgaggccccgagcgggccggtcgccgacgacggtgcgccggacccggtggtgcgcgtcgcgcgcctgccccgcgtcacctacgcgcggcgcacaggggcggccggcggggtcccgccggcgccgcgcgaccctgtcccgcaccgcccgcccgcgaccccacgcgacgagcaccttcacgacaccgccgaccccgccccggaggagaccccgtga

SEQ ID NO: 46130 - DNA, 765 bp, Cellulosimicrobium funkei
gtgagcaccacccgcaccgcgcgcgacccggagctgtccgtcgtcgtgacgtcgctgctcaagggcgtcgtctaccgcgagtccggcgaggcgctgtggcgcgacctgctcgcgcgcgaggcccaggtgcgcgacaccgtcgcgatgatgggcctgcaggtcgtcgtcgacgagggcgacggctacgcctacctgcgttcgcagcccgagcacgagcgcgacgagcgcgtgccccgcctgatcccgcgccgcgagctgccgttcgacgtgagcctgctgctcgcgctgctgcgcaagcggctcgcgcaggcggactccgagggcggcgagacgcgcctcgtgctcgcgcgcacggagatcgtcgacctgctgcgggtcttcctcgcgcaggacgccggcgccgccgccaacgaggcgcggctcgtcgaccgggtcgacggtctggtgcggcgcgtcgtggagctgggcttcctgcgtcccgcgggccgtcccgacccggacggtgcgcccgacggcggggccgccccggtcgaggacggcgacccggccgcgggggacgcgcggcggtacgaggtgcgccgcatcctcaaggcgttcgtggacgcccagtggctcgcggacttcgacgcacgcctcgcgcagtacctggagctcgccgccgacggcggggcgcgcgggacggcgtcgggcacggcgggcaccggcacgagcacgggggcgagtgcagcgacgagcgcaggcacgacgacgaggacggtggcgtga

SEQ ID NO: 46131 - DNA, 3663 bp, Cellulosimicrobium funkei
atggagggcctgttcagcgcggtcgagctgcacgacccggcggcggacctcgacgcccgggcgggcttccgcctcgagcggctcgaggtgctcaactggggcacgttcgaccagcgcgtgtgggcgttcgacctcgacggccgcaacgcgctcctcacgggcgacatcgggtcgggcaagtcgacgatcgtcgacgccgtcacgacgctgctcgtgccgtcgcaccgcatctcctacaacaaggcggcgggcgcgggcgcgcgcgagcggtccctgcgctcgtacgtcgcggggcactacaagtccgagcgcgacgaggccacgggcacgacgcgccacgtcggcctgcgcgagcgcggcacgtactcggtggtgctgggccggttctccaaccgggggttcgaccaggaggtcacgctcgcccaggtgttctggctcgccccggggcagtcgggccagccggaccggttcttcgtcacggccgaccggtcgctgacgatcaccgaggacttcgccgggttcggcggcgacgtggcggcgctgcggcgccggctgcgcgagtccggagcccaggtgcgcgaccacttccccgagtacgggcgcgacttccgccgcctgctgggcatcccgtcggagcaggcgatggacctgttccaccagaccgtgtccatgaagtcggtcggcgacctcggcgagttcgtgcgcgagcacatgctcgagccgttcgacgcggaccgctggaccgaccggctcgtcgcgcacttcgacgacctcacgagcgcgcacgacgccgtcgtgcgcgccaccgcgcagatcgagcgcctcgcgccgctgctcacggactgcgacgcgcacgacgcgctgggggagcggtccgcggcgctcgtggcccggcgcgacgcgctgcgcgcgttcacggcgtcgcgccgcgtggccgacctcgacgggctgatcggcgcgctcgacgagcgcgtggcggacggcgagtcccgccggcagcgcgtcggcgacgagctgggactcctcgcggccgagcgccagcggctcgagctcgatcgcgcggggcacggcggtgaccggctcgccgcgatcgagggcgaggtcgcccgccgcgaggtcgagcgcgccgcgcgggagcgacgcgtcacccagctcgcgggctacgccgccgcggcgggcctcacgctcggcggcgccgacggcgccgaacccggggttaccgccccccggggtgccgaacccggcgacgtccccgggttcggcggccgcggtgacgacgaccccgggttcggcggcggggcggcggccgtggccgccgcgctcgtcgacgccgaggcgttcgccgcgctgcggcgccgggccgacgacgccgcggtgcgcgtgcgcgacgacctcgcccgggcggaggagcgggtgagcgaggtcgccgcggagctgcgcgccgtcgagcaggagaccgccgacgtcaaggccgagctcgcgagcctcgccgaccgccgctccaacctgccgcgcacccacctggaggtccgtgaccggctgtgcgccgccgtcgggctcgcgccgggcgacgtgccgttcgtcggcgagctgctcgcggtgcgcccggagcacgccgactgggagggcgcggccgagcgcgtgctgcgcggcttcgcgctctcgctcctcgtgccggcggcgcactacgaggccgtcgccgcgtgggtcgaccgcgagcacctgggcctgcggctcgtgtaccaccgggtgcccgagcgcgtgccggccgcccggcccgcgccgcgcgacgacgtcccgctgctcgccgacctgctcgacgtgcgccgcctcgacgacgcgccgtcgctcacggcgtgggtcgagactgagctggagcggcgcgcggaccacgcgtgcgcgcccgacctcgacgcgttccgccggctgccccgcgcgatcacgcgcgcgggccaggtgaagcactcgcccgaccaccacgagaagaacgacacgcgtgcggtcgacgaccgtcgcggctacgtgctcgggtggtcgacgcaggccaagatcgacgcgctgctggagcaggcggccgaggtgaccgcgcggcgcgacacgctcgcgcggcgccgcgacgaggccgccgccgtgcgcggcgagctccaggcgcgctcggccgcgctcgggcggctcgacgtctaccgcgactgggacgagctcgaccgcggcgccgagacggcgcggatcgcggagctcgcggaggagaagcggcgcctcgagcaggcgagcgacgagctcggccggatcgcgggcctgctcgacgacaacgcgcgccgccacggcgagctggaggccgagcgcgaccgcgtcgtcgcgacgctcggcgccgaccggcacgcgctcgacgaggcgcgcaccgcgcgcgagcgggcacgggcggtgctcgacggcgcgggcgagacgctcgacgaggagacgacggcggcgctcgcggcggagttcgaccgcgagctcgcggcggtcgggcccgccgacggggacggcgcgaccggcccgacgcgggccgccgacctggacgccgtcgagaacgcggtgcgctcgcggctcacggccgaggcggagcaggcgcagcgtgagcgcgccgacctcgggacccgggtcgcggggcagatggcgtccttccgctcggcgtacccggtggagacggcggagctcgacgcggacgtgcggtcggccgacggctatcgcgagatccacgaccggctcgtccgcgacgacctgccgcgcttcgaggccgacttcaaggcgtacctcaacaccaacgcgatccgcgacatcgcgggcttcgcggccgagctcgccaagcaggctgacgtcatccgcgaccggatcgacacgatcaacgactcgctccgcgcgatcgactacaacccgggccggtacatccggctcgagatgtcgcggacgccgaacctcgaggtgcgcgagttccagcaggacctgcgcgcgtgcaccgacggcgacgggatcctcgcggaggacgaccgcgcgctcgccgagggcgacgggtcgctcgccgacggcgcgctgtcgtactcggaggaccggttcctgcgggtcaaggcgctcgtcgagcggttccgcgggcgcgagggcatgacggacctcgacgaggcgtggcgccgccgcgtgaccgacgtgcgcaactggttcgtgctctccgcgtccgagcggtcccgcgccgacgactccgagcacgagcactactccgactccggcggcaagtccggcggccagaaggagaagctcgcgtacaccgtgctcgcggcgtcgctcgcctaccagttcaagctcgactggggcgcggtgcggtcgacggcgttccggttcgtcgtcatcgacgaggcgttcgggcgggggtcggacgagtcgacgcgcttcgcgctcgagctgttccgccgtctggggctccagctgctcatcgtcacgccgctgcagaagatccacgtcatcgagccgtacatctcggccgtcgggttcgtggacaacccgtcgggccggtcgtcacgcctgcggaccctgtcgatcgccgcgtaccgcgacggtcgcacggtcggcgaggcgccgccgtcggacgccggactcgagaccgcggcggagcccgagcccgccgcgaggtag

SEQ ID NO: 46132 - DNA, 1521 bp, Bifidobacterium bifidum
gtgggtgatatccgacgggagatggaacggctgaggccggtctatgaaaccggcgtgctgagactgctgctccgtcagaattcgatgatgtacgtggcgctgctccgcgcggccttcgacccgttgaccggcgagctgccccgtgagaccctggaggaaagcttctcgcaaagcctgtcccggctcgtcgactccggcgaataccagctcagggaggatcagaccatcgcggacgcctcccggcgcatcctcgccgacctgacccgtgagggcgatgacgattacgcatggctcgccaactcgcatgacgccgcatcgcaccggttcctgtaccgtctcaccgcccgcgcccatcgtgcgatcgaggcgctgtcgcggcttgaggatgactcccgcacgctgtcgggcgcgcaggcgaactcgatcatcatggagatcgagcatgcgcgcatgcagcttaccgccgaccccggcgagcgcgtggcgttgctcaaccgggagatcaaggcgcgcaaacacgagatacgtcagatacgccacggtcagcggcaggcggcgctcaccgaatcgcaggtcgaggacgtgattgcagtgattcacaacacgctgcgcggcgtgcccatagacctgcgtgaactcgtgttgaacgaacgggacaacggtgacgcgctccgccgccgcatgcaggcgggcgacatgagcgtcgacgacatcctgacctcgtaccacgacgaataccgcaggtccttcagcgagtccgacagcggaagacgcttcgaggacgcgttccaggtgatcatcaccgacgaaggacggcagcagatcgacgcggccttgcgcgacattgcccacacgccgtatctggccggcgagtctggcgtcctgctcgatcaggtgcgtgccgagctttcgcgcatctatgacggcatcgaggcggtgcgttgccagatgcgcgtatccgacgaggcgatcagccgtctggtgcgacagcagaccgatacccgataccgcacgatgctcggcaagctcaaccgtctgtatgcccacgtcaacgccgacgcgaaggcgcatcagggcgacgatgcgagaccgtaccggaccgataccgcggccggcaggttccctccgctgccgtcgcgccccgcgcgcccgatggtacgaacgaccaccccaggattgtccgtaccgcagacaccgggcgatgcgaccgcgcccgacctgcgttcgatgatcgacaacggggggccgcggctgcggcgcatggccgcgctcatcctcgaatcgcccgtctacgcggacgacgggaacggcgccatcgacatcgtcgccagcttcaacgggctgccgaaagccgagcggaaggaaagcgagctcgtcggtttcctgggagagctcggctgcggggacggagccggtgtcgcatggcattgcatatcggcagacggaagcccgagggactggatcaccggcccagtgctcgcacaagaggatgaattgcacgacatcgtgaaggaggactga

SEQ ID NO: 46133 - DNA, 1044 bp, Bifidobacterium bifidum; identical to SEQ ID NO: 42269

SEQ ID NO: 46134 - DNA, 3591 bp, Bifidobacterium bifidum
atgagcggcaaggacatgcagatgatcgccgaccgatggatgatggaaagcaggaggcttgtcaactggggatcctatgagggctaccatgagttccgtccctccacggactcgcaactgccggtgacgttgctcgccggcgcgagcgaatccggcaagtcgacgctggtcgacgcgcagatatcgctgctctacccgaccggcacgcccttcaacaaggcgtcgaattcggggcgttcggaacgaagcgactacacctacctgcgcggcatgatcggcgtgggaggctccggcggcgtcgacgaaccgatgtacctgcgcggccgggacgagtccggcgcgccccggtccatatggggcgcgatcgtcgacacctaccgcaacttcaccaccggtcagatactgtcctgcggcaagttcctctatctgatgcccggcgacgggcgcggcgacgtccgacggctgtacctggcatgggacaagccgatcgacccgcgccgcatggacgtgttccgcgagtcgtcgttcacgcccacgcagctgaaatccacgtatccggggtgcgtcaccttcccgaacgccgaggcgttccacacccacatttgggatgtcatgggcctgagcgcggaggcatgccgtctgctggcccgcatccagtcggccgacgccccctcccgccttgacgacatcttcaaacagggcgtgctgggcgtgcccgaggcgctggacctggcccgtgcgaccgtggaggattacgagcgttacgacgcgaacttccgaagcatggaggaaaagaccagacgcatgggcaagttgcgtgccatcactgccagctatggcgactacgagtcggcccgtgacgcggtccactcgttcgacgcggtgaacccggccacgaagtccggctcggcgacgatccgagcatgggcgatccgccgcatgatcggcgaggtcagcgaacggcagccgctcgacaggcgtctgcgtgacgagcgacgcagtgaggcgcgggctgccggcaagcgcatcgaaagcctgcgcacccgcatcgacgcggtgcgcgagcgcatgcgaggcctcgacggcggcgacctgacacggctcgacgcggaaatgcggcaggcggaacgcgcgctggcggacatcaccgccggcagacagcgcatcgggcgcatgttcgaggcggccggcgaggagttccccaaagacgagcacgcgtgggacgagcggcgcatcgaggccgtgacgttcatgcgctcatatgagcagcgcaagggactgctggacgacatgcgcaaccagacgtacgccgcgcacgcgtccgtcaagcagacgctgcagcggctgaacgacgattacgaacgccagaaatcgcagcgcacccgcatctcccgccagatggacgagacccgcgccatgctgtgccgggccaccgggctgggcccgagcgaactgccgtacgtcgcggagctcatggacgtgcgcgaggatcaggagcattggcgcctcgccatgaacgccgcatacggatccatggcccagaccatcctcgtcgacaagcgccatgagcgtggattcgcagccaaggtcagcgccatcgacccgcacgccatggcgcggcgcacctggcagttcgtcgacaccgaacgcgggggagccgggaacgggcccggcggcgcgaacacgggtgcgaccggcgggacggacggagaggtgtggctgtcctcgaagctgcgctaccgcgaggattccccgttcgccggctggctgcgcgagcagaccagctccgagcgtctcgacgccttgtgcgtcgacggcatcgacgactccgaccatgccgtgcggcaggtgcaggccgacgggcagatcaaatccggcaaacgcggccagcatggcatcaaggaccgtcagcaggtcatcggattcgtcaacgaaagctatttggcgcaactgcgcacgcgcatccaggacgcgcaacgccaatgcgacgagaccgcgcaatcgtacgcgagcgcgaaggaacaggccgaccgcctgcagcgagagcgcgaactcgccgaccagctcgcatacaccgcatgggagaagatcgacgagaacagcgcgaaggcggcgatcgccgacatcgaacgcaccatcgcctcggtcaggaacaatcccaagctcgccgaactcgacacgttgcaggagtcgctgtccaaggagctcgaccgctcgcagcgccagcgcatcgacatcgaacggcaggccgagctcgccgatcaggcggtgaacgcagcgcaggcatggctcgacgagcatgccgcgcagccgcagcctcaaccgcagacgcggccgctcgacggggaagcggcggacgtttcgccaaaagccgtcacgaacggacggactctcctgacggacgaggtggaggcggcgctcgccgaatcatatgagcagcgtctctccggtctgggggatgcgacgacccgcgcccacatgatcatcggcgcgggggcgccgcagcgtatggctcagggggataccttcgccgaccgtgtcatcgccggcatcggcaaggacctggaggcgcgcgtctccatgctcgaaggtcgtgcggcgtcggcccgcaccgccgtcgaggcgcggatgggcgcctatatcgagatgtatgcgggcggtgacgatacgatcgccgccagcgtggacgactaccggtattaccaggacgagttggaaagcctttcgaagctcgccaccgtcgaagccaccgccgtcgagtaccacaactgcctcgacaagctgctgatgagcttcctgaccatcaaacgcgcgatagacaccgacgccggagacatccacgaccagctggaacgcatcaacgcgatgctggacggccagcagttcggcccgcgccacggcagcctgtccctgcacgcggacgtgcggcgccccgagcgcgcgttctggtcggccctgacccgcgtgatcggcaccctcaacgaccgcaaggcggcacagacggacgacgatcttgacggggcccggtgcgcgttcgcgtcctgcgccgcgatgatcgacatgctgcgccgcgagatcgggcagatcagggacgtcaacggcgtgaaaagctacggcgcccgcaacctcgacccgcggtgccgatcctcgttctacgcgctcgtgcgccactcggacgggcaggtcgaacgcatcacctcgaccggcggacggtccggcggcgccctgcaggagctgacctcgttcgtgtacggcgcggcgctgatctacctgctcggcggcggcatggacaacaagctcaagccttcctacacgacgctcttccttgacgaggcgctcatcaaggccgacggccggtatacgcggcgcgcgctgtccgtactgccgagactgggtttccaggtcatcgtctccgcccctgaaagcaagacgggcgagatactggaggtctccaccaaggcatacgtgacccgcaaggaccccgacaccggctacaccacgctgcacgaagcaagactggacggcatcgatgagatggacggcgcagatgagccggaaggtaccgtcgagtcggatgacgccgccgaatag

SEQ ID NO: 46135 - DNA, 1521 bp, Bifidobacterium bifidum
gtgggtgatatccgacgggagatggaacggctgaggccggtctatgaaaccggcgtgctgagactgctgctccgtcagaattcgatgatgtacgtggcgctgctccgcgcggccttcgacccgttgaccggcgagctgccccgtgagaccctggaggaaagcttctcgcaaagcctgtcccggctcgtcgactccggcgaataccagctcagggaggatcagaccatcgcggacgcctcccggcgcatcctcgccgacctgacccgtgagggcgatgacgattacgcatggctcgccaactcgcatgacgccgcatcgcaccggttcctgtaccgtctcaccgcccgcgcccatcgtgcgatcgaggcgctgtcgcggcttgaggatgactcccgcacgctgtcgggcgcgcaggcgaactcgatcatcatggagatcgagcatgcgcgcatgcagcttaccgccgaccccggcgagcgcgtggcgttgctcaaccgggagatcaaggcgcgcaaacacgagatacgtcagatacgccacggtcagcggcaggcggcgctcaccgaatcgcaggtcgaggacgtgattgcagtgattcacaacacgctgcgcggcgtgcccatagacctgcgtgaactcgtgttgaacgaacgggacaacggtgacgcgctccgccgccgcatgcaggcgggcgacatgagcgtcgacgacatcctgacctcgtaccacgacgaataccgcaggtccttcagcgagtccgacagcggaagacgcttcgaggacgcgttccaggtgatcatcaccgacgaaggacggcagcagatcgacgcggccttgcgcgacattgcccacacgccgtatctggccggcgagtccggcgtcctgctcgatcaggtgcgtgccgagctttcgcgcatctatgacggcatcgaggcggtgcgtcgccagatgcgcgtatccgacgaggcgatcagccgtctggtgcgacagcagaccgatacccgataccgcacgatgctcggcaagctcaaccgtctgtatgcccacgtcaacgccgacgcgaaggcgcatcagggcgacgatgcgagaccgtaccggaccgataccgcggccggcaggttccctccgctgccgtcgcgccccgcgcgcccgatggtacgaacgaccaccccgggattgtccgtaccgcagacaccgggcgatgcgaccgcgcccgacctgcgttcgatgatcgacaacgggggaccgcggctgcggcgcatggccgcgctcatcctcgaatcgtccgtctacgcggacgacgggaacggcgccatcgacatcgtcgccagcttcaacgggctgccgaaagccgagcggaaggaaagcgagctcgtcggtttcctgggagagctcggctgcggggacggagccggcgtcgcatggcattgcatatcggcagacggaagcccgagggactggatcaccggcccagtgctcgcacaagaggatgaattgcacgacatcgtgaaggaggactga

SEQ ID NO: 46136 - DNA, 1023 bp, Bifidobacterium bifidum
atgagcgacctgacgaacgacaccgcccagccggacgcggacatggacatgattggcgacgacatgaccggtaccgacagtgccgataccgacagtgccagtaccggcgcggatgacatgggtgcggtggacgtcgaatacgatggcgcggacgcggaaggcgcggtcaacccatacgccctgttcgagggcgacacgggcgacatgaccgccgacgcgcgcatggtggcgatcatgctcaaacgcgagcgctacatcagcggacggttctatgacctggcgctcgacaaccgcgcggcggtcgtccgttcgctcaacaacgacctgctcgatctggtcgtcaacgagcactaccgcgtcatgtacgccaccgcggtgagcgggccggacatgacgctgcgcgcgctcaagacccgtgcgagcctcaaacgtgaggaggcggcgctgctggcgttcctgcgcatccgcgtgctcgaatacgagaacgcccacgtcgcgccggacgaatggctggtcagcttcgaggagatccgagcggcgctcgccaccggcgccgggtacctcgcctcgcgcaacgacgaggagggcgtgctcaggcaggtgggtgcgatcgtgtccgtcatgtgcacgtacggctatctcaggcagctcgacgatgacgagacgatgtaccgcatcacgccgctggtgccggtggtgctggaccgtcagctggcggacagctggctcgcagtcgcggaccgggacgacgatggcgagccggccggtgacatggccccggccggctcgcggtctgcagccggcgatacgtcgaacgccgatgcgagcggcgccgatgacgatggcgattcggacgatgcgggacccgacgccgaactgttcgaggctccgctgttcgatgacgacgccgatgcggacgccgccgagaacatcaagggcgccgatgatgccaatggcgcgaacgacagcggcattgacgacgagaccgcctcggacggcggcactgcacgggaaggggagtga

SEQ ID NO: 46137 - DNA, 3585 bp, Bifidobacterium bifidum
atgagcggcaaggacatgcagatgatcgccgaccgatggatgatggaaagcaggaggctcgtcaactggggatcctatgagggctaccatgagttccgtccctccacggactcgcaactgccggtgacgttactcgccggcgcgagcgaatccggcaagtcgacgctggtcgacgcgcagatatcgctgctctacccgaccggcacgcccttcaacaaggcgtcgaattcggggcgttcggaacgaagcgactacacctacctgcgcggcatgatcggcgtgggaggctccgacggcgtcgacgaaccgatgtacctgcgcggccgggacgagtccggcgcgccccggtccatatggggcgcgatcgtcgacacctaccgcaacttcaccaccggtcagatactgtcctgcggcaagttcctctatctgatgcccggcgacgggcgcggcgacgtccgacggctgtacctggcatgggacaagccgatcgacccgcgccgcatggacgtgttccgcgagtcgccgttcacgcccacgcagctgaaatccacgtatccggggtgcgtcaccttcccgaacgccgaggcgttccacacccacatctgggatgtcatgggcctgagcgcggaggcatgccgtctgctggcccgcatccagtcggccgacgccccctcccgccttgacgacatcttcaaacagggcgtgctgggcgtgcccgaggcgctggacctggcccgtgcgaccgtggaggattacgagcgttacgacgcgaacttccgaagcatggaggaaaagaccagacgcatgggcaagttgcgtgccatcaccgccagctatggcgactacgagtcggcccgtgacgcggtccactcgttcgacgcggtgaacccggccacgaagtccggctcggcgacgatccgagcatgggcgatccgccgcatgatcggcgaggtcaacgaacggcagccgctcgacaggcgtctgcgtgacgagcgacgcagtgaggcgcgggctgccggcaagcgcatcgaaagcctgcgcacccgcatcgacgcggtgcgcgagcgcatgcgaggcctcgacggcggcgacctgacacggctcgacgcggaaatgcggcaggcggaacgcgcgctggcggacatcaccgccggcagacagcgcatcgggcgcatgttcgaggcggccggcgaggagttccccaaagacgagcacgcgtgggacgagcggcgcatcgaggccgtgacgttcatgcgctcatatgagcagcgcaagggactgctggacgacatgcgcaaccagacgtacgccgcgcacgcgtccgtcaagcagacgctgcagcggctgaacgacgattacgaacgccagaaatcgcagcgcacccgcatctcccgccagatggacgagacccgcgccatgctgtgccgggccaccgggctgggcccgagcgaactgccgtacgtcgcggagctcatggacgtgcgcgaggatcaggagcattggcgcctcgccatgaacgccgcatacggatccatggcccagaccatcctcgtcgacaagcgccatgagcgtggattcgcagccaaggtcagcgccatcgacccgcacgccatggcgcggcgcacctggcagttcgtcgacatcgaacgcgggggagccgggaacgggcccggcggcgcgaacacgggtgcgaccggcggaacggccggagaggtgtggctgtcctcgaagctgcgctaccgcgaggattccccgttcgccggctggctgcgcgagcagaccagctccgagcgtctcgacgccctgtgcgtcgacggcatcgacgactccgaccatgccgtgcggcaggtgcaggccgacgggcagatcaaatccggcaaacgcggccagcatggcatcaaggaccgtcagcaggtcatcggattcgtcaacgaaagctatttggcgcaactgcgcacgcgcatccaggacgcgcaacgccaatgcgacgagaccgcgcaatcgtacgcgagcgcgaaggaacaggccgaccgcctgcagcgagagcgcgaactcgccgaccagctcgcatacaccgcatgggagaagatcgacgagaacagcgcgaaggcggcgatcgccgacatcgaacgcaccatcgcctcggtcaggaacaatcccaagctcgccgaactcgacacgttgcaggagtcgctgtccaaggagctcgaccgctcgcagcgccagcgcatcgacatcgaacggcaggccgagctcgccgatcaggcggtgaacgcagcgcagacatggctcgacgagcatgccgcgcagccgcagccgcagacgcggccgctcgacggggaagcggcggacgtttcgccaaaagccgtcacgaacggacggactctcctgacggacgaggtggaggaggcgctcgccgaatcgtatgagcagcgtctctccggtctgggggatgcgacgacccgcgcccacatgatcatcggcgcgggggcgccgcagcgtatggctcagggggataccttcgccgaccgtgtcatcgccggcatcggcaaggatctggaggcgcgcgtctccatgctcgaaggtcgtgcggcgtcggcccgcaccgccgtcgaggcgcggatgggcgcctatatcgagatgtatgcgggcggtgacgatacgatcgccgccagcgtggacgactaccggtattaccaggacgagttggaaagcctttcgaagctcgccaccgtcgaagccaccgccgtcgaataccacaactgcctcgacaagctgctgatgagcttcctgaccatcaaacgcgcgatagacaccgacgccggagacatccacgaccagctggaacgcatcaacgcgatgctggacggccagcagttcggcccgcgccacggcagcctgtccctgcacgcggacgtgcggcgccccgagcgcgcgttctggtcggccctgacccgcgtgatcggcaccctcaacgaccgcaaggcggcacagacggacgacgatcttgacggggcccggtgcgcgttcgcgtcctgcgccgcgatgatcgacatgctgcgccgcgagatcgggcagatcagggacgtcaacggcgtgaaaagctacggcgcccgcaacctcgacccgcggtgccgatcctcgttctacgcgctcgtgcgccactcggacgggcaggtcgaacgcatcacctcgaccggcggacggtccggcggcgccctgcaggagctgacctcgttcgtgtacggcgcggcgctgatctacctgctcggcggcggcatggacaacaagctcaagccttcctacacgacgctcttccttgacgaggcgctcatcaaggccgacggccggtatacgcggcgcgcgctgtccgtactgccgagactgggtttccaagtcatcgtctccgcccctgaaagcaagacgggcgagatactggaggtctccaccaaggcatacgtgacccgcaaggaccccgacgccggctacaccacgctgcacgaagcaagactggacggcatcgatgagatggacggcgcagatgagccggaaggtaccgtcgagtcggatgacgccgccgaatag

SEQ ID NO: 46138 - DNA, 1521 bp, Bifidobacterium bifidum
gtgggtgatatccgacgggagatggaacggctgaggccggtctatgaaaccggcgtgctgagactgctgctccgtcagaattcgatgatgtacgtggcgctgctccgcgcggccttcgacccgttgaccggcgagctgccccgtgagaccctggaggaaagcttctcgcaaagcctgtcccggctcgtcgactccggcgaataccagctcagggaggatcagaccatcgcggacgcctcccggcgcatcctcgccgacctgacccgtgagggcgatgacgattacgcatggctcgccaactcgcatgacgccgcatcgcaccggttcctgtaccgtctcaccgcccgcgcccatcgtgcgatcgaggcgctgtcgcggcttgaggatgactcccgcacgctgtcgggcgcgcaggcgaactcgatcatcatggagatcgagcatgcgcgcatgcagcttaccgccgaccccggcgagcgcgtggcgttgctcaaccgggagatcaaggcgcgcaaacacgagatacgtcagatacgccacggtcagcggcaggcggcgctcaccgaatcgcaggtcgaggacgtgattgcagtgattcacaacacgctgcgcggcgtgcccatagacctgcgtgaactcgtgctgaccgaacgggacaacggtgacgcgctccgccgccgcatgcaggcgggcgacatgagcgtcgacgacatcctgacctcgtaccacgacgaataccgcaggtccttcagcgaatccgacagcggaagacgcttcgaggacgcgttccaggtgatcatcaccgacgagggacggcagcagatcgatgcggccctgcgcgacatcgcccacacgccgtatctggccggcgagtccggcgtcctgctcgatcaggtgcgtgccgagctttcgcgcatctatgacggcatcgaggcggtgcgtcgccagatgcgcgtatccgacgaggcgatcagccgtctggtgcgacagcagaccgatacccgataccgcacgatgctcggcaagctcaaccgtctgtatgcccacgtcaacgccgacgcgaaggcgcatcagggcgacgatgcgagaccgtaccggaccgataccgcggccggcaggttccctccgctgccgtcgcgccccgcgcgcccgatggtacgaacgaccaccccgggattgtccgtaccgcagacaccgggcgatgcgaccgcgcccgacctgcgttcgatgatcgacaacgggggaccgcggctgcggcgcatggccgcgctcatcctcgaatcgcccgtctacgcggacgacgggaacggcgccatcgacatcgtcgccagcttcaacgggctgccgaaagccgagcggaaggaaagcgagctcgtcggtttcttgggagagctcggctgcggggacggagctggcgtcgcatggcattgcatatcggcagacggaagcccgagggactggatcaccggcccagtgctcgcacaagaggatgaattgcacgacatcgtgaaggaggactga

SEQ ID NO: 46139 - DNA, 1023 bp, Bifidobacterium bifidum
atgagcgacctgacgaacgacaccgcccagccggacgcggacatggacatgattggcgacgacatgaccggcaccggcagtgccgataccgacagtgccagtaccggcgtggatgacatgggtgcggcggacgtcgaatacgatggcgcggacgcggaaggcgcggtcaacccatacgccctgttcgagggcgacacgggcgacatgaccgccgacgcgcgcatggtggcgatcatgctcaaacgcgagcgctacatcagcggacgtttctatgacctggcgctcgacaaccgcgcggcggtcatccgttcgctcaacaacgacctgctcgatctggtcgtcaacgagcactaccgcgtcatgtacgccaccgcggtgagcgggccggacatgacgctgcgcgcgctcaagacccgtgcgagcctcaaacgtgaggaggcggcgctgctggcgttcctgcgcatccgcgtgctcgaatacgagaacgcccacgtcgcgccggacgaatggctggtcagcttcgaggagatccgagcggcgctcgccaccggcgccgggtacctcgcctcgcgcaacgacgaggagggcgtgctcaggcaggtgggcgcgatcgtgtccgtcatgtgcacgtacggctatctcaggcagctcgacgatgacgagacgatgtaccgcatcacgccgctggtgccggtggtgctggaccgtcagctggcggacagctggctcgcagtcgcggaccgggacgacgatgacgagccggccggtgacatggccccggccggctcgcggtctgcagccggcgatacgtcgaacgccgatgcgagcggcgccgatgacgatggcgattcggacgacgcgggacccgacgccgaactgttcgaggctccgctgttcgatgacgacgccgatgcggacgccgccgagaacatcaagggcgccgatgatgccaatggcgcgaacgacagcgacattgacgacgagaccgcctcggacggcggcactgcacgggaaggggagtga

SEQ ID NO: 46140 - DNA, 3585 bp, Bifidobacterium bifidum
atgagcggcaaggacatgcagatgatcgccgaccgatggatgatggaaagcaggaggctcgtcaactggggatcctatgagggctaccatgagttccgtccctccacggactcgcaactgccggtgacgttgctcgccggcgcgagcgaatccggcaagtcgacgctggtcgacgcgcagatatcgctgctctacccgaccggcacgcccttcaacaaggcgtcgaattcggggcgttcggaacgaagcgactacacctacctgcgcggcatgatcggcgtgggaggctccgacggcgtcgacgaaccgatgtacctgcgcggccgggacgagtccggcgtgccccggtccatatggggcgcgatcgtcgacacctaccgaaacttcaccaccggtcagatactgtcctgcggcaagttcctctatctgatgcccggcgacgggcgcggcgacgtccgacggctgtacctggcatgggacaagccgatcgacccgcgccgcatggacgtgttccgcgagtcgccgttcacgcccacgcagctgaaatccacgtatccggggtgcgtcaccttcccgaacgccgaggcgttccacacccacatctgggatgtcatgggcctgagcgcggaggcatgccgtctgctggcccgcatccagtcggctgacgccccctcccgccttgacgacatcttcaaacagggcgtgctgggcgtgcccgaggcgctggacctggcccgtgcgaccgtggaggattacgagcgttatgacgcgaacttccgaagcatggaggaaaagaccagacgcatgggcaagttgcgtgccatcaccgccagctatggcgactacgagtcggcccgtgacgcggtccactcgttcgacgcggtgaacccggccacgaagtccggctcggcgacgatccgagcatgggcgatccgccgcatgatcggcgaggtcaacgaacggcagccgctcgacaggcgtctgcgtgacgagcgacgcagtgaggcgcgggctgccggcaagcgcatcgaaagcctgcgcacccgcatcgacgcggtgcgcgagcgcatgcgaggcctcgacggcggcgacctgacacggctcgacgcggaaatgcggcaggcggaacgcgcgctggcggacatcaccgccggcagacagcgcatcgggcgcatgttcgaggcggccggcgaggagttccccaaagacgagcacgcgtgggacgagcggcgcatcgaggccgtgacgttcatgcgctcatatgagcagcgcaagggactgctggacgacatgcgcaaccagacgtacgccgcgcacgcgtccgtcaagcagacgctgcagcggctgaacgacgattacgaacgccagaaatcgcagcgcacccgcatctcccgccagatggacgagacccgcgccatgctgtgccgggccaccgggctgggcccgagcgaactgccgtacgtcgcggagctcatggacgtgcgcgaggatcaggagcattggcgcctcgccatgaacgccgcatacggatccatggcccagaccatcctcgtcgacaagcgccatgagcgtggattcgcagccaaggtcagcgccatcgacccgcacgccatggcgcggcgcacctggcagttcgtcgacatcgaacgcgggggagccgggaacgggcccggcggcgcgaacacgggtgcgaccggcggaacggccggagaggtgtggctgtcctcgaagctgcgctaccgcgaggattccccgttcgccggctggctgcgcgagcagaccagctccgagcgtctcgacgccctgtgcgtcgacggcatcgacgactccgaccatgccgtgcggcaggtgcaggccgacgggcagatcaaatccggcaaacgcggccagcatggcatcaaggaccgtcagcaggtcatcggattcgtcaacgaaagctatttggcgcaactgcgcacgcgcatccaggacgcgcaacgccaatgcgacgagaccgcgcaatcgtacgcgagcgcgaaggaacaggccgaccgcctgcagcgagagcgcgaactcgccgatcagctcgcatacaccgcatgggagaagatcgacgagaacagcgcgaaggcggcgatcgccgacatcgaacgcaccatcgcctcggtcaggaacaatcccaagctcgccgaactcgacacgttgcaggagtcgctgtccaaggagctcgaccgctcgcagcgccagcgcatcgacatcgaacggcaggccgagctcgccgatcaggcggtgaacgcagcgcagacatggctcgacgagcatgccgcgcagccgcagccgcagacgcggccgctcgacggggaagcggcggacgtttcgccaaaagccgtcacgaacggacggactctcctgacggacgaggtggaggaggcgctcgccgaatcatatgagcagcgtctctccggtctgggggatgcgacgacccgcgcccacatgatcatcggcgcgggggcgccgcagcgtatggctcagggggataccttcgccgaccgtgtcatcgccggcatcggcaaggatctggaggcgcgcgtctccatgctcgaaggtcgtgcggcgtcggcccgcaccgccgtcgaggcgcggatgggcgcctatatcgagatgtatgcgggcggtgacgatacgatcgccgccagcgtggacgactaccggtattaccaggacgagttggaaagcctttcgaagctcgccaccgtcgaagccaccgccgtcgaataccacaactgcctcgacaagctgctgatgagcttcctgaccatcaaacgcgcgatagacaccgacgccggagacatccacgaccagctggaacgcatcaacgcgatgctggacggccagcagttcggcccgcgccacggcagcctgtccctgcacgcggacgtgcggcgccccgagcgcgcgttctggtcggccctgacccgcgtgatcggcaccctcaacgaccgcaaggcggcacagacggacgacgatcttgacggggcccggtgcgcgttcgcgtcctgcgccgcgatgatcgacatgctgcgccgcgagatcgggcagatcagggacgtcaacggcgtgaaaagctacggcgcccgcaacctcgacccgcggtgccgatcctcgttctacgcgctcgtgcgccactcggacgggcaggtcgaacgcatcacctcgaccggcggacggtccggcggcgccctgcaggagctgacctcgttcgtgtacggcgcggcgctgatctacctgctcggcggcggcatggacaacaagctcaagccttcctacacgacgctcttccttgacgaggcgctcatcaaggccgacggccggtatacgcggcgcgcgctgtccgtactgccgagactgggtttccaggtcatcgtctccgcccctgaaagcaagacgggcgagatactggaggtctccaccaaggcatacgtgacccgcaaggaccccgacaccggctacaccacgctgcacgaagccagactggacggcatcgatgagatggacggcgcagatgagccggaaggtaccgtcgagtcggatgacgccgccgaatag

SEQ ID NO: 46141 - DNA, 1521 bp, Bifidobacterium bifidum
gtgggtgatatccgacgggagatggaacggctgaggccggtctatgaaaccggcgtgctgagactgctgctccgtcagaattcgatgatgtacgtggcgctgctccgcgcggccttcgacccgttgaccggcgagctgccccgtgagaccctggaggaaagcttctcgcaaagcctgtcccggctcgtcgactccggcgaataccagctcagggaggatcagaccatcgcggacgcctcccggcgcatcctcgccgacctgacccgtgagggcgatgacgattacgcatggctcgccaactcgcatgacgccgcatcgcaccggttcctgtaccgtctcaccgcccgcgcccatcgtgcgatcgaggcgctgtcgcggcttgaggatgactcccgcacgctgtcgggcgcgcaggcgaactcgatcatcatggagatcgagcatgcgcgcatgcagcttaccgccgaccccggcgagcgcgtggcgttgctcaaccgggagatcaaggcgcgcaaacacgagatacgtcagatacgccacggtcagcggcaggcggcgctcaccgaatcgcaggtcgaggacgtgattgcagtgattcacaacacgctgcgcggcgtgcccatagacctgcgtgaactcgtgctgaccgaacgggacaacggtgacgcgctccgccgccgcatgcaggcgggcgacatgagcgtcgacgacatcctgacctcgtaccacgacgaataccgcaggtccttcagcgaatccgacagcggaagacgcttcgaggacgcgttccaggtgatcatcaccgacgagggacggcagcagatcgatgcggccctgcgcgacatcgcccacacgccgtatctggccggcgagtccggcgtcctgctcgatcaggtgcgtgccgagctttcgtgcatctatgacggcatcgaggcggtgcgtcgccagatgcgcgtatccgacgaggcgatcagccgtctggtgcgacagcagaccgatacccgataccgcacgatgctcggcaagctcaaccgtctgtatgcccacgtcaacgccgacgcgaaggcgcatcagggtgatgatgcgagaccgtaccggaccgataccgcggccggcaggttccctccgctgccgtcgcgccccgcgcgcccgatggtacgaacgaccaccccgggattgtccgtcccgcagacaccgggcgatgcgaccgcgcccgacctgcgttcgatgatcgacaacgggggaccgcggctgcggcgcatggccgcgctcatcctcgaatcgcccgtctacgcggacgacgggaacggcgccatcgacatcgtcgccagcttcaacgggctgccgaaagccgagcggaaggaaagcgagctcgtcggtttcctgggagagctcggctgcggggacggagccggcgtcgcatggcattgcatatcggcagacggaagcccgagggactggatcaccggcccagtgctcgcacaagaggatgaattgcacgacatcgtgaaggaggactga

SEQ ID NO: 46142 - DNA, 1023 bp, Bifidobacterium bifidum
atgagcgacctgacgaacgacaccgcccagccggacgcggacatggacatgattgacgacgacatgaccggcaccggcagtgccgataccgacagtgccagtaccggcgtggatgacatgggtgcggcggacgtcgaatacgatggcgcggacgcggaaggcgcggtcaacccatacgccctgttcgagggcgacacgggcgacatgaccgccgacgcgcgcatggtggcgatcatgctcaaacgcgagcgctacatcagcggacgtttctatgacctggcgctcgacaaccgcgcggcggtcatccgttcgctcaacaacgacctgctcgatctggtcgtcaacgagcactaccgcgtcatgtacgccaccgcggtgagcgggccggacatgacgctgcgcgcgctcaagacccgtgcgagcctcaaacgtgaggaggcggcgctgctggcgttcctgcgcatccgcgtgctcgaatacgagaacgcccacgtcgcgccggacgaatggctggtcagcttcgaggagatccgagcggcgctcgccaccggcgccgggtacctcgcctcgcgcaacgacgaggagggcgtgctcaggcaggtgggcgcgatcgtgtccgtcatgtgcacgtacggctatctcaggcagctcgacgatgacgagacgatgtaccgcatcacgccgctggtgccggtggtgctggaccgtcagctggcggacagctggctcgcagtcgcggaccgggacgacgatgacgagccggccggtgacatggccccggccggctcgcggtctgcagccggcgatacgtcgaacgccgatgcgagcggcgccgatgacgatggcgattcggacgacgcgggacccgacgccgaactgttcgaggctccgctgttcgatgacgacgccgatgcggacgccgccgagaacatcaagggcgccgatgatgccaatggcgcgaacgacagcgacattgacgacgagaccgcctcggacggcggcactgcacgggaaggggagtga

SEQ ID NO: 46143 - DNA, 3585 bp, Bifidobacterium bifidum
atgagcggcaaggacatgcagatgatcgccgaccgatggatgatggaaagcaggaggctcgtcaactggggatcctatgagggctaccatgagttccgtccctccacggactcgcaactgccggtgacgttactcgccggcgcgagcgaatccggcaagtcgacgctggtcgacgcgcagatatcgctgctctacccgaccggcacgcccttcaacaaggcgtcgaattcggggcgttcggaacgaagcgactacacctacctgcgcggcatgatcggcgtgggaggctccgacggcgtcgacgaaccgatgtacctgcgcggccgggacgagtccggcgcgccccggtccatatggggcgcgatcgtcgacacctaccgcaacttcaccaccggtcagatactgtcctgcggcaagttcctctatctgatgcccggcgacgggcgcggcgacgtccgacggctgtacctggcatgggacaagccgatcgacccgcgccgcatggacgtgttccgcgagtcgccgttcacgcccacgcagctgaaatccacgtatccggggtgcgtcaccttcccgaacgccgaggcgttccacacccacatttgggatgtcatgggcctgagcgcggaggcatgccgtctgctggcccgcatccagtcggccgacgccccctcccgccttgacgacatcttcaaacagggcgtgctgggcgtgcccgaggcgctggacctggcccgtgcgaccgtggaggattacgagcgttacgacgcgaacttccgaagcatggaggaaaagaccagacgcatgggcaagttgcgtgccatcaccgccagctatggcgactacgagtcggcccgtgacgcggtccactcgttcgacgcggtgaacccggccacgaagtccggctcggcgacgatccgagcatgggcgatccgccgcatgatcggcgaggtcaacgaacggcagccgctcgacaggcgtctgcgtgacgagcgacgcagtgaggcgcgggctgccggcaagcgcatcgaaagcctgcgcacccgcatcgacgcggtgcgcgagcgcatgcgaggcctcgacggcggcgacctgacacggctcgacgcggaaatgcggcaggcggaacgcgcgctggcggacatcaccgccggcagacagcgcatcgggcgcatgttcgaggcggccggcgaggagttccccaaagacgagcacgcgtgggacgagcggcgcatcgaggccgtgacgttcatgcgctcatatgagcagcgcaagggactgctggacgacatgcgcaaccagacgtacgccgcgcacgcgtccgtcaagcagacgctgcagcggctgaacgacgattatgaacgccagaaatcgcagcgcacccgcatctcccgccagatggacgagacccgcgccatgctgtgccgggccaccgggctgggcccgagcgaactgccgtacgtcgcggagctcatggacgtgcgcgaggatcaggagcattggcgcctcgccatgaacgccgcatacggatccatggcccagaccatcctcgtcgacaagcgccatgagcgtggattcgcagccaaggtcagcgccatcgacccgcacgccatggcgcggcgcacctggcagttcgtcgacaccgaacgcgggggagccgggaatgggcccggcggcgcgaacacgggtgcgaccggcgggacggacggagaggtgtggctgtcctcgaagctgcgctaccgcgaggattccccgttcgccggctggctgcgcgagcagaccagctccgagcgtctcgacgccctgtgcgtcgacggcatcgacgactccgaccatgccgcgcggcaggtgcaggccgacgggcagatcaaatccggcaaacgcggccagcatggcatcaaggaccgtcagcaggtcatcggattcgtcaacgaaagctatttggcgcaactgcgcacgcgcatccaggacgcgcaacgccaatgcgacgagaccgcgcaatcgtacgcgagcgcgaaggaacaggccgaccgcctgcagcgagagcgcgaactcgccgaccagctcgcatacaccgcatgggagaagatcgacgagaacagcgcgaaggcggcgatcgccgacatcgaacgcaccatcgcctcggtcaggaacaatcccaagctcgtcgaactcgacacgttgcaggagtcgctgtccaaggagctcgaccgctcgcagcgccagcgcatcgacatcgaacggcaggccgagctcgccgatcaggcggtgaacgcagcgcaggcatggctcgacgagcatgccgcgcagccgcagccgcagacgcggccgctcgacggggaagcggcggacgtttcgccaaaagccgtcacgaacggacggactctcctgacggacgaggtggaggaggcgctcgccgaatcatatgagcagcgtctctccggtctgggggatgcgacgacccgcgcccacatgatcatcggcgcgggggcgccgcagcgtatggctcagggggataccttcgccgaccgtgtcatcgccggcatcggcaaggacctggaggcgcgcgtctccatgctcgaaggtcgtgcggcatcggcccgcaccgccgtcgaggcgcggatgggcgcctatatcgagatgtatgcgggcggtgacgatacgatcgccgccagcgtggacgactaccggtattaccaggacgagttggaaagcctttcgaagctcgccaccgtcgaagccaccgccgtcgagtaccacaactgcctcgacaagctgctgatgagcttcctgaccatcaaacgcgcgatagacaccgacgccggagacatccacgaccagctggaacgcatcaacgcgatgctggacggccagcagttcggcccgcgccacggcagcctgtccctgcacgcggacgtgcggcgccccgagcgcgcgttctggtcggccctgacccgcgtgatcggcaccctcaacgaccgcaaggcggcacagacggacgacgatcttgacggggcccggtgcgcgttcgcgtcctgcgccgcgatgatcgacatgctgcgccgcgagatcgggcagatcagggacgtcaacggcgtgaaaagctacggcgcccgcaacctcgacccgcggtgccgatcctcgttctacgcgctcgtgcgccactcggacgggcaggtcgaacgcatcacctcgaccggcggacggtccggcggcgccctgcaggagctgacctcgttcgtgtacggcgcggcgctgatctacctgctcggcggcggcatggacaacaagctcaagccttcctacacgacgctcttccttgacgaggcgctcatcaaggccgacggccggtatacgcggcgcgcgctgtccgtactgccgagactgggtttccaggtcatcgtctccgcccctgaaagcaagacgggcgagatactggaggtctccaccaaggcatacgtgacccgcaaggaccccgacaccggctacaccacgctgcacgaagccagactggacggcatcgatgagatggacggcgcagatgagccggaaggtaccgtcgagtcggatgacgccgccgaatag

SEQ ID NO: 46144 - DNA, 1521 bp, Bifidobacterium bifidum
gtgggtgatatccgacgggagatggaacggctgaggccggtctatgaaaccggcgtgctgagactgctgctccgtcagaattcgatgatgtacgtggcgctgctccgcgcggccttcgacccgttgaccggcgagctgccccgtgagaccctggaggaaagcttctcgcaaagcctgtcccggctcgtcgactccggcgaataccagctcagggaggatcagaccatcgcggacgcctcccggcgcatcctcgccgacctgacccgtgagggcgatgacgattacgcatggctcgccaactcgcatgacgccgcgtcgcaccggttcctgtaccgtctcaccgcccgcgcccatcgtgcgatcgaggcgctgtcgcggcttgaggatgactcccgcacgctgtcgggcgcgcaggcgaactcgatcatcatggagatcgagcatgcgcgcatgcagcttaccgccgaccccggcgagcgcgtggcgttgctcaaccgggagatcaaggcgcgcaaacacgagatacgtcagatacgccacggtcagcggcatgcggcgctcaccgaatcgcaggtcgaggacgtgattgcagtgattcacaacacgctgcgcggcgtgcccatagacctgcgtgaactcgtgctgaccgaacgggacaacggtgacgcgctccgccgccgcatgcaggcgggcgacatgagcgtcgacgacatcctgacctcgtaccacgacgaataccgcaggtccttcagcgagtccgacagcggaagacgcttcgaggatgcgttccaggtgatcatcaccgacgagggacggcagcagatcgacgcggccctgcgcgacatcgcccacacgccgtatctggccggcgagtccggcgtcctgctcgatcaggtgcgtgccgagctttcgcgcatctatgacggcatcgaggcggtgcgtcgccagatgcgcgtatccgacgaggcgatcagccgtctggtgcgacagcagaccgatacccgataccgcacgatgctcggcaagctcaaccgtctgtatgcccacgtcaacgccgacgcgaaggcgcatcagggcgacgatgcgagaccgtaccggaccgataccgcggccggcaggttccctccgctgccgtcgcgccccgcgcgcccgatggtacgaacgaccaccccaggattgtccgtaccgcagacaccgggcgatgcgaccgcgcccgacctgcgttcgatgatcgacaacgggggaccgcggctgcggcgcatggccgcgctcatcctcgaatcgcccgtctacgcggacgacgggaacggcgccatcgacatcgtcgccagcttcaacgggctgccgaaagccgagcggaaggaaagcgagctcgtcggtttcctgggagagctcggctgcggggacggagccggcgtcgcatggcattgcatatcggcagacggaagcccgagggactggatcaccggcccagtgctcgcacaagaggatgaattgcacgacatcgtgaaggaggactga

SEQ ID NO: 46145 - DNA, 1044 bp, Bifidobacterium bifidum
atgagcgacctgacgaacgacgccgcccagccggacgcggacatggacatggacatgattggcgacgacatgaccggcaccggcagtgccgataccgacagtgccgataccgacagtgccagtaccggcgcggatgacatgggtgcggcggacgtcgaatacgatggcgcggacgcggaaggcgcggtcaacccatacgccctgttcgagggcgacacgggcgacatgaccgccgacgcgcgcatggtggcgatcatgctcaaacgcgagcgctacatcagcggacgtttctatgacctggcgctcgacaaccgcgcggcggtcatccgttcgctcaacaacgacctgctcgatctggtcgtcaacgagcactaccgcgtcatgtacgccaccgcggtgagcgggccggacatgacgctgcgcgcgctcaagacccgtgcgagcctcaaacgtgaggaggcggcgctgctggcgttcctgcgcatccgcgtgctcgaatacgagaacgcccacgtcgcgccggacgaatggctggtcagcttcgaggagatccgagcggcgctcgccaccggcgccgggtacctcgcctcgcgcaacgacgaggagggcgtgctcaggcaggtgggcgcgatcgtgtccgtcatgtgcacgtacggctatctcaggcagctcgacgatgacgagacgatgtaccgcatcacgccgctggtgccggtggtgctggaccgtcagctggcggacagctggctcgcagtcgcggaccgggacgacgatgacgagccggccggtgacatggccccggccggctcgcggtctgcagccggcgatacgtcgaacgccgatgcgagcggcgccgatgacgatggcgattcggacgacgcgggacccgacgccgaactgttcgaggctccgctgttcgatgacgacgccgatgcggacgccgccgaggacatcaggggcgccgatgatgccaatggcgcgaacgacagcggcattgacgacgagaccgcctcggacggcggcactgcacgggaaggggagtga

SEQ ID NO: 46146 - DNA, 3591 bp, Bifidobacterium bifidum
atgagcggcaaggacatgcagatgatcgccgaccgatggatgatggaaagcaggaggctcgtcaactggggatcctatgagggctaccatgagttccgtccctccacggactcgcaactgccggtgacgttgctcgccggcgcgagcgaatccggcaagtcgacgctggtcgacgcgcagatatcgctgctctacccgaccggcacgcccttcaacaaggcgtcgaattcggggcgttcggaacgaagcgactacacctacctgcgcggcatgatcggcgtgggaggctccgacggcgtcgacgaaccgatgtacctgcgcggccgggacgagtccggcgcgccccggtccatatggggcgcgatcgtcgacacctaccgcaacttcaccaccggtcagatactgtcctgcggcaagttcctctatctgatgcccggcgacgggcgcggcgacgtccgacggctgtacctggcatgggacaagccgatcgacccgcgccgcatggacgtgttccgcgagtcgtcgttcacgcccacgcagctgaaatccacgtatccggggtgcgtcaccttcccgaacgccgaggcgttccacacccatatttgggatgtcatgggcctgagcgcggaggcatgccgtctgctggcccgcatccagtcggccgacgccccctcccgccttgacgacatcttcaaacagggcgtgctgggcgtgcccgaggcgctggacctggcccgtgcgaccgtggaggattacgagcgttacgacgcgaacttccgaagcatggaggaaaagaccagacgcatgggcaagttgcgtgccatcaccgccagctatgacgactacgagtcggcccgtgacgcggtccactcgttcgacgcggtgaacccggccacgaagtccggctcggcgacgatccgagcatgggcgatccgccgcatgatcggcgaggtcaacgaacggcagccgctcgacaggcgtctgcgtgacgagcgacgcagtgaggcgcgggctgccggcaagcgcatcgaaagcctgcgcacccgcatcgacgcggtgcgcgagcgcatgcgaggcctcgacggcggcgacctgacacggctcgacgcggaaatgcggcaggcggaacgcgcgctggcggacatcaccgccggcagacagcgcatcgggcgcatgttcgaggcggccggcgaggagttccccaaagacgagcacgcgtgggacgagcggcgcatcgaggccgtgacgttcatgcgctcatatgagcagcgcaagggactgctggacgacatgcgcaaccagacgtacgccgcgcacgcgtccgtcaagcagacgctgcagcggctgaacgacgattacgaacgccagaaatcgcagcgcacccgcatctcccgccagatggacgagacccgcgccatgctgtgccgggccaccgggctgggcccgagcgaactgccgtacgtcgcggagctcatggacgtgcgcgaggatcaggagcattggcgcctcgccatgaacgccgcatacggatccatggcccagaccatcctcgtcgacaagcgccatgagcgtggattcgcagccaaggtcagcgccatcgacccgcacgccatggcgcggcgcacctggcagttcgtcgacaccgaacgcgggggagccgggaacgggcccggcggcgcgaacacgggtgcgaccggcggaacggccggagaggtgtggctgtcctcgaagctgcgctaccgcgaggattccccgttcgccggctggctgcgcgagcagaccagctccgagcgtctcgacgccctgtgcgtcgacggcatcgacgactccgaccatgccgtgcggcaggtgcaggccgacgggcagatcaaatccggcaaacgcggccagcatggcatcaaggaccgtcagcaggtcatcggattcgtcaacgaaagctatttggcgcaactgcgcacgcgcatccaggacgcgcaacgccaatgcgacgagaccgcgcaatcgtacgcgagcgcgaaggaacaggccgaccgcctgcagcgagagcgcgaactcgccgaccagctcgcatacaccgcatgggagaagatcgacgagaacagcgcgaaggcggcgatcgccgacatcgaacgcaccatcgcctcggtcaggaacaatcccaagctcgccgaactcgacacgttgcaggagtcgctgtccaaggagctcgaccgctcgcagcgccagcgcatcgacatcgaacggcaggccgagctcgccgatcaggcggtgaacgcagcgcaggcatggctcgacgagcatgccgcgcagccgcagccgcaaccgcagacgcggccgctcgatggggaagcggcggacgtttcgccaaaagccgtcacgaacggacggactctcctgacggacgaggtggaggaggcgctcgccgaatcgtatgagcagcgtctctccggtctgggggatgcgacgacccgcgcccacatgatcatcggcgcgggggcgccgcagcgtatggctcagggggataccttcgccgaccgtatcatcgccggcatcggcaaggacctggaggcgcgcgtctccatgctcgaaggtcgtgcggcatcggcccgcaccgccgtcgaggcgcggatgggcgcttatatcgagatgtatgcgggcggtgacgatacgatcgccgccagcgtggacgactaccggtattaccaggacgagttggaaagcctttcgaagctcgccaccgtcgaagccaccgccgtcgaataccacaactgcctcgacaagctgctgatgagcttcctgaccatcaaacgcgcgatagacaccgacgccggagatatccacgaccagctggaacgcatcaacgcgatgctggacggccagcagttcggcccgcgccacggcagcctgtccctgcacgcggacgtgcggcgccccgagcgcgcgttctggtcggccctgacccgcgtgatcggcaccctcaacgaccgcaaggcggcacagacggatgacgatcttgacggggcccggtgcgcgttcgcgtcctgcgccgcgatgatcgacatgctgcgccgcgagatcgggcagatcagggacgtcaacggcgtgaaaagctacggcgcccgcaacctcgacccgcggtgccgatcctcgttctacgcgctcgtgcgccactcggacgggcaggtcgaacgcatcacctcgaccggcggacggtccggcggcgccctgcaggagctgacctcgttcgtgtacggcgcggcgctgatctacctgctcggcggcggcatggacaacaagctcaagccttcctacacgacgctcttccttgacgaggcgctcatcaaggccgacggccggtatacgcggcgcgcgctgtccgtactgccgagactgggtttccaggtcatcgtctccgcccctgaaagcaagacgggcgagatactggaggtctccaccaaggcatacgtgacccgcaaggaccccgacaccggctacaccacgctgcacgaagccagactggacggcatcgatgagacggaaggcgcagatgagccggaaggtaccgtcgagtcggatgacgccgccgaatag

SEQ ID NO: 46147 - DNA, 1521 bp, Bifidobacterium bifidum
gtgggtgatatccgacgggagatggaacggctgaggccggtctatgaaaccggcgtgctgagactgctgctccgtcagaattcgatgatgtacgtggcgctgctccgcgcggccttcgacccgttgaccggcgagctgccccgtgagaccctggaggaaagcttctcgcaaagcctgtcccggctcgtcgactccggcgaataccagctcagggaggatcagaccatcgcggacgcctcccggcgcatcctcgccgacctgacccgtgagggcgatgacgattacgcatggctcgccaactcgcatgacgccgcatcgcaccggttcctgtaccgtctcaccgcccgcgcccatcgtgcgatcgaggcgctgtcgcggcttgaggatgactcccgcacgctgtcgggcgcgcaggcgaactcgatcatcatggagatcgagcatgcgcgcatgcagcttaccgccgaccccggcgagcgcgtggcgttgctcaaccgggagatcaaggcgcgcaaacacgagatacgtcagatacgccacggtcagcggcaggcggcgctcaccgaatcgcaggtcgaggacgtgattgcagtgattcacaacacgctgcgcggcgtgcccatagacctgcgtgaactcgtgttgaacgaacgggacaacggtgacgcgctccgccgccgcatgcaggcgggcgacatgagcgtcgacgacatcctgacctcgtaccacgacgaataccgcaggtccttcagcgagtccgacagcggaagacgcttcgaggacgcgttccaggtgatcatcaccgacgaaggacggcagcagatcgacgcggccttgcgcgacattgcccacacgccgtatctggccggcgagtccggcgtcctgctcgatcaggtgcgtgccgagctttcgcgcatctatgacggcatcgaggcggtgcgtcgccagatgcgcgtatccgacgaggcgatcagccgtctggtgcgacagcagaccgatacccgataccgcacgatgctcggcaagctcaaccgtctgtatgcccacgtcaacgccgacgcgaaggcgcatcagggcgacgatgcgagaccgtaccggaccgataccgcggccggcaggttccctccgctgccgtcgcgccccgcgcgcccgatggtacgaacgaccaccccgggattgtccgtaccgcagacaccgggcgatgcgaccgcgcccgacctgcgttcgatgatcgacaacgggggaccgcggctgcggcgcatggccgcgctcatcctcgaatcgcccgtctacgcggacgacgggaacggcgccatcgacatcgtcgccagcttcaacgggctgccgaaagccgagcggaaggaaagcgagctcgtcggtttcctgggagagctcggctgcggggacggagccggcgtcgcatggcattgcatatcggcagacggaagcccgagggactggatcaccggcccagtgctcgcacaagaggatgaattgcacgacatcgtgaaggaggactga

SEQ ID NO: 46148 - DNA, 1104 bp, Bifidobacterium bifidum
atgagcgacctgacgaacgacgccgcccagccggacgcggacatggacatgattgacgacgacatgaccggcaccggcagtgccgataccgacagtgccagtaccggcgcggatgacatggatgcggtggacgtcgaatacgatggcgcggacgcggaaggcgcggtcaacccatacgccctgttcgagggcgacacgggcgacatgaccgccgactcgcgcatggtggcgatcatgctcaaacgcgagcgctacatcagcggacggttctatgacctggcgctcgacaaccgcgcggcggtcgtccgttcgctcaacaacgacctgctcgatctggtcgtcaacgagcactaccgcgtcatgtacgccaccgcggtgagcgggccggacatgacgctgcgcgcgctcaagacccgtgcgagcctcaaacgtgaggaggcggcgctgctggcgttcctgcgcatccgcgtgctcgaatacgagaacgcccacgtcgcgccggacgaatggctggtcagcttcgaggagatccgagcggcgctcgccaccggcgccgggtacctcgcctcgcgcaacgacgaggagggcgtgctcaggcaggtgggcgcgatcgtgtccgtcatgtgcacgtacggctatctcaggcagctcgacgatgacgagacgatgtaccgcatcacgccgctggtgccggtggtgctggaccgtcagctggcggacagctggctcgcagtcgcggaccgggacgacgatgacgagccggccggtgacatggccccggccggctcgcggtctgcagccggcgatacgtcgaacgccgatgcgagcggagccgatgacgatggcgattcggacgacgcgggacccgacgccgaactgttcgagctccgctgttcgatgacgacgccgatgcggacgccgccgagaacatcaagggcgccgatgatgccaatggcgcgaacgacagcgacattgacgacgagaccgcctcggacggcggcactgcacgggaaggggagtgacgatgagcggcaaggacatgcagatgatcgccgaccgatggatgatggaaagcaggaggctcgtcaactggggatcctatga

SEQ ID NO: 46149 - DNA, 3570 bp, Bifidobacterium bifidum
atgatcgccgaccgatggatgatggaaagcaggaggctcgtcaactggggatcctatgagggctaccatgagttccgtccctccacggactcgcaactgccggtgacgttgctcgccggcgcgagcgaatccggcaagtcgacgctggtcgatgcgcagatatcgctgctctacccgaccggcacgcccttcaacaaggcgtcgaattcggggcgttcggaacgaagcgactacacctacctgcgcggcatgatcggcgtgggaggctccgacggcgtcgacgaaccgatgtacctgcgcggccgggacgagtccggcgcgccccggtccatatggggcgcgatcgtcgacacctaccgcaacttcaccaccggtcagatactgtcctgcggcaagttcctctatctgatgcccggcgacgggcgcggcgacgtccgacggctgtacctggcatgggacaagccgatcgacccgcgccgcatggacgtgttccgcgagtcgtcgttcacgcccacgcagctgaaatccacgtatccggggtgcgtcaccttcccgaacgccgaggcgttccacacccatatttgggatgtcatgggcctgagcgcggaggcatgccgtctgctggcccgcatccagtcggccgacgccccctcccgccttgacgacatcttcaaacagggcgtgctgggcgtgcccgaggcgctggacctggcccgtgcgaccgtggaggattacgagcgttacgacgcgaacttccgaagcatggaggaaaagaccagacgcatgggcaagttgcgtgccatcaccgccagctatgacgactacgagtcggcccgtgacgcggtccactcgttcgacgcggtgaacccggccacgaagtccggctcggcgacgatccgagcatgggcgatccgccgcatgatcggcgaggtcaacgaacggcagccgctcgacaggcgtctgcgtgacgagcgacgcagtgaggcgcgggctgccggcaagcgcatcgaaagcctgcgcacccgcatcgacgcggtgcgcgagcgcatgcgaggcctcgacggcggcgacctgacacggctcgacgcggaaatgcggcaggcggaacgcgcgctggcggacattaccgccggcagacagcgcatcgggcgcatgttcgaggcggccggcgaggagttccccaaagacgagcacgcgtgggacgagcggcgcatcgaggccgtgacgttcatgcgctcatatgagcagcgcaagggactgctggacgacatgcgcaaccagacgtacgccgcgcacgcgtccgtcaagcagacgctgcagcggctgaacgacgattatgaacgccagaaatcgcagcgcacccgcatctcccgccagatggacgagacccgcgccatgctgtgccgggccaccgggctgggcccgagcgaactgccgtacgtcgcggagctcatggacgtgcgcgaggatcaggagcattggcgcctcgccatgaacgccgcatacggatccatggcccagaccatcctcgtcgacaagcgccatgagcgtggattcgcagccaaggtcagcgccatcgacccgcacgccatggcgcggcgcacctggcagttcgtcgacaccgaacgcgggggagccgggaacgggcccggcggcgcgaacacgggtgcgaccggcggaacggccggagaggtgtggctgtcctcgaagctacgctaccgcgaggattccccgttcgccggctggctgcgcgagcagaccagctccgagcgtctcgacgccctgtgcgtcgacggcatcgacgactccgaccatgccgtgcggcaggtgcaggccgacgggcagatcaaatccggcaaacgcggccagcatggcatcaaggaccgtcagcaggtcatcggattcgtcaacgaaagctatttggcgcaactgcgcacgcgcatccaggacgcgcaacgccaatgcgacgagaccgcgcaatcgtacgcgagcgcgaaggaacaggccgaccgcctgcagcgagagcgcgaactcgccgaccagctcgcatacaccgcatgggagaagatcgacgagaacagcgcgaaggcggcgatcgccgacatcgaacgcaccatcgcctcggtcaggaacaatcccaagctcgccgaactcgacacgttgcaggagtcgctgtccaaggagctcgaccgctcgcagcgccagcgcatcgacatcgaacggcaggccgagctcgccgatcaggcggtgaacgcagcgcaggcatggctcgacgagcatgccgcgcagccgcagccgcaaccgcagacgcggccgctcgatggggaagcggcggacgtttcgccaaaagccgtcacgaacggacggactctcctgacggacgaggtggaggaggcgctcgccgaatcatatgagcagcgtctctccggtctgggggatgcgacgacccgcgcccacatgatcatcggcgcgggggcgccgcagcgtatggctcagggggataccttcgccgaccgtatcatcgccggcatcggcaaggacctggaggcgcgcgtctccatgctcgaaggtcgtgcggcatcggcccgcaccgccgtcgaggcgcggatgggcgcctatatcgagatgtatgcgggcggtgacgatacgatcgccgccagcgtggacgactaccggtattaccaggacgagttggaaagcctttcgaagctcgccaccgtcgaagccaccgccgtcgaataccacaactgcctcgacaagctgctgatgagcttcctgaccatcaaacgcgcgatagacaccgacgccggagacatccacgaccagctggaacgcatcaacgcgatgctggacggccagcagttcggcccgcaccacggcagcctgtccctgcacgcggacgtacggcgccccgagcgcgcgttctggtcggccctgacccgcgtgatcggcaccctcaacgaccgcaaggcggcacagacggacgacgatcttgacggggcccggtgcgcgttcgcgtcctgcgccgcgatgatcgacatgctgcgccgcgagatcgggcagatcagggacgtcaacggcgtgaaaagctacggcgcccgcaacctcgacccgcggtgccgatcctcgttctacgcgctcgtgcgccactcggacgggcaggtcgaacgcatcacctcgaccggcggacggtccggcggcgccctgcaggagctgacctcgttcgtgtacggcgcggcgctgatctacctgctcggcggcggcatggacaacaagctcaagccttcctacacgacgctcttccttgacgaggcgctcatcaaggccgacggccggtatacgcggcgcgcgctgtccgtactgccgagactgggtttccaggtcatcgtctccgcccctgaaagcaagacgggcgagatactggaggtctccaccaaggcatacgtgacccgcaaggaccccgacaccggctacaccacgctgcacgaagccagactggacggcatcgatgagacggaaggcgcagatgagccggaaggtaccgtcgaatcggatgacgccgccgaatag

SEQ ID NO: 46150 - DNA, 1521 bp, Bifidobacterium bifidum; identical to SEQ ID NO: 42268

SEQ ID NO: 46151 - DNA, 1044 bp, Bifidobacterium bifidum; identical to SEQ ID NO: 42269

SEQ ID NO: 46152 - DNA, 3591 bp, Bifidobacterium bifidum; identical to SEQ ID NO: 42270

SEQ ID NO: 46153 - DNA, 1521 bp, Bifidobacterium bifidum
gtgggtgatatccgacgggagatggaacggctgaggccggtctatgaaaccggcgtgctgagactgctgctccgtcagaattcgatgatgtacgtggcgctgctccgcgcggccttcgacccgttgaccggcgagctgccccgtgagaccctggaggaaagcttctcgcaaagcctgtcccggctcgtcgactccggcgaataccagctcagggaggatcagaccatcgcggacgcctcccggcgcatcctcgccgacctgacccgtgagggcgatgacgattacgcatggctcgccaactcgcatgacgccgcatcgcaccggttcctgtaccgtctcaccgcccgcgcccatcgtgcgatcgaggcgctgtcgcggcttgaggatgactcccgcacgctgtcgggcgcgcaggcgaactcgatcatcatggagatcgagcatgcgcgcatgcagcttaccgccgaccccggcgagcgcgtggcgttgctcaaccgggagatcaaggcgcgcaaacacgagatacgtcagatacgccacggtcagcggcaggcggcgctcaccgaatcgcaggtcgaggacgtgattgcagtgattcacaacacgctgcgcggcgtgcccatagacctgcgtgaactcgtgttgaccgaacgggacaacggtgacgcgctccgccgccgcatgcaggcgggcgacatgagcgtcgacgacatcctgacctcgtaccacgacgaataccgcaggtccttcagcgagtccgacagcggaagacgcttcgaggacgcgttccaggtgatcatcaccgacgagggacggcagcagatcgacgcggccctgcgcgacatcgcccacacgccgtatctggccggcgagtccggcgtcctgctcgatcaggtgcgtgccgagctttcgcgcatctatgacggcatcgaggcggtgcgtcgccagatgcgcgtatccgacgaggcgatcagccgtctggtgcgacagcagaccgatacccgataccgcacgatgctcggcaagctcaaccgtctgtatgcccatgtcaacgccgacgcgaaggcgcatcagggcgacgatgcgagaccgtaccggaccgataccgcggccggcaggttccctccgctgccgtcgcgccccgcgcgcccgatggtacgaacgaccaccccgggattgtccgtaccgcagacaccgggcgatgcgaccgcgcccgacctgcgttcgatgatcgacaacgggggaccgcggctgcggcgcatggccgcgctcatcctcgaatcgcccgtctacgcggacgacgggaacggcgccatcgacatcgtcgccagcttcaacgggctgccgaaagccgagcggaaggaaagcgagctcgtcggtttcctgggagagctcggctgcggggacggagccggcgtcgcatggcattgcatatcggcagacggaagcccgagggactggatcaccggcccagtgctcgcacaagaggatgaattgcacgacatcgtgaaggaggactga

SEQ ID NO: 46154 - DNA, 1023 bp, Bifidobacterium bifidum
atgagcgacctgacgaacgacaccgcccagccggacgcggacatggacatgattggcgacgacatgaccggtaccgacagtgccgataccgacagtgccagtaccggcgcggatgacatgggtgcggtggacgtcgaatacgatggcgcggacgcggaaggcgcggtcaacccatacgccctgttcgagggcgacacgggcgacatgaccgccgacgcgcgcatggtggcgatcatgctcaaacgcgagcgctacatcagcggacgtttctatgacctggcgctcgacaaccgcgcggcggtcatccgttcgctcaacaacgacctgctcgatctggtcgtcaacgagcactaccgcgtcatgtacgccaccgcggtgagcgggccggacatgacgctgcgcgcgctcaagacccgtgcgagcctcaaacgtgaggaggcggcgctgctggcgttcctgcgcatccgcgtgctcgaatacgagaacgcccacgtcgcgccggacgaatggctggtcagcttcgaggagatccgagcggcgctcgccaccggcgccgggtacctcgcctcgcgcaacgacgaggagggcgtgctcaggcaggtgggcgcgatcgtgtccgtcatgtgcacgtacggctatctcaggcagctcgacgatgacgagacgatgtaccgcatcacgccgctggtgccggtggtgctggaccgtcagctggcggacagctggctcgcagtcgcggaccgggacgacgatggcgagccggccggtgacatggccccggccggctcgcggtctgcagccggcgatacgtcgaacgccgatgcgagcggcgccgatgacgatggcgattcggacgatgcgggacccgacgccgaactgttcgaggctccgctgttcgatgacgacgccgatgcggacgccgccgaggacatcaggggcgccgatgatgccaatggcgcgaacgacagcggcattgacgacgagaccgcctcggacggcggcactgcacgggaaggggagtga

SEQ ID NO: 46155 - DNA, 3591 bp, Bifidobacterium bifidum
atgagcggcaaggacatgcagatgatcgccgaccgatggatgatggaaagcaggaggctcgtcaactggggatcctatgagggctaccatgagttccgtccctccacggactcgcaactgccggtgacgttgctcgccggcgcgagcgaatccggcaagtcgacgctggtcgacgcgcagatatcgctgctctaccctaccggcacgcccttcaacaaggcgtcgaattcggggcgttcggaacgaagcgactacacctacctgcgcggcatgatcggcgtgggaggctccgacggcgtcgacgaaccgatgtacctgcgcggccgggacgagtccggcgcgccccggtccatatggggcgcgatcgtcgacacctaccgaaacttcaccaccggtcagatactgtcctgcggcaagttcctctatctgatgcccggcgacgggcgcggcgacgtccgacggctgtacctggcatgggacaagccgatcgacccgcgccgcatggacgtgttccgcgagtcgtcgttcacgcccacgcagctgaaatccacgtatccggggtgcgtcaccttcccgaacgccgaggcgttccacacccacatttgggatgtcatgggcctgagcgcggaggcatgccgtctgctggcccgcatccagtcggccgacgccccctcccgccttgacgacatcttcaaacagggcgtgctgggcgtgcccgaggcgctggacctggcccgtgcgaccgtggaggattacgagcgttatgacgcgaacttccgaagcatggaggaaaagaccagacgcatgggcaagttgcgtgccatcaccgccagctatggcgactacgagtcggcccgtgacgcggtccactcgttcgacgcggtgaacccggccacgaagtccggctcggcgacgatccgagcatgggcgatccgccgcatgatcggcgaggtcaacgaacggcagccgctcgacaggcgtctgcgtgacgagcgacgcagtgaggcgcgggctgccggcaagcgcatcgaaagcctgcgcacccgcatcgacgcggtgcgcgagcgcatgcgaggcctcgacggcggcgacctgacacggctcgacgcggaaatgcggcaggcggaacgcgcgctggcggacatcaccgccggcagacagcgcatcgggcgcatgttcgaggcggccggcgaggagttccccaaagacgagcacgcgtgggacgagcggcgcatcgaggccgtgacgttcatgcgctcatatgagcagcgcaagggactgctggacgacatgcgcaaccagacgtacgccgcgcacgcgtccgtcaagcagacgctgcagcggctgaacgacgattacgaacgccagagatcgcagcgcacccgcatctcccgccagatggacgagacccgcgccatgctgtgccgggccaccgggctgggcccgagcgaactgccgtacgtcgcggagctcatggacgtgcgcgaggatcaggagcattggcgcctcgccatgaacgccgcatacggatccatggcccagaccatcctcgtcgacaagcgccatgagcgtggattcgcagccaaggtcagcgccatcgacccgcacgccatggcgcggcgcacctggcagttcgtcgacaccgaacgcgggggagcagggaacgggcccggcggcgcgaacacgggtgcgaccggcgggacggacggagaggtgtggctgtcctcgaagctgcgttaccgcgaggattccccgttcgccggctggctgcgcgagcagaccagctccgagcgtctcgacgccctgtgcgtcgacggcatcgacgactccgaccatgccgtgcggcaggtgcaggccgacgggcagatcaaatccggcaaacgcggccagcatggcatcaaggaccgtcagcaggtcatcggattcgtcaacgaaagctatttggcgcaactgcgcacgcgcatccaggacgcgcaacgccaatgcgacgagaccgcgcaatcgtacgcgagcgcgaaggaacaggccgaccgcctgcagcgagagcgcgaactcgccgaccagctcgcatacaccgcatgggagaagatcgacgagaacagcgcgaaggcggcgatcgccgacatcgaacgcaccatcgcctcggtcaggaacaatcccaagctcgccgaactcgacacgttgcaggagtcgctgtccaaggagctcgaccgctcgcagcgccagcgcatcgacatcgaacggcaggccgagctcgccgatcaggcggtgaacgcagcgcaggcatggctcgacgagcatgccgcgcagccgcagccgcaaccgcagacgcggccgctcgatggggaagcggcggacgtttcgccaaaagccgtcacgaacggacggactctcctgacggacgaggtggaggaggcgctcgccgaatcatatgagcagcgtctctccggtctgggggatgcgacgacccgcgcccacatgatcatcggcgcgggggcgccgcagcgtatggctcagggggataccttcgccgaccgtatcatcgccggcatcggcaaggacctggaggcgcgcgtctccatgctcgaaggtcgtgcggcatcggcccgcaccgccgtcgaggcgcggatgggcgcctatatcgagatgtatgcgggcggtgacgatacgatcgccgccagcgtggacgactaccggtattaccaggacgagttggaaagcctttcgaagctcgccaccgtcgaagccaccgccgtcgaataccacaactgcctcgacaagctgctgatgagcttcctgaccatcaaacgcgcgatagacaccgacgccggagacatccacgaccagctggaacgcatcaacgcgatgctggacggccagcagttcggcccgcaccacggcagcctgtccctgcacgcggacgtacggcgccccgagcgcgcgttctggtcggccctgacccgcgtgatcggcaccctcaacgaccgcaaggcggcacagacggacgacgatcttgacggggcccggtgcgcgttcgcgtcctgcgccgcgatgatcgacatgctgcgccgcgagatcgggcagatcagggacgtcaacggcgtgaaaagctacggcgcccgcaacctcgacccgcggtgccgatcctcgttctacgcgctcgtgcgccactcggacgggcaggtcgaacgcatcacctcgaccggcggacggtccggcggcgccctgcaggagctgacctcgttcgtgtacggcgcggcgctgatctacctgctcggcggcggaatggacaacaagctcaagccttcctacacgacgctcttccttgacgaggcgctcatcaaggccgacggccggtatacgcggcgcgcgctgtccgtactgccgagactgggtttccaggtcatcgtctccgcccctgaaagcaagacgggtgagatactggaggtctccaccaaggcatacgtgacccgcaaggaccccgacaccggctacaccacgctgcacgaagccagactggacggcatcgatgagacggaaggcgcagatgagccggaaggtaccgtcgagtcggatgacgccgccgaatag

SEQ ID NO: 46156 - DNA, 1521 bp, Bifidobacterium bifidum LMG 13195; identical to SEQ ID NO: 43285

SEQ ID NO: 46157 - DNA, 1053 bp, Bifidobacterium bifidum LMG 13195; identical to SEQ ID NO: 43286

SEQ ID NO: 46158 - DNA, 3591 bp, Bifidobacterium bifidum LMG 13195; identical to SEQ ID NO: 43287

SEQ ID NO: 46159 - DNA, 1470 bp, Stenotrophomonas maltophilia
atgaagcaccgcgaacgcatctcccgttaccgccatctgcgcgaacagccccagtggaagctgcttgccgccgaccacgccccggaaatcatcggcctgctgcaggggctgctgatggacggcgagcgcacgctgccgtcgtcggtgctcaacgagcgcctgcagcgtgcgctggaccagctcaacggcgacgaactgtcgcgtgagctgccgcgtaccgcgcaggcctacatcgcgcactggctggcccagggctggctggaacgccgtctgcccgaaggcgccgaccaggagcagtacgagctgtcgactgcggcactgcaggccatccgcttcgccgatggtcttgagcaggcgcgcgtggccgccaccgaaagccgcctggcgctggtcatcgaacagctctcgcagttggccgcgcagaccgagtccgacccggatgcacgcctgtcagcactgcgcgacgagcgcgaccgcatcgacgccgagatcgcccgcgtcggtgccggccgcgtggtcgcgctggatggcaagcgcgcgctggagcgtgcgcgccagatcatcggcctggccgacgagctgaccgaggatttccgtcgcgtgcgcgacgatttcgagcagctcaaccgcgacttccgcgaacgcatcatcgacgacgagggcgagcgcggcgatgtgctgtcgcagctgttcgaaggcgtggatgtgatcggcgagagcgatgccggtcgcagcttccaggccttctggcgcctgctcaacgacgccgaacagagcgcccagctcgatgccgcgctggaagcggtgctggcgcgtggcttcgcccgccgcctggaccgcaatgaacgcaacttcctgcgtggcttcaccagcaccatgctcgagcgcggtggccaggtgcacgacgtgctgcagaatttcgcgcgcagcctgcgtggcttcgtgcagagccgtggctatctggaacagcgccgcctcaaccagctgctgaagcaggcgcagtccgaagcgctggccctgcgcgacgaattccccgcacaacgcggcatcggccgcgacctgcagctgaccaccagccgcctgcgctcgtggtcgcagtggaagctgcacgatccgcgcagcgcccaggtcgatggcaacgtcgagtacaacgacgccgcagccatcagcctggagagcgtcggtgatctggtcgcttcgtctgaaatcgacttccgcaccctgcgccgcgacctgcacgacctgctcgatgcacagccgcggctcagcatcgcccaggcactgtcgcagcgcgaagcgccgcagggtcttggcagcgtcatcggctacctgtcgctgggcacgcgcttcggcaacgtgatcgctggtgagcaggagcttgccgaatggcgtggtggcgacggccaggtccgtcgcgcccgcatcccgctggtttggttcacccaggagagacgccatgagctggcatga

SEQ ID NO: 46160 - DNA, 702 bp, Stenotrophomonas maltophilia
atgagctggcatgaagatcccatcgacgcaccgcaggccgacgtggcggaagacgcctacgaagccgaaccggtggcggccgtggcgcagccccgccgtggcaatgacgtgtattacctgggcgacaccgggcgcctgccgctggatgcacgccgcgcgctgtgccagctgctgatcggccccagcatcgaccagctgcgccacgccaagctgtggccggcactgatccgcagcgaggcggccatccgctcctcgctggcggacctgttcctggaactggtgctcgaccgtgacagcggcgtggccttcacccgccaggccgataccgaagacgtggatgcgccggtgctgctgcgcacctcgccgctgaccttcatcgattcggtgctgctgctgtacctgcgccagcagctggccgaggccgatgcgcgcggcaaccgcgcggtggtcgccgacgccgagatggccgaagcgctggccatctacgagaagaacctgtccaccgaccgcgccggcttcaaccgccgtgtcgcctcggcggtgcagaagatgaaggacaaccacatcctgacccgcctcagcggccaggaagaccgccacgaagtctcgccggcgctgaagctgctgttctccgccgaagacgtatcccagctttcggcggtctaccgccagctgcgtgaaaccccggccgccgaggcctga

SEQ ID NO: 46161 - DNA, 3381 bp, Stenotrophomonas maltophilia
atggctatctccaagcacactcccgccctgttcaacgaaggcctgccggacccgcgcctgcagcagttccgcatgcgtcgcctgcaggtacacaactggggcacgttcaacggactgaccgaagtaccgatcgccgagcgtggcttcctgttcgtcggccgttccggctcgggcaagtcgaccctgctcgatgccatgtccgcgctgctgacgccgccggccatcgtcgatttcaacgccgccgcgcgtgaagccgagcgcagtggccgcgaccgcaacctggtgtcctacgtgcgtggcgcgtgggccgaccagcaggacagcggcactggcgaaatcgccacccagtaccttcgcaagggcgcgacctggactgcgctggtgctggagtaccgcgccggcgatggccgcgtggtcagcctcgtgcgcctgctgtggatctccggtaacggaacctcggccggtgacgtgcgcaagcactacatgatcgccgagcgtccgttcgacatcgcgaaggatcttggcggcttcgacctggacctgcgcaagctcaagcagaagctgtccgacctgcaccacttcgacaccttctccggctacgccgagcgcttccgcgacctgctcggcatcgacaacgagatggcgctgcgcctgctgcacaagacgcagtcggcgaagaacctgggcgacctcaacgtcttcctgcgcgacttcatgctcgacacgccgaagaccttcgacgccgccgagcgcctggtcagcgacttcgccgaactcgatggcgcgcaccaggccgtggtcaccgcccgccgccaggtggagaccctgctgccggcacgcgcctactacaacgacctgaaggaaatgcaccgccggcgcggcgacgacgaagccctcaagcttggcgtcgacagcttccgtgaaagccgccgccaggcgctgatcgaagcgcgcctgcgcgagatggacgtgcgtgaccgtggcctgctcggggaagaagcccagcgccgtgccgcactggacaaccacaccgagcgcctggccgaactggaactgcagcgtcgccagcagggcggtgagcgcatcgaggaactggaacgcgagcagggccgcgccgaagccgagcgtgaccgccgccaagccaagcgcgagcaggcaagcctggccgcgcagcagctgggggctgaacttccggacgacgcacacggcttcgccgagctggtcgagcgtgcgcagaacgaactgcaggaccgccagcgtgcctcttcggcgctggacgatgcgatcagcgatcgcctgggtggcaagcgcgatgacgagcgccgtttcggcgaagtccgtgcggaactcgaagcgatgcagcgcacgccctccaacatcccggcgccgatgcagaagctgcgcgcgcgcctggccgaggaaaccggcattgccgaggcggcgctgccgttcgtcggcgagctgatccaggtccgctcggaagagcagggctggcagggtgccatcgagcgtgtgctgggtggcttcgcgctgtcgctgctggtcgatgacaagcactacaacgacgtcgccgagtgggtgaatcgcactcacctgggcatgcgcttcacctactaccgtgtgcgccgcaacgatgatgcgttcgcgcgcgagccgtcggcgaagtcgctgctgcacaagctggagctgcgcgagcacgtattcgaaagctggctgcgccgtgagctcggcaagcgcttcgactacgagtgcgtggatgccaagcagctgcgcaacgtcgaccgcggcatcacccgagaaggccaggtcaagcatcccggcgaccgcttcgagaaggacgaccgcagtgcggtgggcgaccgccgtcgctggatcctcggcttcaacaaccacgacaaggtgggcgccttcgagcgcgaagcacaggaactggccaagcgcatcgccagctgcgagaccgacatcgcgcgcctgcgtgggcagcgtgaccgcgacaacgaacgtcgcctggcctgccacgagctggtcagcatcagctggaacgagatcgacatcgccgccccgcagcagcgcctgaccgatatcgaggccaccctgcgcgacctgcgcgaaggcaatgccgacctcgccaggctggccaagcagatcgacgccgtgcgcgccgacatcgagcaggcccgccgcacctatgaagacgtccgcgtcgagcgcgggcagctggtcaaggaacgcgatcgcctcgaccgcgctcgccagcagagccgtgcgctggtgctgccgagcctggcccaggagcaggaagccgggctcgccgagcgcctgcaggagcagggcccgctcagcctggaaacgctggaggcgcacatgcgccaggtcagcaacgcgctgaacgagcagctgtcgacctcgcagcaggacctcaaccgcatcgagaaccagctgatcggttgcttccgtcgcttcatccagcagtggccggaggaatcgggcgacttcaccgtatcggtggcctcggccgaggatttccttgcccgcctcgagcgcctggagcgcgacggcctgccgcagcacgaagagcgcttcttcgatctgctgcagaaccagagcaagaacaacctgctggccctgcagcgccacagcgccgaggcccgcaagtcgatcggccagcgcctggacgaagtgaacgccagcctggagcaggtgccgttcaaccgtggcacgctgctgaccatcgaactgagcgaccgccgcctgccggaagtcggcgagttccacctgcagctgcgcgaggtgctggcgcagcagcagaccgagcagcgcgagctggccgaatcgcagttcaccgtgctgcgccagctggtcaaccgcctgggttcgcaggaaggtgaggacaagcgctggcgcgagctggtgctggacgtacgcatgcacgtggagttcatcggcgtcgagctggatgcggaaacgcgccagcaggtcgagatctaccgtagtggcgcgggcaagtccggtggccagcgccagaaactggccaccacctgcctggctgcggcactgcgctaccagctcggcggcgccgacagccagctgcccagctacgccgccgtcgtgctcgacgaagccttcgacaaggccgacaacgagttcaccgcgctggcgatgaacatcttcgacaacttcggtttccagatggtggtcgccaccccgctgaagtcggtgatgacgctggagccgttcatcggtggcgcctgcttcgtcgagatcagcggccgccacgactccggcgtgctgctgatcgagtacgacgaagaaggcaagcgcctgaagctgcccgagcgcgccgccagcaggccaacgaaccggaagaagccgaacgcctga

SEQ ID NO: 46162 - DNA, 1482 bp, Mycobacterium sp. EPa45
atcgacgtggacgacgacaccaccctgtcggccgtcgacctcctcgaaatcaaccgcgagatccagggctccccgacgatccggctgctggccgcactcaacctgggcggctacgccaccctgatggagcgccatctcaacgagggtgtgatcagcgaaaccgagctcgtcgtccgactcgaacgcgacctcgacgagctcggccggcccgcgggtgaacagtccggcctgggcctgatcaagagctgggccagtcagggctggctgcaccgggtggccgaccagcgcaccggcgtcgaacgcaatctctgctacctcacccaggatgcccgtcgcgccctggactttctgcgcggcctgcgccgccaggacacgatcgccaccggcggctcgatcaacggcatcgcgtcgcgcctcaagcagatcgccctgcgggtcggcaacgacccggtccgcatccgcgcgggcatccaggccgagatcgaggcgctgcaggcagaactcgatgcgctggaacgcggcgaggacctcgaccgctccgccgacgtcgacatgaccgacatgtacgacgaggcccacgccatcgccctgcagatggaacggctcatcaccgacatcggccagtacggcacgatgatcgagcgggccaccgccgccctcgatgagccgatcgacagcaacctggcctaccgcgaccggcagcgtcagatgtacgccgactaccaggccgcgtgggactcccagggccgcgattcgcaccgcgcgttcctgcggatgatcaacgatcccgaccagcgcgcggagttcgaggccgacgtgctcgccgtcgcgcatgccctgcccgccctcgaccccgcgctgcggaaggtgatggccgggttcttcgagctcgtcggtcagcagatcgacgaggtggagcgcatccagcagcgctgcgcgcagcgggtcaagcggttcaccgcgttcggcaccctggagcagagccgcggcgtggcccgtcagctcaacgacgcgatcggtgccgcccgcgccctgctcaagagttcgctgacggactcccgcctggacatcgaactccccctggcccggcacgcgttcagttcggttggcgcactgagcttccggatcggcgagttgtctgatccaaaacccgcccaggcagccgagggtgagctggacctgaccagcttcgcggcgctgaccacccaggtcgacgcaccggcgatgtcggagatgatcaacaccgcgctcgacgcggacggtcggctgtcgctgccggaggctgtggagatgctcgatgccgcctacctcggtcatgtcatcgtgctgtggtcgtgggcgctcaaacaaccggacgcatccacgacagccgagccggtcaccgtccggttccagtcgctcgacggacgggaccgcgagatggaggtaccgcatttggtcttcaccgaaccgatctcgagcttgttgggagccagcgcatga

SEQ ID NO: 46163 - DNA, 699 bp, Mycobacterium sp. EPa45
atgacgactaccgacgccgacatcgacttcagttcgctgccgcaggtcgatcagaccgcacgcaccccgcatcagcggcggccccgcttcgacggcgatgtgagcgagctgcccgaccgggcctgctgggcgctgcagcagctgctgacccgccgctacatcagtgccgaagccgacgccgacctgtacagctgggtgctggaataccgtgcacaactgtcggtgcggctttccgagctggatttgatgttgcgggttgtcgacggcactgacgtggcgttcgtcgaacaggcccgttacgaatccgccaggggcgtcaagcttttgcgtcgcgagcccctgggcacctacgattcgattttggcgctgcacctggcgcagatgtcacgcgccgcgggcgggcaggccgtgctgatcagccgcgaggaggtgcacgggctgttctccggggtgcggggtggcgtcgaccgcgacatcgtcaccttcaccgggcgcatcgatgcggccatcgcccggctcaccgcgctggacattctgcgcaagacccgagacgacgaagacagttacaccgtcagcccggtgatcaatgccgtgatgaccgcatcggtgatcgccgagttgcagcagcagttcgaactgctgctgtccggcagcgcatccccggaccacgacgaacaggagagcgcactcgatggctga

SEQ ID NO: 46164 - DNA, 3372 bp, Mycobacterium sp. EPa45
atggctgaacagttccacctgtcgcggctgcaggtcatcaactggggcgtgttcgacggctaccacgacatcccgttcagcgacggcggcgccctgatcgccggtgcgtccggaagcgggaagtcctcactactggacgctatttcgctcggcttcctgccgttcaaccgccgcaacttcaacgcctcgggcgacaacaccgctgccgggtccagcgcggggcgccgcaccgtcgacaagtacgtgcgcggggcttggggccagcgcagcgacggcggctcgagcaaggtgatgtacctgcgcggcgagggcacggcctggtcggccatcgccgtcagctaccgcagcaacacgggccgcacggttaccggcctggtgctgaaatggctgaccggtgagtcgcgttcggactcgtcgagccggttcgtgctggccgacggcgaccgcgacatcgaggacgtctgcaaccgctgggcggccggacgtttcgactccggggtgttcaaggacgacgagtggcggttctccaccaaggtggagtcgcagtacctcgcccagctgtatgccaccatcggcatccgtgcctccgacgccgctcagcagctgctcggtaaggccaagtcgctgaaaagcgttggtgggcttgagcagttcgtgcgcgagttcatgctggacgagccgagcagcctgacccggctgcccgatgcgctcaggcagatcgacccgctcgtggaagcacgtgagctgctggccgtcgcgcagaagaagcgcaagatcctcggcgatatcgagaagatccagcagcgctacgcctcggagtcctccgacctgggcatcatcgatctggtggaccaacccatggtccgcgcttacaccgaccacgtccggctcgcgcagtgcgggccgcagatcgagtcgatggacgccaccatcgaccagctcggaaacgagtatgaggacgtcacccggcagctgaatctggccaaggccgaaggtgattcgctcaacgcgcagatcagcggctccagcgcgagcctgggacccctgcagtcgcaactggccggcgccgaggcgcaggccgagcaggtctcgcggcgccgcgccgcttacgaggcgatgctggccgcgcaggacatcgatgttcccgacagcgccgacgagttctggaatctgcgtgaggaactcgcgaccgaggtcaccgaattgctggccaaactcgaccggggccgcgaggcgtccaccgatgccgagtacgcgcagaaggcggcccgaatcgcccgtgacgacgcggccaaggagctcaagcgcgtcgagcacgtcgggtcggcgctgcccgagttcgcgatcaccatgcgtgaacacatctgcgccgcagtcggtgtcgaccccggtgaactgccctacatcgcggagttgatggacctgcgtcccgaccagagccgctggcgggtggctgtggagaaggtgctgcgcggggttggcctgcggctgctggtgcccgacgaccggtattcggcggtgctgcgcttcgtcaacgagaccaatatgggcggacggctgcagttgcatcatgtgcgtgcctcgctcgtcggtgcggtcccggccgatgccgagccgaacacattgggcggcaagctgttcgtcgtcgacccgactcatccatgcgcggccgaggccgccgatgtcattgccgccgcgggcgaccacctctgcgtcgacaccccggatgtgttctcccggttccggcgcgccgtgactgacacgggtctgtacaaggactccgagcggctggccgtcaaggacgaccggcgcccgctcaagcagtccgactacatctaccagggtgacgtgcgggccaagatcgacgccctgaccgtcgacctcgcctgcgctgaagagacctaccagcaagcgcgccgcaaggctgacgagatcgccgcgcagcgtcagcaatggcgtgatcgggccgcggcctgcaaggcgatctgcgaacagttcccgcagtggaaccaggtcgacatcgacaccgccgatgggcacgccgaccggttgcgcgagcagttcgagctgctgctggccgacaaccccgacatcgaggcactgaccgcgcgggccgacgagtgctgggaggagatccagacgctgatgacgcggcgcggggctatccaaacccgccgcgacgatctcgacagccggcgcacccagctgcttgaacttcaggaccggctgacacccgcgttcgtctctgagccgctgaccgagctgctgaaccgctacgccgccgcgatcccggtggcgctggaagtgctcaaccccgagccgcaccgcgaggcagtgttcaacacgatccgccgggaacgtgagcagctgcgcgaaagtcgaaggcgctcatacgatgagctggctcgcatcctgaacacgttcgatacggcgttccccgatgcgattccgaacgacagcgaagtgttcgacgagcgggtgcacgactacgtggcgctgtgtcggcacatcgacgaacgggaactgcccgacgcctacgaacggatgatgcggctggtcaccgagcaggcacccgacgcgatcctcacgttgcaccgagtggccgagcaggaggcgcggcggatcagcgagcagatcgaccgggtcaacaccggcctgggtgcggtcgagttcaacagcggcacccggctgacgctgcgggcgacgccgcgcagcctgaccgcggtggccgagctgaccgagatcgtgcgggcgatctcgcggcgcatcgccgaggtcggccttggcgacaagcaggcgatcctggaccaatacgccgacatcctgcggctgcgcaaccggttggcgtcgacggcaccggaggacaaggcgtggacgcgcgacgcattggacgtccgcaaccggttcacgttcgactgcgccgagtgggatgtccggaccgaggagctgatccgtacgcacagcaatgccggcgacaactccggtggcgagcaggagaagctgatggcgttctgtcttgccggtgcgttgagcttcaacctggcgagccccgagagttcggacaacaagccggttttcgcgcagctgatgcttgacgaggcgttctcgaagtccgatccgcagttcgcgcagcaggcgctgcaggcgttccgcaagttcgggtttcagctcgtcatcgtggccacggtgcagaacgccaccacgattcagccctacatcgacagcgtgatcatggtgtccaagaccgaggccaccagccgcagtgcgcggccggtcgccacggtggtgtcgaagacgatctccgacttcacgacgttgcgcgccgagatgcggagttccgcagcgcgggaacgggtgccggccggggtttag

SEQ ID NO: 46165 - DNA, 1443 bp, Mycobacterium haemophilum
gtggacgacaacgcggggctgtcggccgtcgagctgctcgagctcaaccgcgacctgcagaactcccgcgccatccgcctgctcaccacaaccaacctcggcctctacgcaacgttgatggaacgccacctcgccgaaggcgccatcgccgagaccgagctcgtcgtgcggctcgaacatgacctcgacgatctcgacgacccgcagtccgggctcgcgctaatcaagtcctgggccagccagggctggctgcaccggatcgtcgacgaacgccacgaccagaacgtctgctacctcacccaggacgcccgccgcgctttggactttctccgcggcatgcgccgtcacgacaccatcgccaccggcggctcgatcaccggcatcgcctcgcgcctcaagcaggtcgccgtaaaagtcgacagggacccggcccgcatccgcaaacacatcgaagccgaaatcgccgctctgcacgaggaactcgatcaactcgatgccggccagcgcccccagcccgacgtcaccgactgctacgacgaggcccgcgctatcgccctgcagatggaacgcctcatcaccgacatcggccagtacggcaccatgatcgagcaggccaccgccgccctcgacgaacccatcgattccaacaccgaataccgcgaccggcagcgccagatgtacaccgactaccaggccgcctgggactcccagggccgcgactcgcaccgcgccttcctgcgcatgatcaacgaccccgaccaacgcgccgaattcgaggccgatgtcgccgccgtcgccgaggccctgcccgccctcgaccccgctctacgcaaggtcatggccggcttcttcgaactcgtcggccaccagatcgacgaggtcgaacgcatccagcagcgctgcgcccagcgcgttaagcggttcaccgccttcggcaccatggagcagagccgcggtgtcgcccgccagctcaacaacgcgatcggcgccgcccgcgcgctgctgaagtcgtcgtttaccgactcccgcctcgacatcgacgttcccttggcccgtcacgccatcagttccattggcgcactgagctttaagatcggcgacctgtctaacccgaaacccgccaagcccggcaatagcgaggtcgacctgaccagcttcgccgcgctaggcacccaggtcgacgcccccgcgatgtccgacatgctcaaccacgccatcaccaacggccccgtctcgctgcccgatgccgtcgccatgctcgacaccgcctacctcggccacgtcgtcgtgctctggtcctgggccctccagcagcccaaccccgaaagctccgagtcgacccccgtccgattccgctcgctcgatggccgagaccgcgagatcgccgtcccccgtttgacattcatcgaacccatcaccaccctcgccggagccactgcgtga

SEQ ID NO: 46166 - DNA, 717 bp, Mycobacterium haemophilum
gtgaaaacagaccaaccgacccccgatcctgatattgacttctcctcccttcctcaggtcgaccagaacgcccgaccacccgttgcacggcgaccgcgctttgacggcgacgtctccgaactccccgaccgcgcctgctgggcccttcagcacctgctcgcccgccgcttcatcaccgccgaagccgacgccgacgtctacagctgggtgctggaataccgcaaggaattgtctgtccgactctccgaactggatctgctgctgcgtatcgcggaggtcggctatgaaacaaacggagtcgcgttcgtcgaacaggcccgctacgaatccgcaagaaacatcaagcttttgcgccgcgagccgctcggtacctacgactcgatcctcgcgctgcacctcgcccaaatgatgcgcgccgccggcggccagaccgtgctcatcagccgcgaagaaatgcacggcctgttcgcgggcgtgctcaacgacaccgaccgcgacgctgttaccttcgccgcgcgcatcgacggcgccatcgcccgcctagccggcctcgagatcctccgcaagagccgcgacgacgagaacagctacaccatcagcccggtgattaccgccatcatgaccgcctcggtgatcaccaaactccagcagcagtttgaacaactactcaccggcggcaccccgcaggacacagaagagatcgcgctcgatgactga

SEQ ID NO: 46167 - DNA, 3363 bp, Mycobacterium haemophilum
atgactgaacagttccacctttcccggctgcaagtcatcaactggggcgttttcgacggttaccactgtatcccattcagcgcgggcggcgcgctcatcgccggcgcctctggtagtggcaaatcctcactgctggacgcaatttcactcggattcctgccgttcaaccgacgcaacttcaacgcctccggcgacaacaccgccgccggatccagcgccggccggcgcaccgtcgacaagtacgtacgcggcgcctggggccagcgcagcgacggcggctccagccgcgtgatgtacctgcgcggcgacggcaccgcctggtctgccgtggccgtcacctacgccagcgactccggccgcaccgtcaccggcctggtcctcaaatggctcaccggcgagtcccgcaacgactcgtcgagccgctttgtgctcggcgacggcgacctcgacatcgaagacgtctgcaaccgctgggccgcaggccgcttcgacgccgccgtgttcaaggaagactggcggttttccaccaaggttgagtcgcagtacctggcccagctctacgccaccatcggcatccgcgcctccgacgccgcccagcaactgctcggcaaggccaagtcactgaaaagtgttggtggacttgagcagttcgtccgcgagttcatgcttgacgaacccgacagcctggcccggttgcccgaggccctcaagcagatcgacccactggtcgaggcccgcgaactgctggccgtcgcccagaagaaacgcaagatcctcggcgacatcgagaccatccagcagcgttacgcttccgagtcgtccgacctcggcatcatcgacctcgtcgacgcgccgatggtccgcgcgttcaccgaccacgtccgactcgcgcaaagccctacccagatcgccaccctggacggcaccatcgaccagctcgaaaacgaatatgaagacgtcactcgttgcctcaatctggctaaagccgaagcggattcgctcaatgcgcagatcagtggctgcagcgcgaatatagccccgctgcagtcgcaagtcactgccgccgagaccgaagccgaacaggtcacccgccgtcgcaccggctacgaaggtttgctcaccgcccacgacatcgaaatcccggacacggccgaggaattctggaacctccgcgaggaactgctcgcccaggccaccgagctgctcgctaaagtcgaacgcaaccgcgaggcgtccaccgacgccgagtacgcgcagaagtccgcccgcatcgcccgcgatgataccgccaaggaactcaagcgcgtcgagcacgtcggctcggcactgcccgaattcgcgctcgcaatgcgcgaacacatctgcgccgcagtcggtgccgacgccgccgaactgccctacatcgccgaactgctggatctgaagcccgaccagacccgctggcggctcgcggtcgagaaggtgctgcgcggcgcggggctgcgactgcttgtgcccgaccaacactgggccgcggtgttgcggttcgtcaacgaaactgacatgcgcggccggctgcagctgcaccacgtccgcgcgaaattcctcggcgccgaacccgtcgaacccaacccgaacaccttggcgggcaagctgttcgccgtcgacccccagcacccctgcgccgccgaggccgtcgacatcatcaccgccgccggcgaccacgtctgcgtcgacacccccgacgtgttcgatcgcttccgccgcgcagtcaccgacgccggactgtacaaagactctgaccggctggccatcaaagacgaccggcgacccgtcaagcagtccgaatatctctaccagggcgacgtgtcggccaagatcaacgcgctcacgctcgaactggccggcgccgaggaggcctaccagaaagccaggcgcaccgccgacgacatcgccgcccagcgccagcaatggcgcgaccgtgcggcggcatgcaaggcgatctgcgagcagtacccgcagtggagccagatcgacaccgagaccgccgacgggcacgccgaccggctgcgtgaacagtacgagttgctgctcgccgacaaccccgacatcgaggcactcaatgcgcgcgccgacgaatgctggtcacagatccagaaactgatgacacgccgcggggcaatccagacccgccgcgacggcctcgacgagcgccgcacccggctgctcgaactccaagatcggctgtcaccgacgttcgtgtccgagccgctgaccgacctgctgcgccgctacgccgcaacgatcccggtctcgctggaactgcttgaccccgaaccgcatcgcgacgcgctgtttgccgcgatcaagaaggaacgcgaacagctgcgggagagccggcgccgctcttacgacgaattagcccgcattctcaacacatttgacacgtcgttccccgacgcgattccgaacgattcggacgattttgatgagcgcgtgcacgactacgtggcgttgtgccgccacatcgacgagcgcgaactgcccgaggcctacgagcggatgatgcggctggtcaccgagcaggcacccgacgcgatcctaacgctgcaccgggtcgccgagcaggaggcgcggcggatcagcgagcagatcgaccgcgtcaataccggtttgggcgcggtggagttcaaccgcggcaccaggctgacgctgcgcgcgacgccacggcacctgctggcggtcaacgagctcaccgagatcgtgcgatccatttcgcggcgcatcgccgaggtcgggctcggcgacaagcaggcgatcctcgatcaatacgccgacatcctgcggctacgtaaccggctggcatcgaccgcaccggaggacaaggcgtggacgcgcgacgccctggacgtacgcaaccggttcaccttcgactgcgccgaatgggacatcagcaacgaagagctcatccgcacacacagcaacgcgggcgacaactccggcggcgagcaggagaagctgatggcgttctgccttgcgggagcgctgagcttcaacctggctagccccgaaagcaccgacaacagaccggttttcgcgcagctgatgctcgacgaggcattctccaagtccgacccgcaattcgcccagcaggccctgcaggcgttccgcaagttcggcttccagctggtgatcgtcgcgacggtgcagaacgccaccaccatccagccctacatcgacagcgtggtgatggtgtccaagaccgaggctaccggccgcagcgcccgacccgtggcatcggtagcgaccaggacgatctcggagttcacctcgctgcgccacgaaatgcgcgcggcagtaccacgagtgccggccagggcgtga

SEQ ID NO: 46168 - DNA, 1443 bp, Mycobacterium haemophilum; identical to SEQ ID NO: 46165

SEQ ID NO: 46169 - DNA, 717 bp, Mycobacterium haemophilum; identical to SEQ ID NO: 46166

SEQ ID NO: 46170 - DNA, 3363 bp, Mycobacterium haemophilum; identical to SEQ ID NO: 46167

SEQ ID NO: 46171 - DNA, 1476 bp, Mycobacterium senegalense; identical to SEQ ID NO: 46112

SEQ ID NO: 46172 - DNA, 756 bp, Mycobacterium senegalense; identical to SEQ ID NO: 46113

SEQ ID NO: 46173 - DNA, 3363 bp, Mycobacterium senegalense; identical to SEQ ID NO: 46114

SEQ ID NO: 46174 - DNA, 1443 bp, Mycobacterium haemophilum; identical to SEQ ID NO: 46165

SEQ ID NO: 46175 - DNA, 717 bp, Mycobacterium haemophilum; identical to SEQ ID NO: 46166

SEQ ID NO: 46176 - DNA, 3363 bp, Mycobacterium haemophilum; identical to SEQ ID NO: 46167

SEQ ID NO: 46177 - DNA, 1443 bp, Mycobacterium haemophilum; identical to SEQ ID NO: 46165

SEQ ID NO: 46178 - DNA, 717 bp, Mycobacterium haemophilum; identical to SEQ ID NO: 46166

SEQ ID NO: 46179 - DNA, 3363 bp, Mycobacterium haemophilum; identical to SEQ ID NO: 46167

SEQ ID NO: 46180 - DNA, 1473 bp, Xanthomonas oryzae pv. oryzicola
atgaaacaccgtgcccgtatcgcccgctatcgcgccctgcgcgagcagccgctgtggaaactactggcggccgatcagtcgccggaagtgatcggcctgctgcagacgttgttgctcgacagcgagcgcggtttgcccgcggcggtcctgcatgaacgcctgcagcgcatgcttgacgatctcaatgtcgatcagctctcgcgcgagctgccgcgcactgcgcaggcctatgtagcgcactggctggcgcagggctggctggaacggcgcctgcccgagggcgcgcagcaggagcagtacgagttgtctacccaggcgatacaggcgattcgctttgccgatggtctggagcaggcgcgtggtgccgcgaccgagagccggcttgcgctggtgatgcagcagttgtcgcagttggccgcgttgaccgaaaccaatcccgatgcgcggctgtcggcgctgcgcgacgagcgtgatcgcattgatgcggagatcgcgcgggtggctgccggcaaggtcgcctcgttggatggcaaacgcgcgctggagcgtgcgcggcaggtgatcgcgctggccgacgagctgaccgaggattttcgccgggtacgcgacgatttcgagcagctcaatcgccagttccgtgagcgcatcatcgacgacgagggcgagcgtggcgaggtgttgacgcggctgttcgagggcgtggacgtgatcggcgacagcgaggccggacgcagttttcaagcgttctgggcgctgctcaacgatgccgaacaaagcgcgcagctggatgcggcgctggagacggtgttggcgcgggcgttcgcacgcaagctcgaccgccgcgagcgcagcttcctgcgcggcttgaccggtaccatgctcgaacgcggcggtcaggtgcacgatgtgatgcagcatttcgcccgcagcctgcgcggcttcgtccaaagccgtggctatctggaacaacgccggctcaatcaattgctcaagcaggcacaggccgaggcgttggggctgcgcgagcatctgcgtgcgcagcgctcggtcgggcacgacctcaacctgaccaccagccgcttacgctcgctgtcgcaatggcgtctgcacgatccgcgtcagacccaggtcgatggcagcatccagcgcaacgacgcagcggcgatctcgctggacagcgtcggcgatctggtcgcgcagtcggaaatcgacttccgcagcctgcgccgtgatctgtacgagctgctcggcgaacacgcacagctgtccatcgcgcaggtgctggcgcaacggcaggcagagcaggggctcggcagtgtgatcggctacctgtcgcttggcacgcggcatgggcaggtggatgcgcaacgcagcgagatcgcgcgatggcgtggcggcgatggccagtggcgcggcgcacgtattccgttagtgtggttcagccaggagaaacgcaatgaattggcaggctga

SEQ ID NO: 46181 - DNA, 699 bp, Xanthomonas oryzae pv. oryzicola; identical to SEQ ID NO: 42287

SEQ ID NO: 46182 - DNA, 3429 bp, Xanthomonas oryzae pv. oryzicola
atgaaatcttcttcctccagcctgtttgccgacgatctgcccgacccgcgcgtgcagcagtttcgcatgcgccgcctgcaggtccataactggggcacgttcaacggcttgaccgacgtgccgatcgccgcgaagggcttcttgttcgtcggccgttccggttcgggcaaatccacgctgctggatgccatgtccgctctgttgaccccgcccaatctggtcgacttcaatgccgccgcgcgcgaggccgagcgcactggccgcgatcgcaacctggtgtcgtatgtgcgcggcgcctgggccgaccagcaggacagcgcctccggcgaaatcgccacgcaatatctgcgcaagggcagcacctggaccgcgctggtgctggaataccgcaacggcgagggacgggtgatcagcctgatacggctgttctggatcgctggcagcggtgcggcggcagccgacgtgcgcaagcattacatggtggccgagcgcagtttcgatatcgccagcgaactggtcggcttcgatctggatttgcgcaagctcaaggcgcgtctgggcgacgacatcgcccacttcgacaatttctccggctatgccgagcgcttacgccatcagttgggcatcgccaacgagatggcgttacggctgctgcacaaaacccagtccgcgaagaatctcggcgatctcaatgtgttcctgcgcggcttcatgctcgaggcgcccaagaccttcgacgccagcgagcggctggtgggcgacttcgccgaactcgatggagcgcatcgggcggtggtcaccgcacggcggcaggtcgaaacgctgctgcccgcgcgtgcgcattacgacgacttgcagtcggtgcaacgtcagcgcggccgcttgcaggaactcaagctcggcctggacccctatcgcgagcaacgccggcttgcgttgctggatgcgcgcctgcatgcactggacgtcaacgaccagggcctggccggcgaggagggccaacgccgcgctgcagtggataaccaccaacaacgcttgtccgatctggaggcccagcgccgcagccagggcggcgagcggatcgacgcgctggaacgcgagcagctccaggtccagggcgaacttgcacgccgcagcgacaagcgtgccaaggccgaacaggcctgccgccagctcgaccaaactttggccgacaacgcgcatggatttgccgagcagtccgcgcaggcgcgcgccgcgctcgaggacgggcagcggctggccgccgaacaggacgaggcgatcgtcgagcgtatcgccggcaagcgcgaggacagccagcgctttgcgcaggtgcgcgccgagatcgaggcgctcacccgcaatccctccaacattgctgcgccgatgcaggccctgcgtgcacgcctgagcgaagaaaccggcattcccgaggccgcgctgcccttcctcggcgaactgatccaggtgcgtgaggaagatgccgcctggcgcggtgccatcgagcgcgtgctgcatgggtttgcgcaatcgctgctggtggacgagcgccattacgccgaactggccgagtgggtcaaccgcacacatctgggctcgcgcctggtctattaccgggtgcgcaataacgaacaggcgtttgccggccgcgaacccggcagcgcctcgctgctgcacaagctgcaattgcgcgagcatccctttgccggctggctgcggcgcgaactgggcaagcgttttgactacgactgcctggagagcgccaaggccttgcgcacggcagagcgcgcgatcacccgcgaaggccagatcaagcatcccggcgaacgctatgaaaaggacgaccgtcatgcggtcggcgaccgtcggcgctggctgctgggcttcgacaaccgcgacaagctggcactgtacgagcgcgaagccattgaactggcacaacgcatcgccgcctgcgatgccgacgtggccgagctgcgtgcgcgccgcgaacgcgatgccagccggcgcctggcccagcacaccctggccaacctggcctgggaggaaatcgacgtcgccgcacagctgcaacgccgcgacgatatcgccaacgccttgcgccagctgcgcgaaggcgatgccaacctgcgcgcgctgggcgaggcgatcgagcgcacgcgcggcgacctggaacaggccaagcgcacgttcgacggtgtgcgcgaggaacggatcgcgctgggggtcgagcgcacgcgcctggaaaagcaacgcctgcactgcgccgacgccgatgcccgggtggtcacgccgctgcagcgcgaggggctggaggagcgcctggccaacctgggcgcgcttagcctggacaatctcgaagcgcattttcgccagatcggcaacgccatcgccgagcagaccagcgccagcgacagcgagcacaatcggctcgaacagttgctgctcggctgctttcgccggtatagccaacagtggcccgaagacagtggcgacttcatcatcagcctggccggcgccgaggattttcttgcccgcctccagcgtctggaacgcgatggcctgccgcagcacgaagcgcgctttttcgagctgttgcagagccagagcaagaacaatctgctcgccttgcagcgccacaccgccgaagcacgcaaatcgatcgcccaacgcctggacgaggtcaacgccagcctggagcaggtgccgttcaaccatggcaccttgctgaccatcgaactcagcgatcggcgtttgccggaggtgatcgacttccatcaacgtctgcgcgatgtgctcggtcaccaccagaccgaacagcgtgacgtggccgaacagcaatttgccgtgctgcgcgaactggtgcgtaagctcggctcagccgatggcgaggacaagcgctggcgcgaggtggtgctggatgtgcgcctgcatgtggagttcgtcggtgtcgagctggatgcggccacccgccagcaggtggagatctaccgcagcggcgccggcaagtccggcggccagcggcagaaactggcaaccacctgcctggccgccgcgctgcggtatcaacttggcggcgaagacggcgaattgccgtgctacgcggccgtggtactggacgaagcattcgacaaggccgacaacgaattcaccgccttggcgatgaacatcttcgagaatttcggcttccagatggtggtggccacgccgctcaagtcggtgatgacgctggagccgtttatcggcggtgcctgctttgtcgaaatcagcggccgtcacgactcgggcgtattgctgatcgaatacgacgaacaggcacgccggctcaagttacccgagcgctcgcgcagcgcagccgccgccggtgcggcgcgcgcgaccgagccgtccgacgccgtcggcggagcgagcgtcgatgaactgcactga

SEQ ID NO: 46183 - DNA, 1182 bp, Xanthomonas oryzae pv. oryzicola
atggcccccgccgcgcccatgatgttgcctgccgctgcgctgctggccttgcgcgggcagtggcagcgcgcacgcgggcagtggctgatcggcgagggcgcaccgcaggcgatcggattgcgggcgccgacccaggcacaggccatcgcgcggttcgatgccttcggtgcgtggttgcaggagtggagccgcacaggcctgccggggcgggtggagtatcgcgcggtgagctggacgcagctggggccgcagcgcctgccgcagacctgggtgctggacgatgcgggccaggccgccggcgcgcttggcgagggcgagcgttgggcgcgtgcccgccaacgcagcgcggccttgcaggcgcgctggccgcaggcggtcgcgctggcggcgcggctacgccgtcaattcgatctgctggccgactggccggaggccgagttcgcacgcttggtggcggtggtggagtggctgcaccagcatcgcgacagtggactgttcctgcgccagcttcccatcgccggcatcgacagcaaatggatcgaaccgcatcgcggcgtcatcgccgactggcttgccggcctgcgtggcatcgccgagccgcgcagctttgccagcctgtccggcctgcgcaacgcgccggatcgggtgcgcttgcgattgctcgacccggccctgcgccaccacctcggcggcctggaggacatcaccgcaccgatcgcgcagatcgccgcgctgcgtctgcctgtgcgccgcgtgctgatcgtggaaaaccgcgaaaccggtctggcctgcgaatcgctgccgggcacgctggtgctgatggcgcgcgggtacgccgtcgaatacgtgagcaatatcgcgtggctgcgcgaattgccgctgtactactggggcgacatcgacacccacggcctggcgatcctgcaccgcctgcgcacgcacgctccgcacaccaccgcggtgttgatgaatgaggccaccctgcaggccactccgcgcgcgttgtgggggcacgaacgcaggccgcaccgcgcccaacgcctggctgcgctcagcatccaggagcagcgcctgtatgcagacctgcgcggcggccggttcggtccttcgccgcgcctggagcaggaacgtatcgcctgggactatgcctggccgcgcatccaggccgcattggcggactaa

SEQ ID NO: 46184 - DNA, 1470 bp, Xanthomonas translucens pv. undulosa; identical to SEQ ID NO: 43475

SEQ ID NO: 46185 - DNA, 705 bp, Xanthomonas translucens pv. undulosa
atgaactggcatgaccacgagctggatcccgagcagggacgctcgaacgatgcagtcgacagcgccgcgcccgacgccggtaccgacctgttccccggcgacagcggccgcctgccagtggaagcgcgccgcgcgctgtgccagctgctcagcggccccagcgtggacgcgcagcgccacagcaggctgtggccggcgctgttgcgcagcgaggcggcgatccgcagcgccctggccgacctgttcctggaactggtgctggaccgcgaagccggcatcgccttcacccgccaggccgacaccggcgaactggaagcgccggtgctgctgcgctcctcgccgctgaccttcatcgattcggtgctgctgctgtacctgcgccagcaactggccgaagccgatgcgcgcggcctgcgcgcggtggtggaggaagcgcagctgggcgaggcgctggcggtgtacgagaagaacctgtccaccgaccgcgccggtttcctgcgccgggtcggcaatgccgtgcagaagatgaaggacaaccacatcctgacccgcctgcgcggcgaagacgaacgctacgaagtctcgccggcgctgaagctgctgttctcggccgaggacgtggccgcgctggcgcaggtgtaccgccagctgcgcgaaggccccgattctggcgaggacgccgccgcggctgcgcaggacgcctag

SEQ ID NO: 46186 - DNA, 3597 bp, Xanthomonas translucens pv. undulosa
atgaaatcctccgcttccacgcctggcctgttcgccggcgatctgcccgatccgcgcctccagcagttccgcatgcgccgcctgcaggtgcacaactggggcacgttttccggcctgaccgagatcccgatcgccgcgcgcggcttcctgttcgtcggccgctccggctcgggcaagtccacactgctcgatgcgatgtcggccttgctgacgccgccgagcatcgtcgatttcaacgccgccgcgcgcgaggccgagcgcagcggccgcgaccgcaacctggtctcctacgtgcgcggcgcctgggccgaccagcaggacagcgaatcgggcgagatcgccacccagtacctgcgcaagggcgccacctggaccgcgctggtgctggaataccgcaacggcgaagaccgcgtggtcagcctggtgcggctgttctggatcgccggcaacggcaccgccgcggccgacgtgcgcaagcactacatggtggccgagcgcgcgttcgacatcgccgccgacctggacggtttcgacctggacctgcgcaagctcaagcagcgcctgcacgacgtacaccatttcgacagcttcgccggctatgccgaacgcttccgccaccagctcggcatcggcaacgagatggcgctgcggctgctgcacaagacccagtcggcgaagaacctgggcgacctcaacgccttcctgcgcggcttcatgctcgaggaaccgaagaccttcgacgccgccgagcgcctggtcggcgacttcgccgaactcgacggcgcgcatcaggcggtggtgaccgcgcgccgccaggtcgagaccctgctgccggcgcgcgcgcaccacgccgagctgatggcggtgcgccgccagcgcagcgaactcgacgaactcaagctcggcatcgacagctaccgcgagcagcgtcggctggcgctgctggatgcgcggctgcaggaactggacacgcaggaccgcggcctggccggcgaggaagggcaacgtcgtgccgcgctggagaaccaccagcggcgcctggacgacctcgaagcgcagcgccgcgcgcagggcggcgagcgcattgatgcgctggagcgtgagcgcggccagctcgaagtcgagcgcgaccgccgcgccggcaagcgcacccaggccgagcaggcctgccgccagctggagcaggtgctggccggcagcgcgcagggcttcgccgggcaggccgcacaggcgcgcgcggcgctggaggacggcacgcgcgcggccgccgaactcgacgaggcgatcagccagcgcatcgccggcaaggccgaggacgccaagcgcttcgccgaagtgcgcgccgagatcgacgcgctcaagcgcaatccctccaatatcccggcgccgatgcaggcgctgcgcgcgcgcctgagcgccgacaccggcgtacccgaggccgctttgccgttcgtcggcgagctgctgcaggtgcgcagcgaggatgccgactggcgcggcgccatcgagcgcgtgctgcacggcttcgcgcaatcgctgctggtggacgaacgccactacgccgacgtggccgactgggtcaaccgcacccatctgggcatccgcctggtctattaccgggtacgcgacaacgagcacgccctgcctgggcgcgcgccggctgccggctcgctgctgcacaagctggaactgcgcgagcacgccttcgccggctggctgcgccgcgaactgggcaagcgtttcgactacgactgcgtggacaacgccaaggcgctgcgccatgccgaacgcgcgatcacccgcgaaggccaggtcaagcatcccggcgagcgctacgagaaggacgaccgccacgcggtgaacgatcgccggcgctggctgctgggcttcgacaaccgcgacaagctggccttgttcgaagaagagggcctggcgctggcgcagcgcatcgccgcctgcgacgccgacgtggccgcgctgcgtgcgcgccgcgaacgcgacggcgcgcggcgcttggcccagcacaccctggccaacctggcctgggacgagatcgacgtggccgcgccgctgcagcgcctggacgacatcgccacggcgctgcgccagttgcgcgagggcgacggcaacctgcgcgcgctgggcgaggcgatcgaccatgcgcgcgcggacatcaagcaggccgagcggacctacgagagcgtgcgcgaggagaggatcggactcggtgtcgagcgtgtgcggctggagaagcaacggctgaattgcgccgatgcgaatgcgcgcgtggtcacgccgttgcagcgccagggactggacgaacgtctcgctggcctgggcgtgctgagcctggacaatctcgaggcgcattttcgccaaatcggcaatgccatcgtcgagcagaccagcgccagcgacaaggaacacaaccgcctggagcaactgctgctcggctgcttccgccgctactgccagcaatggcccgaagacagcggcgatttcaccgtcagcctgagcagcgccgaggatttcctcgcgcgcctgcagcgcctggaacgcgacggcctgccgcggcacgaggcgcgcttcttcgagttgctgcagagccagagcaagaacaacctgctggccctgcagcggcataccgccgaggcgcgcaagtccatcgcccagcgcctggacgaggtcaatgccagcctggagcaggtgccgttcaaccgcggcaccttgctgaccatcgaactgggcgaccgccgtctgccggaggtgatcgaattccaccagcgcctgcgcgacgtgctcggccatcaccagaccgagcagcgcgaactggccgaacaacagttcgcggtgctgcgcgaactggtgcgccggctcggttcgcaggacggcgaggacaagcgctggcgcgagctggtgctggatgtgcgcctgcacgtggaattcgtcggcgtcgagctcgatgccgccacccgccagcaggtggagatctaccgcagcggcgccggcaagtccggcggccagcggcagaagctggccaccacctgcctggccgcggcgctgcgctaccagctcggcggcgaggacggcgaactgccgcgttactgcgcggtggtgctggacgaagccttcgacaaggccgacaacgagttcaccgcgctggcgatgaacatcttcgagaacttcggcttccagatggtggtggccacgccgctgaaatcggtgatgacgctggagccgttcatcggcggggcttgtttcgtcgagatcagcggccggcacgattcgggcgtgctgctgatcgaatacgacgagcaggcgcgccggctcaagcttcccgagcgcacgcgcggcacggccacgccagccgatgcggcgccagcgccggaagcggaacaacccggcaccgcgccgagccgcctgcgcgccgacactgcggccgtggtgcgtggcgatgccggcgagccagcggtttccgatggcgccgccgccatggcgcccgtgccgcatcgcgcgctgccaaagtcaaaggcaaaatccaagcccgagtccaagcccgagtccaagccagggtccaaacccaactccaaggcctga

SEQ ID NO: 46187 - DNA, 1209 bp, Xanthomonas translucens pv. undulosa
atggcgcgcgccaacgcgatgctgctgcccgatgccgcgctggccgccttgcgcgggcagtggcggctacaccgcggcgcgtggttgctgggcgatgcggcgccgcaaccgatctcgctgcgcatgccgacccaggctcaggccagcgccggattcgatgcgttcggcgcctggctgcgcgcctggcgcaccacgccgttgccggggcatgtggaatggcgcgatgtgaaatggtcgcagctcggcctgcaatgtctgccgcacgcctggcaaccgaacgccgatgaggccgcgctggcgctgggcgaacacgcgcgttggcagcgcgcgcgccagcgcagcgcagcgctcgtcgcgcgctggccgcaggcactggggtttgccgcgcgtctgcgccggcagttcgacctgctcgccgatgcaccggaagcgggtttcgtgcgcctgctcgccgtcgtcgagtggctgcatgcgcatccgcacagcggcctgttcctgcgtcagttgccgatcgccggtatcgacagcaaatggatcgagccgcgccgtggggtcatcgccgactggctggccgggctgcgcggtatcgtcgaaccgcgcggcttcgacagcgtgtccggactgcgccgcgcgccggaccgggtgcgcctgcgcctgctcgatccggacctgcgcgcgcggctcggcgggctggaggacgtgcaggtgccgatcgcgcagatcgccgcgctgcagctgccggtgcggcaagtgctgatcgtggagaatcgcgagaccggcctggcctgcgaggatctgcccggcacgctgctgctgatggcgcgcggctacgccgtggactacgtgcgcgccatcgactggctgcaggccttgccgctgtactactggggcgacatcgatacccacggtctggcgatcctgcatcgcttgcgccggcatgcgccgcggacggtcgcgctgctgatggacgaagccaccttgcgcgatacgccatccgagctgtggggacacgaacgccgccagcatcgcgcgcaacggctggatgcgctcaccgctgccgagcaggccttgtacaccgacctgcgcactggccgtttcggccccgcgccgcgcctggaacaggagcgcatcgcctggaattacgcgtggccgcgtatccgtgccgcactggccgaagagcgcgccgaaccgtgcgcgatcgtgcgctga

SEQ ID NO: 46188 - DNA, 1461 bp, Diaphorobacter sp. J5-51
gtgaaagcagacaaagccatcgcgacgtaccggcgcatgcgggcgaagccgctgtggcgcctgcttgcctcgaacactggacctaccgtcattggcctgcttcaggcccatctttacgagggagagcgaagtcttcctgcctccatttttcacgaacggatcgcaagagatctggaagatctacgcgcccaaggcgaagacttcccccaaacggcacaagcgtacgtcgccagctggctcgccgatgggtacctggagcgacgcttcccggctggggcttcagaggaggaatatgaactctccacggccgccgtcgaagccattcgatttgtctctggcctggagcagccgcactcagcggcaaccgaaagccgcctgacgcttgttatcgaggcactagcccggcttgccgaggacaccgacaccgacaaattccgtcgcatagaccggctcatggccgagcaagcccgcatcgataaggagatagacgccatccagaaggggcagatgcgcgtgttgccccacgcaacggcgctggagcgcacgcgggagatcatcacgttggctgatggtcttgcaggtgatttccgccgtgtccgcgatcagttcgaccaactcaatcgcgatctccgtgaacgcatcatggacaacgatggcaatcggggggatgtgctggattcactgttcgccggaatcgacctgatttcagagagcgacgccggaaggactttctccgctttctggcgattgcttacggacccagaacagggcgcaacgcttgatcaggcccttgatagcgtcatgtcgcgggagttcgtggggcagctcgaagccaaggagcgacgattccttcttcggctgacgcggacccttctcgagcagggcggcatggttcacgaggtgctccagactttcgcgcgcagcctgaagcacttcgtccagagtcgtgaatacctcgagcaacgccgactcaatcaccttctgaaagacgctcagcgagcagcactcgccctgaaggacgaagtcagggccacagaaaccctccagtacacgcttgagctcacgagcagccgtttgcgctccttgtctcaatgggtgctatacgacccctccctacaagctttgcccggccaaatggcggaaggggatgccccgccaatcgacctggagtccgtcagcgaactggtcgcccagtccgagatcgacttccgaacattgaaggccaacgtgctggcggtcctggagcaacggtcccaggcatccatcgctgacgtgctggagcagttccccgctgcacagggtttgggcagcgtcgtcggcctgcttgcattgggcagtcggcatggtttcaaagccgaccatagcgaaaccgtaggctgggttggaggcgacgacgagcgtcgtagcgcccgaattccaaagatcttctttttgagggagcgggccaatgaactggtctga

SEQ ID NO: 46189 - DNA, 708 bp, Diaphorobacter sp. J5-51
atgaactggtctgagaacgacgaagcggcaatgccagccgaagcacaagcgccagatgcttcgcaggcatctgctaacacccttttcatgggtgacggcggcgagttggcgctggatacccggcgcgccctggtgcagctacttgcgggaccttcgctcgacggacgtcgacatccaaagctctggctgatattggtgcgagacgaagcggtgatacgtcggcgccttgccgaactgtttctcgaactagtcatcgaccgggacgtacaagttgccttcacccgtcaggcagataccggcgaccttgaagtgccactcctgctgcgtcgcgcgcagctgaccttcattgactccattctgctgctccaccttcgccagcgattgacccaagcggactcgcagggcgatcgtgccgtggtgtcgactgacgagatcatggagtttcttaccctctatgagcgtgcctccaacaccgaccgcgcaggattcgtgaaacgtgttcatgcctctatcgagaagatcaagaagcacagcatcctccagaaaattcgctcgagtgaagatcgtttcgagatttcgccaacgctgaagctcctcttctctgcagaagaaatacaagccctgacccacttgtatcagcgcatggccgccggtgagacgccagcacaactggctcagactgagtccgatgagggggccgatcaatga

SEQ ID NO: 46190 - DNA, 3375 bp, Diaphorobacter sp. J5-51
atgatctcggaaccccaaaccgcgtccttgttcgcccgggagcaattcaggatgactcgcctacaggtttacaactggggcactttttctggcctgcatgacgtaccaatcagcgaacgaggctttctgtttgtcggtcgatccggggctgggaaatcgactcttctcgacgcattttcggcgttgctggtgccacctcgctggatcgatttcaacgctgccgcgcgagaggcggaccgcagtggccgtgatcgaaacctcgtcacctacatacggggcgcgtgggccgaacagaaggatggagagtcgggtgagatcgcaacccgctacttgcgctcggggacaacgtggtctgccctggcactgacctaccagaacgcattgggccagtctgtggtgctggttcaggtgttctggcttcgcggcaatgcgaatggaagcaccgacgtcaaacgccactaccttgtcctggagcgggcctttgacctgcgcgagctggaggacttcggtcaatccaacttcgacatccgaaagctcaagcagtctttccccgaggcgttcgctcgcgacgagtttcgtccctattgcgaacgattctgccgcctgctcggtatcgagagcgaaatggcgttgcgtttgctgcacaaaacccagtcggccaagaatctcggcgacctcaataccttcctgcgcgacttcatgctcgacaagcccgagaccttcgaggtcgcggatcgattggtcagcgaatttggtgaactcaatgctgcccaccaggcggtagtgacagctcgcgagcaggttcaaacgctcgcgccagcgcaagagcagtatcagcgcagagattcgttgatgctgcaacgcaatgggctggatgagcttcggctgggtgttgatggctaccgcgaaacccgccgcattgaactcctcaagcagcatgtcgagtccctggaggtgcaggccagcggctcggaaggtgaagtaagtcgacgtcagagcatcctggataaccacaccacaaccttgcgcgatctggagcgacagcaccgtgaagcaggcggtgatcagatcgagcaatgggaagcagagaaatctgggctggagggccagcgcacggatcgcctgcgcaaacgcggccaggctgaagatgcgtgcaagaagcttggctggagcctcccggattcgcctcaggccttcgctgaactgttgggcaacgcgcggcaggaagtcgaaaactgggagcagcgcagcaacgagaaccgcgaagaacagttccgcttggcaggtcaaaagaaagacgcagagacgtcattttcgcaagcggtgaaggaggtgcaggcactccagcgccagccatcgaacattcctgccgatatgctcgaaatgcgccgagacatcgccgcagctattgggatatcagaatcggctctgcccttcgtcggcgaactcattgaggtgaagcctgacgaggccgagtggcaaggtgccatcgagcgcgtactgcacggatttgcgctctcactcttggtggacgaacgccagtattcggcgctggccaattacatcaacaacacccatcttgggcagcgtctggtgtactaccgaactggccgctcggagacctggcaggcgaagcccatcggcgctaactcgctcgtcctgaagctgaacgtcaaggacggtacgtatgccgattggctgcaggccgagctacggcaacgattcgattacgcgtgcgtcgactccattcaggcgttcaggagcgctgatcgagccatcacccgcgagggccaggtcaagcacagcaaaacccggcatgagaaagacgaccggagaagtgtcggcgaccgacgaaactgggtgctcgggttcgataaccgcgagaagcttgggctctttcaagcacaggcccaggagctggctgcgacgattacgcgcctcgggggagaaatcgaaaccctcgccgaccaagacaagaatcgtgcgacccgagcgattcagtgccagaccttggtgaatctccagtggcaggaaattgatgtagtaccgttgctagaccgcatttccaccatcgaacaacagattcgcgaagcgcgggagggcaatacagccctactgcaaatcagtgggcggatcgacaagcaaaagaacttggttgatcaagcagacaaggacctccgagatgccaaggtcgcgcatgactcagttctcaagcagatcaacgacagcacgcagaagcttgaatcgctccttcaagatgcttccagagttccattgactccccaccagatcaaggggctcgacgaacgattcaccaagcagtcagacgcgatcaggctcgaaagcctcgacaaggtagcaaccgctgttgagagagggctcaacacagaaatcggtgagatcaaagatgagatcggcgattgcgagaaggaaatagaagcacgctttgccgatttcaaacggcagtggccaatggatgctgtggacatggacacgagcctagccagcgcagcggactttttcgccaagttggttcgactggaaacggatggcctgcccgcctatgagcagcgattcttcgaactgctgcagaaccaaagccaccagaatctggcggcactgtccacctacctgaacgatgcgcgcaaagccatcctagagcggatggatctggtcaacgacagtcttggccaggtgccgttcaaccaaagcgccaatcaacgtacctatctccacatcgacgccagtgaccggcagcttgtcgacgtcaaggagttcaagcaggagatccagcaggcacttagccatgcgtggacggaggatcgcgagtttgccgaggcgcggttcctggccctgcggcgacttgttgatcgactcgccagtcaggatcccgagcagaaacgctggcgcgagactgtgctcgacgttcgacagcatgttgagtttatcggacgggagatcgatgaaagcggcgttgaggtcgaaatttaccgcagcggtgctggcaaatcaggcggtcaacggcagaagctggccaccacgtgcttggccgcagccctgcggtatcagctgggagggaacgaccacggcgtgccgatgtatgcgcccgtcgtgcttgatgaagccttcgacaaggccgacaacgagttcaccgctttggcgatgaacatctttaccaatttcggatttcaaatggtggtcgctacgccgctgaagtccgtcatgaccctcgaaccattcatcggtggcgcctgcttcgtagatatcagcgaccggcgggtgtcaggcgtcctgttgatcgagtacgacggtgaccgccagcggttgaagctgccggagcacgctcgagaggaggctagcgttgaagcttcctga

SEQ ID NO: 46191 - DNA, 1521 bp, Bifidobacterium bifidum ATCC 29521 = JCM 1255 = DSM 20456; identical to SEQ ID NO: 44814

SEQ ID NO: 46192 - DNA, 1038 bp, Bifidobacterium bifidum ATCC 29521 = JCM 1255 = DSM 20456; identical to SEQ ID NO: 44079

SEQ ID NO: 46193 - DNA, 3597 bp, Bifidobacterium bifidum ATCC 29521 = JCM 1255 = DSM 20456
gtgacgatgagcggcaaggacatgcagatgatcgccgaccgatggatgatggaaagcaggaggctcgtcaactggggatcctatgagggctaccatgagttccgtccctccacggactcgcaactgccggtgacgttgctcgccggcgcgagcgaatccggcaagtcgacgctggtcgatgcgcagatatcgctgctctacccgaccggcacgcccttcaacaaggcgtcgaattcggggcgttcggaacgaagcgactacacctacctgcgcggcatgatcggcgtgggaggctccgacggcgtcgacgaaccgatgtacctgcgcggccgggacgagtccggcgcgccccggtccatatggggcgcgatcgtcgacacctaccgcaacttcaccaccggtcagatactgtcctgcggcaagttcctctatctgatgcccggcgacgggcgcggcgacgtccgacggctgtacctggcatgggacaagccgatcgacccgcgccgcatggacgtgttccgcgagtcgtcgttcacgcccacgcagctgaaatccacgtatccggggtgcgtcaccttcccgaacgccgaggcgttccacacccatatttgggatgtcatgggcctgagcgcggaggcatgccgtctgctggcccgcatccagtcggccgacgccccctcccgccttgacgacatcttcaaacagggcgtgctgggcgtgcccgaggcgctggacctggcccgtgcgaccgtggaggattacgagcgttacgacgcgaacttccgaagcatggaggaaaagaccagacgcatgggcaagttgcgtgccatcaccgccagctatgacgactacgagtcggcccgtgacgcggtccactcgttcgacgcggtgaacccggccacgaagtccggctcggcgacgatccgagcatgggcgatccgccgcatgatcggcgaggtcaacgaacggcagccgctcgacaggcgtctgcgtgacgagcgacgcagtgaggcgcgggctgccggcaagcgcatcgaaagcctgcgcacccgcatcgacgcggtgcgcgagcgcatgcgaggcctcgacggcggcgacctgacacggctcgacgcggaaatgcggcaggcggaacgcgcgctggcggacatcaccgccggcagacagcgcatcgggcgcatgttcgaggcggccggcgaggagttccccaaagacgagcacgcgtgggacgagcggcgcatcgaggccgtgacgttcatgcgctcatatgagcagcgcaagggactgctggacgacatgcgcaaccagacgtacgccgcgcacgcgtccgtcaagcagacgctgcagcggctgaacgacgattatgaacgccagaaatcgcagcgcacccgcatctcccgccagatggacgagacccgcgccatgctgtgccgggccaccgggctgggcccgagcgaactgccgtacgtcgcggagctcatggacgtgcgcgaggatcaggagcattggcgcctcgccatgaacgccgcatacggatccatggcccagaccatcctcgtcgacaagcgccatgagcgtggattcgcagccaaggtcagcgccatcgacccgcacgccatggcgcggcgcacctggcagttcgtcgacaccgaacgcgggggagccgggaacgggcccggcggcgcgaacacgggtgcgaccggcggaacggccggagaggtgtggctgtcctcgaagctacgctaccgcgaggattccccgttcgccggctggctgcgcgagcagaccagctccgagcgtctcgacgccctgtgcgtcgacggcatcgacgactccgaccatgccgtgcggcaggtgcaggccgacgggcagatcaaatccggcaaacgcggccagcatggcatcaaggaccgtcagcaggtcatcggattcgtcaacgaaagctatttggcgcaactgcgcacgcgcatccaggacgcgcaacgccaatgcgacgagaccgcgcaatcgtacgcgagcgcgaaggaacaggccgaccgcctgcagcgagagcgcgaactcgccgaccagctcgcatacaccgcatgggagaagatcgacgagaacagcgcgaaggcggcgatcgccgacatcgaacgcaccatcgcctcggtcaggaacaatcccaagctcgccgaactcgacacgttgcaggagtcgctgtccaaggagctcgaccgctcgcagcgccagcgcatcgacatcgaacggcaggccgagctcgccgatcaggcggtgaacgcagcgcaggcatggctcgacgagcatgccgcgcagccgcagccgcaaccgcagacgcggccgctcgatggggaagcggcggacgtttcgccaaaagccgtcacgaacggacggactctcctgacggacgaggtggaggaggcgctcgccgaatcatatgagcagcgtctctccggtctgggggatgcgacgacccgcgcccacatgatcatcggcgcgggggcgccgcagcgtatggctcagggggataccttcgccgaccgtatcatcgccggcatcggcaaggacctggaggcgcgcgtctccatgctcgaaggtcgtgcggcatcggcccgcaccgccgtcgaggcgcggatgggcgcctatatcgagatgtatgcgggcggtgacgatacgatcgccgccagcgtggacgactaccggtattaccaggacgagttggaaagcctttcgaagctcgccaccgtcgaagccaccgccgtcgaataccacaactgcctcgacaagctgctgatgagcttcctgaccatcaaacgcgcgatagacaccgacgccggagacatccacgaccagctggaacgcatcaacgcgatgctggacggccagcagttcggcccgcaccacggcagcctgtccctgcacgcggacgtacggcgccccgagcgcgcgttctggtcggccctgacccgcgtgatcggcaccctcaacgaccgcaaggcggcacagacggacgacgatcttgacggggcccggtgcgcgttcgcgtcctgcgccgcgatgatcgacatgctgcgccgcgagatcgggcagatcagggacgtcaacggcgtgaaaagctacggcgcccgcaacctcgacccgcggtgccgatcctcgttctacgcgctcgtgcgccactcggacgggcaggtcgaacgcatcacctcgaccggcggacggtccggcggcgccctgcaggagctgacctcgttcgtgtacggcgcggcgctgatctacctgctcggcggcggcatggacaacaagctcaagccttcctacacgacgctcttccttgacgaggcgctcatcaaggccgacggccggtatacgcggcgcgcgctgtccgtactgccgagactgggtttccaggtcatcgtctccgcccctgaaagcaagacgggcgagatactggaggtctccaccaaggcatacgtgacccgcaaggaccccgacaccggctacaccacgctgcacgaagccagactggacggcatcgatgagacggaaggcgcagatgagccggaaggtaccgtcgagtcggatgacgccgccgaatag

SEQ ID NO: 46194 - DNA, 1518 bp, Bifidobacterium angulatum DSM 20098 = JCM 7096; identical to SEQ ID NO: 44810

SEQ ID NO: 46195 - DNA, 1029 bp, Bifidobacterium angulatum DSM 20098 = JCM 7096; identical to SEQ ID NO: 42178

SEQ ID NO: 46196 - DNA, 3498 bp, Bifidobacterium angulatum DSM 20098 = JCM 7096; identical to SEQ ID NO: 42179

SEQ ID NO: 46197 - DNA, 1218 bp, Bifidobacterium angulatum DSM 20098 = JCM 7096; identical to SEQ ID NO: 44813

SEQ ID NO: 46198 - DNA, 1464 bp, Bifidobacterium catenulatum DSM 16992 = JCM 1194 = LMG 11043
gtgctgcgattgctgctgcgcggcaattccatgctgtacgtcgcgctgctgcgctccacgttcgacccgctcaccggcgagctgccacgcgagatcgtcgaggaacggttctcccgcagtctgacccgacttgcggaaacgggcgattacacgcccaaggaagggcagacgtccgcggaagccgcgcacacgatcctgcagcagctgacgaaggaaggcgaaggcgactacgcttggctcgccaattcgctcgacgtcgcagcccaccgctacctgtaccgtctcacggcgcgcgcccaccgtgcgatcgaggcgctcgaccggctcgaggacaccacgaaagcgctgtccggcgcgcaggccaacagcatcatcatggagatcgagcatgcgcgcatgcagctgaccgccgacccccgcgaacgcatccgcctgctcgaacgcgacatcgaggagcggcaaaagcagatcgacgaattgaagcacagcgacacgttggacaagctcacctcccaacaggtgggcgacatcatcggcgtcatccacaacacgctgcgcggcgtgccgatcgacctgcgcgaactggcgctcgaggaacgcgacaacggcgacaatctgcgccgaagcatgcagtcgggctccatcagcgtggagcaggcgctcggcacctaccatgacgaataccacaggtcgttccacgaatccgacagcggccggcgtttcgaggacgcgttccaggtgatcgtcaccgacgagggacgccgcgaaatcgacgaggcggtgcgagacatcgcccagaacccgtatctcgagggcgagcccggcatcctgctcgcccaggtacgcgccgaactcaaacgcatttacgagggcatcgaggacgtgcgccggcagatccacatatccgacgaggcggtgagccgtctggtgcgccagcagaccgacacgcattaccgcaccatgctcgacaagctccacagactgttcgtgcgggccagcgacgacgcgaagacgtaccccggctcggacgaacgcccataccgtacggacaccggcacggcgcaattccaggcattgccgtccaggcccgcgaaatcgatggcgcgcgcggccacggccggattggacgacgcgccttcgacgaacgtcgacgcgccggacctgaaggccatggtcgagatgtgcggcccgcggctgacgcacatgatcggactcatcaggcgcgatccggtcaaaacggcggacggcaggttcgtggatttcgcggcgagcttcaaccggctgccccgggaggaacggcgcgaaagcgagctgatcggcttcctaagcgccctacgcacgcaggacggaccggcaaccgtggcatggcattgtgtatccatcgacggaggcgagcgcgtgtggcgcaccaggccgatcttcaccaccgaggcggcgcttgacgagatcatcgaggagggatga

SEQ ID NO: 46199 - DNA, 840 bp, Bifidobacterium catenulatum DSM 16992 = JCM 1194 = LMG 11043; identical to SEQ ID NO: 44869

SEQ ID NO: 46200 - DNA, 3459 bp, Bifidobacterium catenulatum DSM 16992 = JCM 1194 = LMG 11043; identical to SEQ ID NO: 42325

SEQ ID NO: 46201 - DNA, 1236 bp, Bifidobacterium catenulatum DSM 16992 = JCM 1194 = LMG 11043; identical to SEQ ID NO: 42326

SEQ ID NO: 46202 - DNA, 1455 bp, Bifidobacterium pseudocatenulatum
  DSM 20438 = JCM 1200 = LMG 10505
ttgctgctgcgtaacaattccatgctgtacgtcgcgttgttgcgttccacgttcgacccgctgacgggggagctgccgcgcgaaatcgtcgaagaacggttcgcgcgcagtctcaaccggctcatcgaaaccggcgattacacgctgaaagacgggcagactgcgcgcgaggccgcgcattcggtcctgcttgacctcgcccgcgaaggggaaggcgactacgcctggctcgccaattccatggacgtggcctcgcaccgctacctgtaccgtctcacagcgcgagcgcaccgtgccatcgaagcgctcgaccggcttgaggacaccacgaaagcgctgtccggcgcgcaggccaacagcatcatcatggaaatcgagcatgctcgcatgcagttgaccgccgatccgcgcgaacgcatccgcctgctgaagagggacattgaggaacggcagaaggaaatcgacgagctggaacatagcgaggccttggaaaagctcacgtccgaacaggtcggcgacatcatcggcgtgattcacaacactctgcgaggagtgcccatcgacctgcgcgagctcgccctttccgaacgggacaacggcgacgcgctccgacggcgcatgcaggccggcgccatgagcgtggaaagcatcctcaccgcataccatgacgaataccgacgtgcgttccgcgaatccgacagcggacgtcgtttcgaagacgcgttccaagtcatcgtcaccgacgaaggccggcgcgagatcgacgacgcggtgcgggacatcgccagaaacccctatttggatggcgagccgagcgtgctgctcaaccaggtgcgttccgaactcaaacgcatctatgaaggcatcgaggacgtgcgccggcagatccgcacgtccgacgaggcggtcagccgtctcgtacgccagcagaccgacacgagctaccggaccatgctcgccaaactcaaccagctgttcgcaaagaccagcgccgaagccaaagcccatcccaatgaccaaagccggccctaccatacggacgccgggcaggcgaaattcccgacattgccatctcgtccggccagatcaatggcgcgcgccgcatcatccagcctgaacgacgccccagcggcgaccatcgaagcgccggacctcaagaacatggtcgaaatatgcgggccgcggctgacgcgcatgatcaggcttatccgcagcaatccggtgacgacatcggacggcatgttcgtggacctcgcggcaagcttcaaccagctgccgaaagccgaacggagggaaagcgaactggtcggcttccttagcgccctgcgcacgcaggacgactcgtcatacgtgacatggcgctgcatatcgatcgacggcagcgaacgcgtatggcgcaccaaacccattctcatcaccgaaacgacgctcgacgacatcatcgaggagagataa

SEQ ID NO: 46203 - DNA, 783 bp, Bifidobacterium pseudocatenulatum; identical to SEQ ID NO: 42320
  DSM 20438 = JCM 1200 = LMG 10505

SEQ ID NO: 46204 - DNA, 3459 bp, Bifidobacterium pseudocatenulatum
  DSM 20438 = JCM 1200 = LMG 10505
atggcagacggcatgaagatcgtttccgacaagtggatgctacaaagccgacaaatcgtcaactggggctcatacggcggctggcacgaattccgcccatccatggacgaaaccatgccggtgaccctgctcgccggcgccagcgaatcaggcaaatccacactcgtcgacgcgcaaatctcactcctctacccatccggaaccccctacaacaaggcgtcgaactccggacgttcggaacgcaacgactacacctacctgcgtggcatgatcggcgtaagcgatagcgaaaacggcgaaacgccgatcttcctgcgcggcaaagacgccgacggcaccccacagaacatctggggcgcaatcgtcgacacctacgtgaacaaaaccgacggaggactgctctcctgcggcaaattcctctacctgaacgccggagacggacaagacggactacgccgccgctacatcacctggaaccgaaccatcgacccacgactcatggaccagtaccgcaacacaccattcacccggtccatgttcgaaaaaacctatccggaatgcaccacgcacaccaacgccgcggcattccacgcctccatctggcaggacatgggcctaagcgccgacgcctgccgcctcctgcacaaaatacaatcggcggacgccccctcaaaactcgacgacatcttcaagcaaggcgtgctcgacatacccgaatccatccgcctcgcccacgaaaccgtcgacgactacaaccggttcaacgaaaacttccacagcatggaagacaaaatggcccgcgtcgccatcctgcaaaacatccagacacgctacggcgaatacgcaaagcaaaccaccgaacgacgcgaatacgaacccatcaaccccgacagcgaacatggcaacgcaacactgtccgcatgggcgcgctcgcgcatggccagcgaagtgcgcgctggtctgccggccgcgcagcgcaaggtcaaggagtcgcaggaggccatcgatcgggcgatgcagcgcgtcggcgagctcaacacgcgaatcgacgccgtcaaggaacgtatccaaggcatcgacggcggcagtctgcagcagctcggcaaggatcttcaacgcgtgcgccaggacatcgacgaggcgagcaggcaacgtcatgccatagccgaacgattcgaacaggtcgaaggcaggcttcccgacagcgagcagacatgggacgccaaacgcgccatgctcgccgaaacgctcgacacatacgaggaacggttgaaggacgcgaacgccagattccagcagctggtaggggagcgtcacgaccgccagcgcgaccgtgacagcctacgacgggactatcagcgcaaactcacgcacaggacgcgcatcagcgatgacatggacgacgcgcgcacgcttatcatgcgggcgaccggattggacgcgtccgaactgccgtatgtggccgaactgatggacgtgaacgaacaggacgaacagtggcgtctggcaatgaacgtcacctacgcgcccatcgcgcagaccatcctcgtcgacaaacgccacgagcaaggattcgcggcgaaaatcagcgccatcgacccgaaactcatgacacgacgcacgtggcggttcatcgacaccggcatgcaatacgaatcctctgccagcgaaggctggatgtcgtcgaaactgcaataccgggaggactctccgttcgccggatggctgaaaaaccagacgacgtcgccacggttcgacgcgcgttgcgtgcacgccatcgacgacatgaaccatgacgaacgacaagtgcaggccgacggacaaatcaaatccggcgaccgtggattccacggcagcaaaggactacaccaggtcatcggcttcatgaacgaacaatacctggccgaactgaaaaaccaactcgacaaggcggagcaggcgttgcagaacgccgaccgtcgaagcgaacaaatgtccaacgccatcagcctgctgcaagacgagcacgagctcgcacgaatcgtagccgacatgccatggagcaaaatcgacgtgaacggactacgggaacaggaaacgcgaatccgcaggcagatcgaacgcatcgaaaacgacccggaactcggccaactgcaaaccgaactgaaacagctcaaccaacaggccaccgccgaaaacagaaaccagtaccaagccgaagacgacctcgacaaggcccaacacgccgtccaagccgaacaagcatggctcgacgcctacggcaacgacgacttcgacgatgccacactatccagcatggtatcgaacctactcgccgacgcatacgagaactgcttcggcgcatccgtacgcgcgcaagaccggccaaaactcatcgcaggcctcttcgaccatgaaagcgaaacaccattccacgcgcgcgcgctacgcaacatcgcacgcatcgcacgcacacgaatccaagaaatcgacgccagatccaaccaactgcgcgccgacacggaacgcatcatggacgactacctcaacaaccactccacagatgacaacaccgtcatggcaagcgtggaagactaccgatacttcctcgacgaactcgacgaactcaacatgctcgtcacccgcgccgcaaccgacgaagaatacgccaacagcgtcaaaaaactctacatgagcttccaacagctcaaccgcgcgctacgcaccgacgaagaaaacatcaaagaacaactcaaccgcatcaacagcatgctcaaaggacaacaattcggcccacaaggcggcagactatcactcgacgtgaccttcagcccaatcgaccgacaattcgaaacaaccctcagccgcatcctgtcaaaactggaagactggacgcgcaacgcaagcgacaatcccacggaaacacgcaaagcattcaacaactgcgaaacattcgtgaacagactgcacaacgaactcgacaaaatacacgacaccaacggcatcaaagcatacggcgcacgcaacctcgacccacgcgtacgcagctcattctacgcaatcgtgcaccacgacaacgcccccgacgaacgcatcagctccaccggcggaaaatccggcggagccctccaagaactcacctcattcgtctacggcgcggccctcatctacctcctcggcggcgacctcaccgcacgccccacctacaccacgctcttcctcgacgaagcactcatcaaagccgacggccgctacaccaaacgcgcgctcgccgtactaccccgactcggcttccaaatcatcgtctccgccccggaaagcaaaaccgcggaaatcctcaacgtcgccaacagagcatacgtcgcatacaaagacccatccaccggcaactcatacctacaggaactcgacagcgaaaccatcacacaggacgaaacacagcccaccaccgcacccgcgaaaccaacaacggaggcataa

SEQ ID NO: 46205 - DNA, 1203 bp, Bifidobacterium pseudocatenulatum
  DSM 20438 = JCM 1200 = LMG 10505
atggcaacggccagaagcaccaccaacagcgacatccacagccaactcaacggatacgtcaccgactatctcaccaagcacatgtatgacgccaacacctcctggccattgcgcaaaaccatccgactacccaaacaagccgaactcgaagcccattacacgcacatccgcgcccaagacgaagccatccgcaactgggcacaacaacaccactgcgaaaccagcgaaaaaaccaaaatcatctccaacggaatcgtccgacaaaccagccaactcatcgactcggtaaccatacccgacctcaacacggccctcaacatcaccacaccacaaacacgcaaactctaccaacgcgaacaccaacgcgcacacaccatcaccaaccaattcaacctcgactccaacacctccataaacatcgccaaaatcctcaaaaaccacgacgacaccgacttcaacctcgtcatacaagccgcacactacttcgccaaccacaacaccgaaaacatgaccccacgcatggtccccatccccggattcagcgcaaaatggctaggcaaaacaacatcaaaccgctgcaaagcaatctgcaaactcctcaaacgagaacaactagccctcaacgaccgccacggagaaatccgactccgactcctcgacacacaacaccacaaccaaccagacctcatcgtgacacaaccatggacagacggcgcgccacacgacatcacccacatcatcatcgtggaaaacaaagacacctaccaagccatacccacaacagaacacgccatctgcatattcggcagcggacacgcggcgacccgaatcaaaacactactaccttggatcacaaccacaccccacatcatctactggggagacatagacgcagacggcctcgaaatactctccgaactacgacaaaccggcatcacctgcgactccatactcatggacagcacagcatacaaaacatacgaaccatacggcaccaaactcgacaccaaaaaacaacccctcaaaacacgcgaccccaaaccaacaccaggactcacacaacacgaaagaaacttatacgaacaactctgcaccgggaaaaacacaacctacctacgaatcgaacaagaacgcatccccatcaacgacgcaatgacaatactccacaaccaacaccaatggaacacaacacaccacaaatag

SEQ ID NO: 46206 - DNA, 1530 bp, Rhodopirellula islandica
atggaaattgagagattggtcgcgtttttggaatcctcgccaacggttcgtttgctgcgagccgatcaggcggcgtttgtggtttgctttctccgccattcgttgaagttgaccgggcaagattcagcgatctcgttgtcgcacaacgaactgcaacaccgactgaccgtctttcaagaacaacttcgggaggacggatacgacgccttctcaggttccgcggatcgctaccttcgcgaatggtcggatgcggggtggctgagacgctttctgccagctgaatcgtccagcccgcactaccaactgactcgctatgccgaagacgcgattgggtttcttgaacagtcgatctctcgcgaaacgcgaatggtcggcactgaatctcgattgcggctggtcatcgacacgctgaccgatttggtccaaggcgcttcctcggatcgtgaacagcgattgcaaaccctgatcgaacagcgtgacgacttgaaccgtcagatcgattcaattcgcgggggcgctgagatcgagacctaccatcccgcgcaggttcgcgaacgtttccacaccgctgttgacctgctgaagaccctgcaaggtgatttccgggcggtcgaagatcgctttgaagaaatcgctcgcgatgtgacccgcggggctctggataccgagcgcggtcgcggtgacattttggccggtgcactcgatgcggaggacttggtcaaacaacaagacgaaggtgtcagcttcgatgcctttgtcgccttcctcttttcgccgcaggctcaagccaaactacgagagacgatcgccgaagtgacacgtttggaagccatcaccgatcaacgcggcgccattgaacacgttcgggcaatggttccttccttgttggcagaagccgaaaatgtgcttcgtcaaacaggacgattgtcgcaaacactcagacgcttgctggacagtcaatcgaccagccatcgcaagcgaaccgccgaagttttgcaagagattcgaacgttggcggcgaagatgaaacaatccacgagtcaaaccggaatccccgtgccgagcgaaatcggattgcgagtcgacacgacgttgggcatcagttcgccattgacccgaccgttttggactcccccgcaagtcttcgacatcgccgtggaaaccaacgagattgactgggaaacagcgaaacggcatgctcgcaagctatccgggctgaaacgcttgcaatgggatcgcatgcgagacttggtgcaccgggtcacggatctgcaaaccaacatcacgttgtcacagttgctggaacatcgcccacccacggtcggcgtgatcgagttggtcggatggatgcagattgctcacgaggacggtcacgccatcgatgccgaagcgaccgaacaggtgacagtgacgacggaggatcctttgagcggcgaatcaagcacggttcacgttcgtgttccgctggtcactttctcaaagacgcatcaaatcgaaaacgaacccgtccggaagggaaaaccacgatga

SEQ ID NO: 46207 - DNA, 714 bp, Rhodopirellula islandica
atgacagaaccttcttcgcaaacggatcctacgcccgacaacacgttctccgacacgatgccgcctccggttccctgggcccccgcggcagttcgattgttgcaaggcattgtctaccatgacgacgcgggcgacacgtgggaacggattctgtcgggcgtcacgccgctgacggactacttcgctcggatcgggttgcaattgattgtcaacgaagaagacgggatggcctacctgcgtcagatcgatcccgagtccctgccgccggagtacccgtcgattccaaagttgtttcgcagcgtgcgactgacgttcgaggcgtcgttgttatgcgtcttgctgcgagaagaactgcgtcaattcgaagaagaaattcatcgcgatggtcgttgtgtggtgactcaagcggcgttactcgaagtttggcaatcgctcgccccaacggagactgacgacgtgcgagcgaatcggaatctgggcggtcaacttcgaaaactcgaagagctgaaattcgttcgccagttcgaaaaggatccacccagttgggaagtccgtcggatcttgaaagcgagattgccgctgcagaaactggaacggttgcgagcggatttggaggcggagttggaacgcagagacgcgggatcggtccaggaagaagaacttgacgcagagacggggagacgcaaggacgcagagggcagcgaaaacatctga

SEQ ID NO: 46208 - DNA, 3423 bp, Rhodopirellula islandica
gtgatgcgtttctcagtctctcgaattttatcgccaaccaatatgaagccctctcaaccactcgaattattcgctgacgacgatgaagtgtcggaacgtttgaagcccgggttccgtctggcgacgttcgaagtcttcaattggggaacttttgacggccaagtccactcgatctcgcctcaagggacttcctgtttgctggtcggtgaaaacggagcgggcaagtcaacactggtcgatgcgatgttgacgttgctggttcgtcccggggttcgaaactacaacgtcgccgctggggcatccaagaaagaacgcgacgaacgaacgtacattcgcggtgcgtacgaccggaccgccggcagcgatgagaagcccaggattcagtacctccgggaagggaccggattctacacggcgctgttggccacgttcgccagcgctcgttcgggcaagtcgttcacggtttgccaggtgatgtatttgacgtcgagcggcgatcggaaaatcttctacgcgtttgatcggaaacctcgcagcatcgcaggtgacctgggcgatctgacctccaccggtgacatcaagagcacgttgatcgaccggggatttgaagtcaccgagaacttcaaaacgtatcacgggtggatgaaacggttggtcaaatttcgttccaaggcaatggatatcttcaaccagaccgtcgcggtgaaagatgtccagcgactggatcagttcattcgcgatcacatgctggaaaagaagtcgtggaacgataaggtcagcaaactgctcgaacactttgcccagttgagtgaggctcatcgtgcactcgtgcaggtgcgtcagcagtcggagttgctggtcccgatcttaagaacaggcaagcggttccaagagacaaacgccaagctgcaatcggctcgcaaagaactcgctgcatcggggttgttctttgacatccaaaccggcgaacttttgcgtccgctgtgtcagcaatggaaactgcgaatggaacatcttgatgaacagatcagtctgctggatcactcgttgaaatccaaacgtggtgaagccgcgtccgttgatcacgagattcgccacagtggtggggccagactgcagcaactcccctttttgatcgaaaaggaagaacagcatgcggcgtccaaaaaagagaaacgccttttgtatgagtcgaaactgaagcaagttggtatcgacgaaaccatttccagtcccgagcaacttgaaaaggttcaccggcaaattggcgatcagcaacaacgaatcgcgatcgaaaaacaaaccgccaccgaccagctcgaatcactcaactatgaaatcggtgtgctgcgtcaggaactcgccaccgacgaaagcgaactggaatcacttcgccaacgaaagggcaatctgcccgacgcgttcattgaagttcgcagtgaactgtgcgctgcctttcgactctcgccaaccgatcttccgttcgcggccgagttgatcgccgtcaacccggatcatggccgctgggaagcgtcgattgaacaggtgcttcattcctttgcgagaacattgttggtcccagacgacctctatgccaaggtttcaggatttgtcgatttgcagcgtctgacggattcacgcggtcgaggtctgcgattgacctacgatcgtgtcggggctcgccagtccactccatcgcaaccatcgaccgacctgggcctgcccgacatgttgctctaccgcgacaaccatccactggtcccgtatgtccgcggcgagattctgtcacggttcgaccacctggcgtgcgaatccatccgagactttcaaatggcgggtcgtcgggcgatgacggtccatcgacacgtcaaacagaaccgccggcaacacgccaaagatgaccgcacagcgattggggaccgaaagcacttcgttttgggctgggacaatcgcaccaagcgagaggcactggaacgatcgatcggagaacaaaaggcgttgcttgatcgcagagtttcatcggctgagtcactccgtcgtaggagcgaccaggcgacgcgaaggctgagcctgttggacgagttatcggcggtgacgcagttcgacaccatcgacgatcaccggcacgattttgaagcctctcaattgaggctcgaaaagcaaaagctggaggagtcgagcgatcaagttcgacagctcaaggcaaagctggcggctctcaatgcggagatccaggggctggaatccgaacgagatcgatttgtgggggaacgctccaatctgcagacagagatcgggaaaagcgaaggaatcttgaaacaagttgatgcgaaagtcgaggaggctcgctcgaacgatcgattcgcttccacccaagcgttcttcgacggggtcgtccatcaactgggcgagcgtaaactgacattggagaatcttgggatgttaccgcgggatattgcggatgaactgaacgtccgtgtcagcgagttggaagagcgaatcgttccggtccgtgacaacctgaccaaggcaatgagcaaattgttgaatcgattcccagtcttcgagtcggaactcgatcccacgcctcaagcattgcccagcttcaaacaacttgccgagcgaatcaacaaggacgacctgcctcgtcacgagcggcggttcaaacagcgactcaaggaaaaagtgcttcaagagatcggcttgctacatggatcactcgaagacgaacgagaagaaattcgcagcaaggtcgaaacgctcaacgaagccctgcgtcaactcgattggaatccaggctcgttcatgcgcctggaaccaagcgacacgtccgacgcggagatccgtgattttcgacgggagcttgcgggttgcctggaaggaacgctaggtggcaccgacgacgccaatgaagcaacgttcaagaagatcgaacagctggtcgaccgacttcgagacgacgcgaaccttcgttggcgagaaaaggtgatcgatgttcggaattggttcaaattcgcggctcgcgaatacgatacggtatcgggtgaaccaggcagctattacgacggaggcaccgggcaatccggtggcgagaaaggcaaactggcgttcttggtgttggtcgctgcgatcgcctatcaatatgatctccaaccggatgatccatcccgcgaacgatttcaatttgtcatggtggacgagatgttttcacgcagcgatgacacgcgtgccaagtacgcactcgatttgtttgaacgttttggattgcagttggccatcgtcgcgccactggacgccaaggcacggatcacggagagctatgttggcacgtatggtcacatcatcaaagatcccgacacgcaccgcagccaattgatcagcctgacgaccgagcagtatcgagccgcggatcaggaagcatga

SEQ ID NO: 46209 - DNA, 1158 bp, Rhodopirellula islandica
atgatcactgccaaacagattcgagacaaagcaaagcgactgtttgggaaggcaatcaaggcttggttgaaccatgagctggaggcgttcttcccacaccgaatccccgccaacctgacaccctcgcaggatttgtcaaaagcgatcgcggaagtcgagtccctgcgtgagcacagcaaacgaacgatcggatcagggtaccgaatcgaatggaaatcccgtcgaagtcgcacgcatgggcagaatgactttcccgatgcagttttcgtggacacgatggatgacctggttgaactgagtgaccgggtgggtgactggaagtcgcttcagttggccgttgccacgcttcgtgatcgtcaaccgaggctcgaagactggttgcgagcggggacgaattggaagttgattttggagttgtccgacgtgcttcctgatttgctcagcattctcgatcacatgcttttgcatccgcgtccagattgtttcgctcgtgagttgccggttgccgtttccaccaagctgatcgagcaacatcgtcgtcggctggcaatctggctggatctgctgttgccgcccgacgcgattgatttccggtttggccacgaccaatttgaacctcgatacgggctgcgctacgcccgtccgcactacttgcttcgagtcctcgacgaagcgttgcaacacgatctggggctaccatttgacgaactttcattgcccgctgaatccattgacaagctgccggcaagggaccagcgagtcatcattgtcgagaataaagtgagtctgttgtcgctgcccttgatgcgtcgaacgcttgcgttgggcggactgggaaacggggtgacgcaactgtctgagatctcctggctttcgaagtgcaaagtcatttactggggcgatctggatgccgacgggtttcgcattctcgatcgactccgagtgattcttccgcacgtggaaagccgtttgatggaccgatccatcgtggagcaatttgccgatctagcgaccaaaggcaacgcgagcgaggctcatgcagtcgagaatctttgtgagagcgaactgcggtgctatcaccacgtgtgcgaaaccaaccttcggatcgagcaagaacacttgccgactgagttgatattcaaggcactctcactctga

SEQ ID NO: 46210 - DNA, 1464 bp, Paraburkholderia glathei PML1(12)
gtgaaagctcgccgcactgccgcagcgcttgacaatctgcgcaaccagccgctttggcgactcttggccgccacaaaagggcctgtctttattgcgctgctgcagtcattatttctcgacgtagacaaggttttgccaagttccgtgatgcacgagcgactggtgcgcgagatcgacgcgctccgggcggacggtgaagaactgcctcaaacagcgcaagcctatgtaacagagtggctaaacaatggttggctgagccggcgattccctccaggtgcgagcgaagaggaatacgagctctctgcggatgccctgacggcgctacgctttgtcaccagccttctgaaaccgcgcacaacggcaaccgagagccgcctctcgcttgtcatccagcagttgtcacgcctcgcagccgaaaccaatgtcaatcccgaagcacggctcgtagcgctgcgcgcagaacgagagcgtattgatgaggccatcgctgaagtcgagcatggcggaatcaagatattgccggtagagcgcgctatcgaacgtgcacgggaggttatcgctttggctcaggagctgacgtccgatttccgcagtgttcgcgacgagttcgaaaaactcaatcgcggcctgcggcaaagtctgatggagaacgaaggaagccgcggcgaggtccttgagcaactgttcgccggcgtcgacatcattggcgagagcgatgccggccgcactttcaacgcgttctggcgattgctgaccgacagcgagcagtcggctacgctccgggagtcgctcgacgaggtcgccaatcgtcctttcgcgcgagaccttgagtctcacgagcgcagatttttgctgagcctgacggggacgcttttaaacgagggtcgtggcgtgcacgacgttctgcagcactttgcccgcagtctgaaaagctttgtacaaagccgggaatttctcgagcaacgacgtttgcatagcctgttgaaggaagctactcaagcggcgttcgccgcgaaaaatgcggtccgttcaaacgagcaagtcggcttcgaacttatgcaatcgagcagtcgaatccggtcggtcgctcaatgggtgatgtatgaccctgcgcaacgggtaacggattcgtcgatgaaagaggccgagccatccgaactggatctggaaacggtcagcgagttggtgcgtcaatctgagattgactttcgtacactgaagcaaaacgtacgcgcggtgctggaccggcgaacgcaagcatctgtcggtgacgtgctggctgcgtttcccgccgagcaggggctgggtagcgttgtcggttacgtcgcacttggggccaggcacggcgaagtgaccgaagggtctgagatagtccgctggacaggcgatgacttggtccatcgccgcgcaaagttgccggctatttacttcattagggagcgctaccttgaactcgttgaatga

SEQ ID NO: 46211 - DNA, 687 bp, Paraburkholderia glathei PML1(12)
atcgccgcaagcgatgagactgtcgagggcgtcacctttcgcggcgatacagggacacttcccgtggaaacccggcgagtcctcgtccaattgctactcggcccgtcggtcgatgcgcgtcgtcagtcgaagctttggcctgtgctgctgcgcgatgaggcactcatccgttcgcggttgcatgagctatttttggagatcgtcatcgatcacgagcaacgcgttgcattcacgcggcaggtaatctccgacgaggcggatattccgatccttcttcgcaaggcttcgctgacctttcttgaaaccgcactgttgctgttcctgcggcagcgcctgacccagtcagacgctcagggagatcgcgcggtggtgtctctcatcgagatgcaagagcacctgcacgtatttgaacgggacggcaatcccgatcacgccaagttcgagcgtcaagctgtcaatgcagtcgacaaagcgaagaagctaagcctgttgcagcgcatccgcagctctgacgaacgctatgaggtatcgcctactcttaagctgctgttcacggcagaggaaatccaggacctgacgcgcacctatgcaaggctcgctgcaaacggcgaaaacacagaggacaggcatctcccggacgaggaggggctcgatgggacggacgagcaaggagatgcagagctgtga

SEQ ID NO: 46212 - DNA, 3333 bp, Paraburkholderia glathei PML1(12)
ttgctggacggtgccgaggatcagtttcgtcttgctcgtatccagacgtttaactgggggacattctccaacgttttcgacttccccatccccaaggagggttacctctttgtgggtccttcagggtcgggcaagtcgacaattctcgatgcccatgctgccctcatgacaccgccaaaatgggtagacttcaacgttgcggcgcgtgaggcggaaaggcacggacgggaccgcagcgtcatgacttatcttcgcggtgcctgggcgcagcaaacgggcgaaagtggcgagtatgtatcgcagtacctgcgcagcggcacgacctggtcggccatcgctgagacctatcgcaacgatcaagggcggatcgtcgtgctggcgcaagttctttgggttaagggaaactcgacggcgcagacggacgcccgaaaaatttatctgacgctcgagcgtgcgttcgatattcaggagctggagttctttgcgaaaaacgaattcgatgtgaggcgcttcaagcatgatctgccggatgccaaggttcaccctgagttcagtggttaccaggagcgcttcaggcggctgcttggcattgacaacgagcgagcgcttcggttgttgcacaagacgcagtccgcgaagaacctgggcgacctgaacgtatttctgcgcgacttcatgctggacgagccggagactttcgatattgccgcaagcttggtcaatgaattcggcgaactcaacgaggcccatcaggaagtcgtggctgcgagaaagcagatcgagacactgaagccggctcgcgatgaatacctcgagatggagaaggggaccttcgatctcaatgggctgctggcgattcaggctgctatcgaccagtataaagagcatcagcggaaggtacttttggagagtcgccttgccgaagtaaccgtcgatcacaaagggtcggttgaggagacgcggcgtctgacggaaatggttgccaatgaactggaaagactgacggaccttcagcgccagaaactggacatgggcgcgggtatcctcgaccgcctcaaacaggacatcaagctcgccgaggatgaaaaaccgaatcggatcaccaggcgtgagcaagcggataaagcttgcaagctcatgggttggacggttccgaacgacgttatagcgttcgtgcaatgcacagaggccgcaaaggagcgcgtgatgaaggcgcgtgacttcaaggctgacatcgagcaccgcaaggatgcattgaaggatgagcaccgtatcgctaaggacgaatttggcaacgccgttgcagaggtcaaggcgttggagcgtcagaagtcgagtttgccagcgaagctcgtggccctgcgcgagcagatggcccgtgatctttcgattcccgaggagaagctgcctttcgtgggcgaacttatcgaggtcaagtccgacgctctggagtggcaaggggccatcgaacgggtgctgggcggtttcgctcgatcgatcctggtcgatgacaaacattcctcagcggtttccacctacgtcaatgagcgcaatattggccagcggctcgtctactttagggttcttcctcaaactggcgctcgcagcccggggcctaattctctcgtgcgcaagctgaatgtgggcgcggatacgtttggcgactgggttcgcgaggaactcaagactcatttcgacttcgagtgtgcacagacgttgcaggcgttcaggaacgcgcagcgtgccgtcacgcgagagggacagatcaagcacaacaccatgcggcacgagaagaacgaccgctactcggtgaacgaccgtagccaatgggtgctcggtttcgacaacaaggcgaaactggctctctataaggaaatggcggtcgggcttgccagccagattagcaagctcgaccagaagatcgggaaagttcgggaggaagaagatctccagcacatgcagatgctgcattgccagactctttcgaacctcacctggaacgatgttgatgttgcatcgttagtgacacgaattcacgaccttacggcgcggcttgaagaggaactggcggcacgccccgacctggcagagctggataaacgcatcaaggcgcaggaagatgttcataccgcggcggtgagtaaaaagaacggtgaacacgtcaggggtttggacttcaagcggacaatcgatcgtatcgaggctcaactcacggacctggcacggctctggcccacctccgaccgtccccctgcgttcgcggagcagatcagcgccaggtacttggccaccaataaggacctcacgctggagaatctggatcaggtcaccaatctggtcgaacgctcgctcaacgtcgaactgcggtcactcgaaagccacctgacggatttgcgcaatgcgatcgtccagcgatttgttgagttcaaccgtttatggcctgcattgtcgggcggactggacgctaccctggcgagcgcggatgactatttcggcaagctccagcggctggagaaggacaatcttcctgcgtatgaggaacgcttctttagcttactgcgagagcaaagcgatcagaacctgacgctgcttgccaccaaactcgatcaagagcgctctgcgatccgcgttcggatggagctagtgaacgaaagcctgagcactgcgccgttcaattccggtacgcacctcgtcatcgaaacgagcgacaaggcactggaggacgtgaagcatttccgtgcaagcctgcgagagtcgctgagccattcgttcagcaccgaccgcgagctggccgaggaacgtttcaaggcgctggcggcgctggtcaaacgtctagcaagccaggagagcgctgagaagaactggcgcaacctcgtgctggatgtgaggcagcacgtggagtttgtcgcacgggagctggatcaggacgatctggaaatcgaggtctatcgcagcggcgccggcaagtcgggcggacagcgtcagaagcttgcggcaacgtgtcttgcagctgcactacgctaccagcttggtggacaagaccggtcgctacccagctattcgaccgtggttctcgatgaagccttcgataaagccgatgcggaattcacagcaatggcgatgaatattttcaagaccttcggattccagatgatcgtggcaacgccgctgaaatccgtgatgacgctggagccttttattggcggagcttgcttcgtgcatatcaaggaccgcaagaaatccgcggtcatcccgatcgagtatgacagcgacagccatcggctgaaactctcgcacgatattagccatgccgaagaaacttctatcacctga

SEQ ID NO: 46213 - DNA, 1185 bp, Paraburkholderia glathei PML1(12)
atgccgaagaaacttctatcacctgatgcggttcgggacttcctgactcggcgttttaacaatcaacaccagaactggcttgcaggcgaagggagttggccgttgattgtgggattgggcacgccgacagaaaaggatattgccgatgacgccgcgggcgtgcgggcctggacggcagcatgggaaaaacgtaccggacccggtacggttatgtcggaagatcgccagtttgcgcggcttggcagacagcggtttcccgtgggcctcagtcttgagagtccggccgtcgtggcttcagcagttgggcaagggattcgctgggcgacagcgtccgggcgctacgcctatctgacgggacggtggccaccgttgattcgaggcatgaaattggcttcaaaattcgatgttctggccgactacccaagcgaagactttgagcgactcgttgcattgcttgcctggttggaagcgaaccctgcgtctaacctgtatcttcggcagcttccagtcgaaggactggatacgaagtggatcggtcagcgcacgggactcgtttcggggctgcttcgcgagctcagtgccagtgccggtgagagtaacgatttccacgctgtgtgcggcctacgcaagccgcctcaccgggtttacatccggttgctatgtcctgaattgcgcgttctggtgggagggctgtgcgacatcgaagcgcctgtcaatgaattggcgatgctgcctattgaaccccggtcgttggtcattatcgagaatctggagacagggctggcgctgccggaccttgccggaactgtcgcggcaatacgactaggcaacgccgtgagcgcactcgaggctctgccttggctgcgcgtttcgaacgccgtgtactggggggatattgatacccacggatttgcgatcctgaaccgggcacgccgggtgttgcctcagctcagatctgtattgatggacgaggtcacgctgatgtcccatcgctcgttgtggggtcgtgaacccgttcaatacggaaatgaagctctggaaacgctggtggatagcgagaaggcagtctatgacgggctccggaccaatgcttgggggcatcagatccgccttgagcaagagcgtctggtctgggacgattcggtccggatgctgcagcacgcgctgttcggtgggcgtgactag

SEQ ID NO: 46214 - DNA, 1470 bp, Xanthomonas citri pv. citri; identical to SEQ ID NO: 41638

SEQ ID NO: 46215 - DNA, 702 bp, Xanthomonas citri pv. citri; identical to SEQ ID NO: 43556

SEQ ID NO: 46216 - DNA, 4023 bp, Xanthomonas citri pv. citri; identical to SEQ ID NO: 41640

SEQ ID NO: 46217 - DNA, 1284 bp, Robinsoniella sp. RHS
atggaagctttgctgaagataaatgaagaataccaatataacagttatttcttaagcagggaggtctgtattcagatacttggggactattttgcacagcggcgggtaatgatgcagaaggaggaactggagtctgaactggatatactggaaccaccggccaccaggatactgaactggctgctgaaagcccagtggctgaagaagctggatgattactatatgcaggtaaccaacattataattccggattatgccgccatttttattgatgcatttgaacgactgaacagtgatgaagaagatgacacgcaaatctatatccagaatatctatgcaattctcttttcttttaaaaatgatccccgggcaaataccagtctattaaaaacagcactagtgaatgtacgaaagctgaataaatccctgcaggatatgctccacaatatggataagtttttcaccagccttctggaacagaaaaattatgcagatctgttaaaggagcatctggaggggtatgtagaagagatcatcaacaagaaataccatatcctgaaaacatctgacaacttttatctgtataaaaccgatattaaaggatggatacgggagatgcagtcggatatggagtggatttcactgatgagccggcgggagcaaaaagaaatcaacgagggggatatgctgcgcatactggatgatatcgagcggggatttgatgatattgaacaccggatttcctttatggacagagagcatatgaaatacgtgcgggctaccgtaaccaggctgaattatctcctgaacggggaggcagacaggcgggggctggttattcagctgttaaatgaactgtcagctggtcaggggcaggaagataaaattaaaaaagtatccgccaggatgaatttgtcttcttttgaaattctctctgataaatccctctataaaaagaggcgggcgaaaagcagctttcatgcagagaacaggtctgaggaagtcagagaagagttaagcagggaagaaattttaaaactcaaccagctgcataaccggtatagcaaaaagcagattgaagaatttattgaaaacaggatggaaaatggcaggatgaaggtatcagattccatgatagagactattgaggagtttgaacagctcatccttgcatatgactatgccatccgaaagggcagcggctttgcggtggaaagccaggaagtggaatttattgaaaatgggaagtaccgctaccctaatctgacgtttgtgaaaaagtaa

SEQ ID NO: 46218 - DNA, 900 bp, Robinsoniella sp. RHS
atgattacgtattacgatgaattatcactggaagaaaggcaggaagtaactgcagtaatccagactttatataaacagacgtttcttttagagcggaaatttgataagagaacgggcagattccagtttaataaagattaccggatctgtaataaacacctggagtttgtcagggaatatctggcagtcagcggtattgcgctactggataacagccagggcgggattatatatatacagggtgaaaatattgtgggggaaaagctgccaaggctggcaacactttatattctcctcctgaaattaatctatgatgaacagatgtcagccgcatctaccagcgtaaatgtttatacgactctgggagatctgaatgaacgggtagggagttttcatttgctgaaggacaggccgtcaaatacagaagtgcggagggctgttgcgctgcttaaaaagtatcagattgtagagcccctggatgccatggaagaactggatcaaaatgcacgcctgattatatatccctgcgtaaatgtagttctgatgacagatgatatccgagccatgttagaagcgcttaaggcagaaccgtcagaaaagtttatggaaacagaggaagctggagacgatgacggaacaggagaagcagcaggaatagaagaagcatacggaacaggagaagcagcaggaacagaagaagcatacggaacaggagaagcagcaggaacagaagaagcatacggaataggagaagcagcaggaactgaagaagcatacggaataggagaagcagcaggaactgaagaaatagaaggaacagaaggaatagaagaaatagcagatgctgatgaaacagaaggagacgaagatgaaggaaccgatgacgaagatgaagcataa

SEQ ID NO: 46219 - DNA, 3315 bp, Robinsoniella sp. RHS
atgtgtctgaacaactggcattacatagaccgtaaaattctctcctttaaccaggaaattaatttttttaccggacattcgggaagtggaaaatcaacaattattgatgctatgcagattgtgctgtatgcaaatacagatggcagaggattttttaataaagctgcggcagatgactctgaccgaagcctgatcgaataccttcgggggatgatcaatataggggatgataatgaattttcttatctgagaaatgaaaacttttccagtactattgttctggagttaacacgtacggatactttggaatgccagtgtgtgggagtggcatttgatgtggatacttccacaaatgaaatcagcagggtatttttctggcacgatggtcctctcctggaacatgactaccggatcaagcatagaagtatgtctgtgtctgaaataaaaacggaactgcagcagcggtttacaaaggaagagtgtttttatacttcacataacgagcgtttcagaagacagctttacgatgtctatctgggcggactggacatggaaaaattcccattgctgttcaaacgtgcgattccatttaaaatgaacatcaaactggaggattttgtaaaagaatacatctgtatggagcaggatatccatatagaagatatgcaggaaagcgttatgcagtatggcaggatgcgtaaaaaaatagaggatacctgcaaagaaattgaagaattaaaagaaatacaggcattatatcaaaaggtctgtgaaaaagagcaggagcgtaaaaaatacagttattttacagataaactggatattcttcagcttaaagagcgggtggtcactcttcagaataaggtgatcctctatacccaggatataaccggacagaaggagcagatcggagttctggaccgggaaatagaagagctgggaaaaaccggggatgaggtattaaagcacatttcagccaccggttatgaagagctaaagcagcagttgatcagtatcaatgagctgttggaacgtatgggaaagagtaaggcacgctgggatcagaccgggttaaggctcaaagagtggattgatcacgatatgacatctaattctgtaatatgggatatagaaaaattcattaaatatgaaatttcagaggtggaactgcatcatttacaggcatccatccgggacctgcagactgaggtaactgaacaaaagcaggatctggatatagatatccgcgccctaaagacagagcagaaaaagattctggaggaattaaaagatctgcaccatggaagaaaatcgtatcccaaagagctgcaggacgcaagacagcagctggcatatcagctatgtgaaaaagctggaaaaccggtaaaggtggatatattggcggatcttctggacatcagggatgagaaatggcgaaatgccgttgagggttacatgggaaaccacaaactggccattattgtagagccttcattttctaaagatgccatggagatttaccggagcatggataaaaagaaatattatcaggtagccgtactggatacggaaaaaattatgcaaaaagagttccgggtaaaaaagggttctctggcagaagaggtcagtgcaaaagaaggccatgtcagggcttatattaattttctccttggaaatgttatgaaatgcagcagtgtggaggaactccgtgagtcctctattggaattacaccggaatgtatcctgtatcagggctttaagctgcagcatattaatccggataactataccaggtgggcatatattggtgcggacagtctgcgcagacggatgaaacagttaaataaaagaagccaggagctggtaaaagagttagatccacgtctggaaaccagaaagtcttacgacaaaatgcttgggatggaaagcctgtctaacgatgcggctgactatctggattggctggcagatatcagggactgcaaggcgaaggagaaaagtaaaaaggatctggaactgagaattcaaaaactgcgggataaagatattgcttctctggaaaagaacagaaatgaattgctgaagcttcaaaaggaaaagagaaggtggcgtgaaagtatccagaaagcaatgtggaaaaagcaagaggagattatcgaaggaaaacgcctgcatttgaatctgggagaagaactgacgcagaaagaaaagaaatttccttctgatccggcgatggatgaggaagtgcaggaatatttgaagaaaaagacaaatccaaacttcgagaaactgcgggactattttaccgggcaggtgaatgcagcccttcgtgggcaggatgaatttttccgggatctatgtgccctgcgtcaccaatacctgcttcactatccagccagaggatttgcccatgacaaggcagataaccgggaatatgatgagttactggaaagattaaaatgtgataatctgccaaaatacatggagattgccggggagcgggcacgactggctaccagggaatttaaaaatgattttatgctgaaaatccgcagtgccattgtagaggcaatgcagcgcaaagacgaactgaaccggattatcagcaggctggacttcggtaaggataaatatcagtttatttttgctaaaaataaagggcccgatggaagattttacgatatgttcatggatgattccctggaaattaatccttcggatctgtccttgtctatggaaaaccagatgaatttatttaccattgcccatgaaagccactatggagagctgatatcagagctgatctctatctttatccctcctgaaaatgcaacaccggaggaaatggaggaggcgaagcgcaatatgcataagtacgcagattaccgtacctatctctcttttgatatgcagcagactatccagagtgaaaatgaaacaatcaagatacatctgagcaggatgttaaagaaaaattccggcggagagggacaaaatcccctttatgtagcccttcttgcaagttttgcccaggcttaccgttttaacctgccgcccaagctccagcgcaatcccaccatacgcctggttattttggacgaggcattttccaaaatggacggagaaaaagtagcgagctgcatcaaactgatccgggatctgggattccaggtaatcatcagcgccaccaatgataagatgcagaattatctggaaaatgtagataagacctttgttttcgccaatccaaacaagaaaagtatttccatccaggaattcgaacgtgtggaattccggcagttgtccggtgagtaa

SEQ ID NO: 46220 - DNA, 1457 bp, Klebsiella pneumoniae
cagccaaaaaccagcatcccgcatggatacttctggcttcccgccgtgccccgttggtgctgagttgcttgaaaacgttgtttgaaaaagctcatgatggtatccctcttgaggacgcgattcagtctctttccggcatgctcatcgagcatgtgagtcaggaacagtatgacattaatcaggacaatccctctcttcaggccagtcgtgaactgcgggaatggattaaacgccgcttaattgtcgaacgggatggccgtatcttcgccaccgatgcgcttgaggttgcgattacgtttgttgagtcgctggataatcgtttcatgacctctacggcttcccgtttgtctaccgtacagcgagaaattgaaaacctggaaaccaggcttaatcctaatccggctaaccgggttgcaaccttacgtcgtcgtattgctgaactggagcgtgaattacaggaggcggaagccgggcatattgaagtgctggaaacgcatcaggcggttgaacatattcgagaggtcttcaatttagcttccagcctgcgggctgactttcgtcgcgttgaagactcctggcgtgaggccgaccgtgcgcttcgccaatccattattggtgagcagtatcatcgcggcgatatcgtagaacgcttgcttaacgatcaggacgcactgcttaatacccctgaaggaagagtcttcgacagttttcagcaacagctacgccaatcagttgagttaacggcaatgagcgagcgactgcgcgtaatccttagccatccttccgcttccaatgcgcttaaccgtctacagcgtcatgatttacgctggctggttaaacgcctggtcgatgaatcgcaaaccgtactccaggctcgtgcccgaagcgagcgagatgtccgcggttttatgaaaaccgggcttgctgctgaacatcaccgcgttggtcatctgcttaacgagtttctgaatctggcgttaaaactcgactggcagcgccagatgattcgtaaacaagaggttccgcttcctgccgttggtgtggcggtgacgggagtccccgcaattgagcgtttacgttttaaagaagtggatgatgaagcggaacaaacgttggatctcagtaatcatgcgacggatttgacgcagattggcgatgatttctgggatgctttcaatggccttgatcgtgaggctttgattcagcagacgttgcagcttctggcaaaagaaaatcgccccgttggtctggctgaactggcggcgctgttgcccccggctcacgatctcgaaaccttcgccgtctggattggcatggcgagagaagcaggcattgaggttattgattcacagcgcgaatttgctgaacttagtgatggggaaggtcgccgctggcgatttaatctgcccacgaccggtctggaaagtcaggcattaatggatatcgattgggagtaa

SEQ ID NO: 46221 - DNA, 750 bp, Klebsiella pneumoniae; identical to SEQ ID NO: 42259

SEQ ID NO: 46222 - DNA, 3291 bp, Klebsiella pneumoniae; identical to SEQ ID NO: 42260

SEQ ID NO: 46223 - DNA, 1149 bp, Klebsiella pneumoniae; identical to SEQ ID NO: 42261

SEQ ID NO: 46224 - DNA, 1557 bp, Bradyrhizobium japonicum; identical to SEQ ID NO: 45299

SEQ ID NO: 46225 - DNA, 639 bp, Bradyrhizobium japonicum; identical to SEQ ID NO: 43202

SEQ ID NO: 46226 - DNA, 3435 bp, Bradyrhizobium japonicum; identical to SEQ ID NO: 43203

SEQ ID NO: 46227 - DNA, 1170 bp, Bradyrhizobium japonicum; identical to SEQ ID NO: 41690

SEQ ID NO: 46228 - DNA, 1575 bp, Bifidobacterium animalis subsp. animalis IM386; identical to SEQ ID NO: 42953

SEQ ID NO: 46229 - DNA, 810 bp, Bifidobacterium animalis subsp. animalis IM386; identical to SEQ ID NO: 42954

SEQ ID NO: 46230 - DNA, 3498 bp, Bifidobacterium animalis subsp. animalis IM386; identical to SEQ ID NO: 42955

SEQ ID NO: 46231 - DNA, 1221 bp, Bifidobacterium animalis subsp. animalis IM386; identical to SEQ ID NO: 42956

SEQ ID NO: 46232 - DNA, 1473 bp, Cellulomonas sp. A375-1
atgatcactcgtgccgaaggggcgtacctgggcgccgtccgggccttccagaacccgatgctcgacctgctccacaagaagcacgccccactcgtcgtctcgttgctgtcggtgacgttcaccgcggagcggccgaccgtccccgtggccgacgcgcacacggagatcggtgacgcgctcgaccagctgcgtgcggccgggtacgaggagaacctgccgacgggctcggcgcgcgacctgtgccgacagtgggcggacgcgggctggctcgtgcggcaggtgctcgacgacgacgtcgaggcctaccgcctgtccgcgcacgcggtcggggcgctcgaggtcgcggggcgcgcgggtggtgcgcgggcgcgcgtgtcgcagtcgcgggtgcggacgctgctcgacgcggtggagcagctcgcgcaggacgccgaccccgacgtgctggtgcgcatggcgcgcctggacgggcagatcaagcgcctgcaggccgagctggaccgcgtgcagcgcaccggcacggtcgacgaggtcgacgacgaggagctgctcgaggaggcggagaacgtcctgcacctcgtgcgcgagctgcccgcggacttcgcgcgcgtcgcggagtcgatcaaggcgatgcagcgggacgtggtcacggcgctgcggcaggacgagcgccccacgggtgacgtgctgcgcgagtacctggagcgcggcgagcacgtcatggagtccacgtccgagggccgcgccttcgccggggcgctgcggctcatcggggacccgcagcggctcgacgagctcgcgcagcagctcgacgtggtgctgcgccaccggttcacgcggcgtctcgcccagcagcagcgcaccgagctccgggagatcgtgcggcgcatcgagcaggggctcgaccaggtcttcaccgcgcagcgcgaggcgtcgtacgtcatcaccgcgcaggtccgcaaccacgacccgctgcgcgaccgccaggtcgacgtgctgctgcgcgacgtgatggccgggatgcaggcgtggttgcccggcgcgcgccgtttccagccggtcgacccgttgcgccgcctgccggtcgccgaggtcgagcacctgcgccagaccgcaggcgacctgcgcccgcccgaggcaccgacgccgctggccgcctgggacgacgacggcgacgacgtcaccggcgacgacgcgcgcgcctggggcggcccgcactacgccgacctgacctcccacctcgtcgcgttcgccgacggctccgacgaggtcgacgtggccgccgcgttcgaggcggcacccgacgggctgcgccgccccgtcgacctgctggggatgctcgagatcgcgcacacccacggcatgaccgagaccggtcgcgtcgcgttcgtcgacgcggtgcggcccgacgggacccgccgccgcctcgcgttcggcgcggtcaccacgacgacgaaggacgacgatgcctga

SEQ ID NO: 46233 - DNA, 717 bp, Cellulomonas sp. A375-1
atgcctgagacgacgaccgaggacgtggcggtgaccgtgcacgacgagccggtggaggccgcgagcgctccccgcgccgacgagggcttcatcgcccccgtcccgatggaggaggacccagccgagctgttcgcgggcgactccgggacgctcgacgccgacgtgcgccgggtcctggtccggctgctgcagcggcggttcctcgtcgccgacaagaaccgcgcacagtggcggaccctcctggagaaccagcaggtcatcgagtcgcggctgcacgacctgttcgtgcacctcgtcgtcgaccacgaccgtggcgtcgcctacaagcgccaggtgcgctcggccgagctcgacgtgcccgtgctgctgcgcgacgacgcgtactcgcgcgccgagacgctcgtgctcgtgcacctgcggaccgtgttccagcgcgagcagggtgcgggcgagacgtcggtgcgcgtggacgtcgaggagctcgagcagaccgccctgacgtacttcgaccccgacgacacgaacgtcgccgcccaccagcgcgagatccgggccgccgtggcgcgcctcgagcgcgaggggctcatcgaggaggagtcgcagggacgcttccgcgtcacgccgctcgtcgagatcgtgctgagcaacgagcggctcgctgagctgcgggagtggctgcgcgagcaggccgcgcgcacgcaggaggtcacgcgatga

SEQ ID NO: 46234 - DNA, 3384 bp, Cellulomonas sp. A375-1
atgacgatgatcgacacgctgttcgggctcatccccgccgagtcgaccggccagcagtgggtcgcgcgcgacctgcagctcgtcaactggggcgggtacgacgggcaccaccgggtgcggctcgcctcgaccgccacgctcctgtcgggcgggtccggctcgggcaagtccacgctcatggacgcgtacatcgcgctcctgatgccgcacaccacgccgttcaacggtgcgtcgaacggcggcgtcgtcgggcgcccgcgcggcaaggaccagcgcaacatcctgtcctacgcgcgcggcaagctcgacgagtcgcgcaccgaggacgggacccggcagcgggtgctgcgcggggacggtcgggacacgtggtcggcgatcgccatgacgtgggtggaccagtccggcaccgagctcacggcggtgcgcggctggtacgtgccgtccgcggcgcggacgctcgaggacgtcgtcgcggtgcgcgccgtccgcgagggcagcttcgacctgcgcgagctcgaggccgcggccgcgcaccggttcggccgggccgccgtgacggaagccggcctgacggtgttcgacaccgaccgtgagctcaccgcgcgcctgcactcgacgctcgggatcggcgcggcgggtgacgggaacaaggccgtcgcgctgctgggccgcatccaggccgggcagcagatcaccactgtcgacgcgctctacaaggcgatggtgctcgaggaaccggacacgttcgcgacggccgacgccgtcgtcgagcagttcgacaagctcacgggcacgcgcgagcagatgatcaccgcgcgccagcaggtcaaggcgctcgagccgatccgcgcgtaccgggccgacatcgagcaggccgccgagcggctgcgggtcatcgagcagctcgggacgttcgacgacgcgacctcgcctgcggccctgtggaagcacgagcgccggctcgacctgctccgcgacgccgagcaggacctgcagcgtcgccaccagcagagcaacgcacgcgcggccgagaccgcggcgcgcatcgccgccgcgcggtccgagctcgacggggtcaaggagacgctctggtcctcgggcggcgaccgcctcgcgaccgcgcagcgtgagctcgcgggcgtcgaggcacgactgcaggacgtgcgccgggcccgcacccggttcgacgacgtgctgcgcgcgctgcccggcacgtcggtgacgaccgacgccgagcacaccgcgctcgtcgcgcgggcgcacgcggccctgcgggacaccgacgcgaaggcgtccgcacggcaggcgctgttcgacgcgatgtcggagaagaaggaggccgccgccgacctcgccgacctgaccgccgaacgtgccgcggtcgcgcggcggcacgacaacatccccggtgagctgcaccgggctcgcgcggcgctggccgaggccgctgggctggcgcccgacgacctgcccttcgtcgccgagctgatcgaggtccgcaccgagcacgagccgtggcgcgacgccttcaacctcgcgctcggcgggttcgcgacgcgtctgctcatcgacgtcgcgcacctgggcgcgttccgcaaggcgatcgacgcggttcccaccgctcgtcgtatccggttccagggcgtgcccacggggatgcgcgacgacgtcgcgctcgactcccgcacgctgcccggtcgcctcgacttccgcaacggcccgttcaccggctggctgcgcggcgagctcgcgcgcgcgttcgccttcgtgtgcgtcgacacgcccggcgagctgtcgcagcacgccaaggcgctgacccgctcggggcaggtgtccgaggggacccagggcgcgcacggcggccagggccgcggcaacgtcctcggcttcaccaacacgcgtcgcctcgcccacctcgacgagcaggtcgcgcgcgcccaggaacggctgcacctggtcgaggcgcaggtgagcgaggccgaggcgggcctcgacacgcacgacgtcgagcgccgcgcctacgagacgctgaccgagatcacctgggaccaggtcgacgtcgcgaccatcgaggccgcacaggcccggtgggcgcaggtcatcgaggaggtgacgtccggcaacccggagatcacgcgcctgcagcggcgcgccgccgagctcgacacgaccatccaggtgctcgccgagcagctcggcgtgaccaaggacgaggcgcgagccgcctccgagctctggtcgacgaccacggacgaggtcgacaccgcgcagcaggcgctcgacgaggcccggtccgcgggcactcgcgtgggtcacgaccagcgcacctacctcgaggccctgctcgtcgggacggacgtgcaggacgtccgcacgacgaacgcggcggcgggcgcgaacgacgccctgcgtgcgttcgacgacgtcctggcgcgcgcccactcgctcctgctggccgaccgccaggccgcgcagcagatcatcggcaccgcccgcgagtcgctgcgccgcacgttcgagaccttcgtcgagcgctggccggacccgaacctcggggccgaccccgacgactcctacgccgacttcgagcgcatcctcaccgagctcgagaccaacggtctgcacgacctcgaggacgagtggcgcaagagcctgctgcgcctgtcgggcaacgacctgaccgacctgcacagcgcgctcgcacgctcggtccgggagatcaaggaacgcatccggccggtcaacgacatcctcgcggacctgccgttcgccgacgacgagcaccgcctgcgcatcgaggcgcgcgacacgcagtcgaccgtcgtcgcgcgcttccgcaaggagctgcgcgacctgcgcgaggtgctggccaccgaggcgaccgacgccgagcgcgagcggcgctacctgcgcatggccaaggtcatcgaccgcatccggcgcaccgcacccgacttcgccgacctgatcgacgtgcgccgccacgtgcgcctgtccgccgagaaggtcgacctcgagggcaaccacgtggcgctgtacgaccacatcggcgagaagtccggcggtgagtcgcaggagctcgtcgcgttcatcgtcggcgcggccctgcgctaccagctcggcgacgccggcgccgaacggccccggtacgcgccggtcttcctcgacgaggcgctcatcaaggccgacgcgcggttcacgggtcgcgcgatcggcgcgtggcgcgggctgggcttccagctcgtcatcggggcgcccaacgacaagttcagcgcgctcgagccgcacgtggacgtcaagtacgtcgtgctgaaggacgccacgggccgctcccgcaccaagcccatcgccggcgtgcccgacccgatggcgtctgagtga

SEQ ID NO: 46235 - DNA, 1251 bp, Cellulomonas sp. A375-1
gtgagctctcgcttcgtctcgctcgccgaggcagccgagaccgtgacgcaccgcctgcgcaccgcgtgggctgatgcggtgtgcatccagatcacccaatgcaccaaccgcgcgatccacgtgcagctcagcccaggcgtgacgagcggcgcggtcgttcttcggctcgggctggacgctcggacccgctgggtcgaggagtggtctgcagtggccgcacgtggcctcccaggtgtcacggtcgagaggcgacgggtcgtcgtctctcaggtcgccgagatgctcccggcgaccctcaccctgagcgggcttgacgcggccaccgagctcctggcgctcgcgggcctgcggccgccgttcgaccatcaacgagcgtgccgggttgctggcgagattctcgcgtcatcggcacgcctgactccgacggtcctccgggcggtgtgccagctcgacgatgacgacgttcaggtcgcgctggaagccgtccggtggctccgcgcgcatcctgacgtcggtgactggaccgctcgctccatccccatcccgcgcatgcactcgaagtggcttctcaagcacggagcgctgctgcgcgatctcgtcggccgcgatgttctcgacgaggtgcggtcgcggctcgcagtcgtccacctgacctacgtggatccggcctacgcgatgacgggaggtcgacggcacgacgcgtggacgaccggtgacacgcacgagctcgcgtatgagccgcacaccgtgctcgtcgtcgagaaccgcgactgccgcctctggtttccgctcactcctggcaccgtcgtcgtcgagggcggcggcatggcagcggcagccttgctcgccgacatcccgtggctgcggcgcgctccgggcgtcgtgtactggggggacatcgacgccgcgggcttcgcgatcctgaaccacttccgctccgccctggcccgcaccagtcccgacggagcgtccggccgcccggtcgcctcgatcctgatggacgctgcggcgctgtcgaggtacagccacctcggcgtcgatcgagacgcgcggggcaggcgcattccttcgtcgtctgagacgttgccccatctcaccgacgacgagaccgaggcgtatcaccagatcgccaccgctggtgaggtagccctgcgccggatcgagcaggagcggattccgatcgccgatgcggctgacgcgctgtcgctgcacgcgtcgcacgcgacgacggctccaccgtggcgcgactag

SEQ ID NO: 46236 - DNA, 1533 bp, Bifidobacterium dentium JCM 1195 = DSM 20436; identical to SEQ ID NO: 42300

SEQ ID NO: 46237 - DNA, 708 bp, Bifidobacterium dentium JCM 1195 = DSM 20436; identical to SEQ ID NO: 41971

SEQ ID NO: 46238 - DNA, 3507 bp, Bifidobacterium dentium JCM 1195 = DSM 20436
atggcgggagacgatatgaaaatcatcgccgatcgatggatgatggaaagccgacagatcgtcaactggggttcctatgacggctaccaggaattcaggccgtccatcgacgccgaatcgccagtcaccctcctggccggcgccagcgaatcaggcaaatccacgctcgtcgacgcgcagatttccctgctataccccaatggcacgccctataacaaggcgtccaatgcgggtcgatccgagcgcaacgattacacgtacctgcgcggcatgatcggcatcagtgacggtgataacggcgaaacgcagatcttcctgcgaggacgtgacgccaatggcacgccacaggccatatggggcgccatcgtcgacacatacgtgaaccgtaccaccggaagtacgctctcctgcggcaaattcctctacctgcccgccggagacggcaaagacgaggtgcgccgtcgctacattgcatggaatcgcaaaatagatccgcaaatcatggaccggtaccgtgatacgccattcacccccagcatgttcaagaaagcgtatccggattgcagcatattccccaatgccagcgcattccacgcatacatctggcaagagatgggcctcagcgccgaagcatgccgactcctgcacaaaatacaatccgctgacgccccgtcgcgactcgacgacatcttcaaacaaggcgtgctcgacgtgcccgaggcgctcagactcgcacaggacaccgtcgacgactacgatcggttcaacgccaacttccatagcatggaagacaaagccagacgcgtcgccaaactccaagacatccaaacccaatacgacgcatacgccaaacacctgacccaagtgcgtgaatacgaagccgtgaaccccgaaagccagcagggcctcgaaaccctgaccctatggatgcgttcgcgcatggccagcgaagtgcgagccggactgcccgccgccgaacgcaaggtgaagcagcaggaatgcgacctgcacgaggcacaggagcggatctccgatgtgaacaggcaacgcgaagccatcgtcgaacgcatcaaaggcattgacggcggaaccttgcaacggctgagcgatgacctggaacgcgcccgacgcgacatgcaggatgtgcgctcgcagcgtcaaagcatcgtcgagaaattcgagggcgtcgaaggtgcattgccatccgacgagacgtcctggaacgcgaaacgtgacgcattggcccgatccatggaaacgttcgacgaacgcatggggaatctggaatccaagcgggatcgtctgatcggcgagcgcaccgcagccagtcaggaatgtgcgcagttgcgccgggactatgatcgcaaacgcaggcagaggacccgcatcacccaggcgatggatgaggctcgtgcgctgatcgcgaaggcggtgggcctgagcccggacgaattgccgtatgcggcggagctgatggatgtgtgcgagagcgacgaacgttggcgcaccgccatgaacgtcacgtatgcgccgattgcgcagaccattcttgtcgacagccgccacgagcggggattcgcggcgaagatcagcgcgatcgatccggcgctgatgatccggcgcacctggcagttcgtggatgtggacaagagctatgattgcacccgcaatgacggttggatgtcgtcgaaattgcagtattgtgaggattcgccgtttgccggatggctgaaggaacagaccgcttcggcccgtttggacgcattgtgcgtggagactatcgacgatgccgcacacgaacgccgtcaggtgcaggctgatggtcagatcaagtccggcgtgcatggtttccatggcatcaaaggcatgaatccgatcatcggtttcgtcaatgaaggctatctgacggaattgaagaaacagcttgacgaagcgcatcatagattgtccgataccgaacgtcgctgcggcatggtgcgcaagagcatcgacctgatgcacgcggaaaagaatcttgcggatctggtcgcgaatatgacgtggaataaaatcgatgtggtcggtgcggaaacgcttgtcgagaatctgaaacggcgaatcgaacagattgaagacaatcctgaaatgacgcggcttgccgagcgacgcgaggaaatcgacaggctgcttgatgaagcgaatgcccgcttctaccacgccaaaagcgaaatgcaatcgacccaggcggcggtcgatgccgaacatgcgtggctggaagcatatgagggcatcgaatttgacgatgatgcgctatccggcgatgtatcgaacatgctggccgacgtatatgagggatgtttcggtggtgtggtccatgccgaggacagaccgaagctgatcgccggcgggaacgatgagatcggcgggcattcgttcgagacacgcgtcgggcacgccatggaacgcgccatgcgcgaacagaacgcggcattgggcaaacgtgcaggggagttgcgtaccgtcgtggaacagagtatggcctcctacttggagagatacgctcccgacgatgattccgcgacaggcggcgttgaggattacaggttctatcttgaggagctgcacagtctgcagatgctcgtcacgcgagaggcgaccgacgaagaatacgccaacagcctcgacaagctcaccaagaatttcctgcaactcaaccgtgcgctcaacaccgaccaggaaaacgtcaaggaccagctcgaacgcatcaacggcatgctcgccgggcagaaattcggcccgcgcggcggcaggctgtccatcgacgtggaattccgccccatcgaacgtgcattcgtctcatccttgaaggccacgctgaacaagctcgacgaatggttcaggaacgacaaggacgatcctgatgccacacgcaaggcattcacctcctgcgccacgttcatcgaacgtgttcgtcgggaactggaacaggtacgcgacgtgaacggcatcagaagctacggcgcacgcaacctcgacccgcgtgcacgaagcacgttctacgccatcgtgcatcatgacgacggtcctgacgagcgcatcagctccaccggcggcaaatccggcggcgccctgcaggaactgacatcgttcatctacggcgcggcgctcatctacctactcggcggcgacgtgaccggcagccccacctatacgacgctgttcctcgacgaggccctcatcaaggccgacggccgctacacgcaacgtgcgctcaacgtgctgcctcgtctcggcttccaagtcatcgtatccgcaccggaaagcaagaccgccgaaatcctcggcgtatccaccaaagcgtacgtggcctacaaggatccgtcggtaggccgttcgttcctgcaggagcttacctccgaagacatcgcccgtcaggaagccgagctccacgatgcaatcgacgacatgccggcggccccgaacgatatagggcccacaacggccacgattctcgaacaggtgttctaa

SEQ ID NO: 46239 - DNA, 1479 bp, Bifidobacterium kashiwanohense JCM 15439 = DSM 21854
gtgtatgagaccggggtgctgcgattgctgctgcgcggcaattccatgctgtacgtcgcgctgctgcgctccacgttcgacccgctcaccggcgagctgccacgcgagatcgtcgaggaacggttctcccgcagtctgacccgacttgcggaaacgggcgattacacgcccaaggaagggcagacgtccgcggaagccgcgcacacgatcctgcagcagctgacgaaggaaggcgaaggcgactacgcttggctcgccaattcgctcgacgtcgcagcccaccgctacctgtaccgtctcacggcgcgcgcccaccgtgcgatcgaggcgctcgaccggctcgaggacaccacgaaagcgctgtccggcgcgcaggccaacagcatcatcatggagatcgagcatgcgcgcatgcagctgaccgccgacccccgcgaacgcatccgcctgctcgaacgcgacatcgaggagcggcaaaagcagatcgacgaattgaagcacagcgacacgttggacaagctcacctcccaacaggtgggcgacatcatcggcgtcatccacaacacgctgcgcggcgtgccgatcgacctgcgcgaactggcgctcgaggaacgcgacaacggcgacaatctgcgccgaagcatgcagtcgggctccatcagcgtggagcaggcgctcggcacctaccatgacgaataccacaggtcgttccacgaatccgacagcggccggcgtttcgaggacgcgttccaggtgatcgtcaccgacgagggacgccgcgaaatcgacgaggcggtgcgagacatcgcccagaacccgtatctcgagggcgagcccggcatcctgctcgcccaggtacgcgccgaactcaaacgcatttacgagggcatcgaggacgtgcgccggcagatccgcatatccgacgaggcggtgagccgtctggtgcgccagcagaccgacacgcattaccgcaccatgctcgacaagctccacagactgttcgtgcgggccagcgacgacgcgaagacgtaccccggctcggacgaacgcccataccgtacggacaccggcacggcgcaattccaggcattgccgtccaggcccgcgaaatcgatggcgcgcgcggccacggccggattggacgacgcgccttcgacgaacgtcgacgcgccggacctgaaggccatggtcgagatgtgcggcccgcggctgacgcacatgatcggactcatcaggcgcgatccggtcaaaacggcggacggcaggttcgtggatttcgcggcgagcttcaaccggctgccccgggaggaacggcgcgaaagcgagctgatcggcttcctaagcgccctacgcacgcaggacggaccggcaaccgtggcatggcattgtgtatccatcgacggaggcgagcgcgtgtggcgcaccaggccgatcttcaccaccgaggcggcgcttgacgagatcatcgaggagggatga

SEQ ID NO: 46240 - DNA, 840 bp, Bifidobacterium kashiwanohense JCM 15439 = DSM 21854; identical to SEQ ID NO: 44877

SEQ ID NO: 46241 - DNA, 3459 bp, Bifidobacterium kashiwanohense JCM 15439 = DSM 21854; identical to SEQ ID NO: 44878

SEQ ID NO: 46242 - DNA, 627 bp, Bifidobacterium kashiwanohense JCM 15439 = DSM 21854; identical to SEQ ID NO: 44879

SEQ ID NO: 46243 - DNA, 1509 bp, Bifidobacterium scardovii JCM 12489 = DSM 13734; identical to SEQ ID NO: 44841

SEQ ID NO: 46244 - DNA, 816 bp, Bifidobacterium scardovii JCM 12489 = DSM 13734
atgagcgacgacaacccatacgcgctgttcgaaggggaccgcggagacatgccggccgacgcgcgccgcgccgccatcgcgctcaagcgcgaacgctacatcgacggcacgctctacgagctcgcgctcgaccactacgacgccgtcacgcgctcgctcaacaacgacctgctcgaaccggtcatcaacgaacggtaccgcatcatgtacgccgcgcccgtggccggcgaggacgtgaccctgcgctcgctgaaaacccgcgccagcctcaagcgcgaggaggcggcgctgctcgccttcctgcgcatccgcgtgctcgaatacgagaacatgcgcgtggccgccgacgaatggatcgtcagcctcgaggagatccgcgcggcgctcgccaccggcgccggccacctgtccgcgcgcaacgacgaggagggcgtgctccgccagatcggcgcgctcatctccgcgatgaacacatacggctacctcgaacggctggacgacgacaccatgctgaggatcacgccgctcgtgcccgcggtgctcgaccgcgaactggccgacgcatggctcggcgtcgccgcggccgacgaggacgacgagaccgatgggcccggatccgacccgtcgcgcgacggcaccgacgacgggcccgatgacggggacgccgagcccggcgggaccggcgaacccggcggcgggccggacggcggcaacgggcggcgctcgccgggcatggtcgacgagccgctgttcggcgatgacgcgctcgatgacgatgcgctcggcggcgaggccgccgacggggaaggggaatga

SEQ ID NO: 46245 - DNA, 3573 bp, Bifidobacterium scardovii JCM 12489 = DSM 13734
atggcggccaaggacatgcagatgatcgcggaccggtggatgatggaatcccgccggctcgtcaactggggatcctatgagggataccacgaattccgcccctccacggacggccgtctgccggtgacgctgctcgccggcgccagcgaatcgggcaagtccacgctggtcgacgcgcagatctccctgctctacccgaccggcaccccgttcaacaaggcgtcgaactccggccggtccgaacgcagcgactacacgtacctgcgcggcatggtcggcgtcggcaacaccgacgagggcgaccggccgatctacctgcgcgggctggacgacaacggcgcgccgcaggccgtctggggagcgatcgtcgacacctaccgcaacacgacgaccggccaagtcctgtcctgcggcaagttcctgtacctgatgcccggcgacaagggcagcgaggtgcgccgccaatacgtcgcatgggaccggcccatcgacccgcgggccatggaccggttccgcgaatcggcgttcacgccctcgcagctgaaaacggcctaccccgaatgcctcaccttccccagcgccgaggcgttccacacccacatctggagcgtgatggggctgagcgccgacgcctgccggctgctgcacaagatccagtcggcggacgcgccctcgcggctcgacgacatcttcaagcagggcgtgctcggcgtgcccgaggccctcgacctggcgcgctccaccgtggaggactacgagcgctacgacgagaacttccgcaccatggagcagaaggcccggcgcatggacgccctgcagggcatccaacgcgcccatggcggctatgcggcggccgtgggcgcggcgcgggccttcgacccggtcgacccggccggcgagacgggtcgcgatacgctgcgcgcatgggccatcgcccgcatggccggcgaagtggccgcccagctgcccctcgacgagcaggagcgggacgcccgcatggccgcgtcccgggccgccggcgcgcgcagcgaggaactgcgcggacgcatcgacgcgatccgcgcccagatgcaggggctggacggcggcaacctcgcacgcctcgaattcgaactcgaccagagccggcgcacgctcgccgccgtgcgcgacaaccgcgcgcacaccgccgaactgttcgacgcggtcggcgagacgatgccggcgagcgaacaggcgtgggaccagcggcgcgtcgaggccgtgaacttcaaacgcgtatacgaccagcgcgccgccgaactcgaaaccgaacgcagcgccgccgaccgcgcgcactacgccgcgctcgacacgctgcagcggctgcggcacgactacgagcggcagaagacgcagcgcacccgcatctcgcggcagatggacgagacccgcgccatgctgtgccgggcgaccggactggacgccggcgaactgccctacgtcgccgaactcatggacgtgcgcgaggacgaggaagcctggcgcctcgccatgaacgtggcctacgggccgatcgcgcagacgatcctcgtggacaagcgccacgaacagggcttcgccgccaaggtgagcaccatcgacccgcaccagatggcgcgccgcacctggcagttcgtcgacacgacgcgcgattacggggccgccgccgcgtcggaggacgccccggacgcgcggcccgccgaccgggcggccgcgccggaggacgcatggctgtcttcgaagctgcgctaccgcgacgaatcgccgttcgccggatggctgcgcgaacagacccggtccgaacgcctcgacgcccgatgcgtcgccgccatcgacgacgccgaccgcgacacgcggcaggtgcaggccgacggccagatcaaatccggcaaacgcggccagcacggcgtcaaggaccgccagcaggtcatcggctacgtcaacgaaagctacctgcacgatctcgaacggcagatcgaccaggcctcggacacggcgaacggcacggaacggaccctgacggccgcgaaacgccaggtcgacgcgctgcgccgcggcctgacgctggccgaccagctcgcctacacggcatgggaccgcatcgacgccgacggcgccgccgcggcggtcacggaactggaaacgaccatcgcctcgatcaagaacgaccccgaactcgccaaactcgcggcgctcaaggactcgctgtccgaggaactcgaccgttccgaacgcgaccgcatccaggacgaacaggcggccgacgctgcggccgacgccgccgacgccgcacgcgcatggctcaactcccatcagacgggtgccgccgggacatcggccggcgccgacggtacggaagccgggccggctccctccgacgcggccgccgcgccgctggacgacgaggtcgcctccgcgctcgccgaatcctacgacggcaaactccccggcgacgatcccgcgctgcgcgcccacatgatcatcggcgcggggcaggcggcctcctccggaaaccagttcgccgaacgcgtcatcgccggcatcggcaaggacatggcctcgcgcgtcgacgcgctgtccgaacgcgtcgccgtggcgcgcgccggcgtcgaaacgcgcatggactcgtacctgcacgactacgcggccgacgacgacgccgtcaccgccagcgtggaggactaccgctactacctcgaggaactggaaagcctgtcgcgcctgacggccgtcgccgccacggacggtgaataccgccgctgcctcgaccagctgctcatgagcctgctgacgatcaaacgcgcgatcgacacggacgcgagcgacatccgcagccagctggaccgcatcaacgcgatgctcgaaggccagcagttcggccccaagcacggcagcctgtccctgcacgcggacgtgcgccgcccggaacgcgccttctcggcccagctgagccgcgccatcggcacgctcaacgactggaagtcggagccggcggcccaaggcgccgccgattcgcgccgggcattcgccgcatgcgcaccgatgatcgacctgctgcgcgaccagctcgcgcaggtcaaggacgccaacggcgtgaaaagctacggcgcgcgcgacctcgacccgcgctgccgctcctcgttctacgcgatcgtccaccacgaggacggcccggacgagcgcatcacctccaccggcggccgatccggcggcgccctgcaggaactcacctccttcgtgtacggcgcggcgctcatctacctgctcggcggcggcatgaccagcgaaccctcgtacaccaccctgttcctcgacgaggcgctcatcaaagccgacggccgctacacgcagcgcgccctcaccgtgctgccgcgcctcggcttccaggtcatcgtctccgcgcccgaaagcaagaccggcgaaatcctcgaagtgtccaccaaggcctacgtcacctacaaggaccccgacaccgggctgacctccctgcgcgaagccgtgctccggccggaggagggcgcgcaggccccggccggcgcagccgacgccgccgaggaccgggaccggccatga

SEQ ID NO: 46246 - DNA, 1164 bp, Bifidobacterium scardovii JCM 12489 = DSM 13734
atgagcgagccgaaggacgtcgccgcgatcaccgaccgggtggaggcccacatgcgcgccaacctgtaccgcatcgaacaggcctggccgtacaccgtgccggtcggactgcccggcagagccgaattggagaagcacgccatcgcggtgcacaacaacaataacgacatcaagaagtgggccgggcagcgcggatgcgagaccaccgtcacgcaacggaaaatcggcaccgccgtcggactcatctccgcggtcaccgtccccgacgaggcgacggccctgcgcgtcgccggccgcggcctggccacgcaataccgcgaagccagacgccgcctgatccgtttgcgcgccgaattcgacgccgaaccggacacgatcgaagccgtggccgccatgaccggccacgagcaggcgctggacttcgacctgctgatcaccgcggcgcactacttcgcggactacgacgccgccggcatgagaccgcggcaggtgccgctgacgggattcagcggcaaatggctcaacgaatcgaacaccagacgccgcaaagccatctgccgcctgctgggcagggagacgctggagctgtcgagccgcccgcgcgaactgcgattccggtacctcgacccgcggcgcgccgacgccgaactcgaacgcatcgcctggtgcccgtggaacggcacggcgctcgcgggaattcggtacgcggtcatcatcgagaacaaggacacctaccaggacatgccgccgatccccgacggcatctgcatctggggctccggcgacgccatcggcgccgtggccccggagattcccgcgctgcgggacatgcgcgtcgtgtattggggcgatatggacgcagacggattggagatcctctcgatgctgcgggagcgggggctcgactgcgactccatgttcatggattgcgccgcatacgagcggtaccgccggtacggcaccgacctgagcgagcgcggcagacggctcgcgctgcgggacccgaagccggcgccgggtctgcggccggcggagcgggagctgtacgtccggctctgcgaggacgccgccatgccgttccggcgcgtcgaacaggagcgcatcaccctggccgacgcggccgaagcgctgcggggactgggcgttccggccgggcgggcgtga

SEQ ID NO: 46247 - DNA, 1473 bp, Xanthomonas oryzae pv. oryzicola; identical to SEQ ID NO: 42286

SEQ ID NO: 46248 - DNA, 699 bp, Xanthomonas oryzae pv. oryzicola; identical to SEQ ID NO: 42287

SEQ ID NO: 46249 - DNA, 3429 bp, Xanthomonas oryzae pv. oryzicola
atgaaatcttcttcctccagcctgtttgccgacgatctgcccgacccgcgcgtgcagcagttccgcatgcgccgcctgcaggtccataactggggcacgttcaacggcttgaccgacgtgccgatcgccgcgaagggcttcttgttcgtcggccgttccggttcgggcaaatccacgctgctggatgccatgtccgctctgttgaccccgcccaatctggtcgacttcaatgccgccgcgcgcgaggccgagcgcactggccgcgatcgcaacctggtgtcgtatgtgcgcggcgcctgggccgaccagcaggacagcgcctccggcgaaatcgccacgcaatatctgcgcaagggcagcacctggaccgcgctggtgctggaataccgcaacggcgagggacgggtgatcagcctgatacggctgttctggatcgctggcagcggtgcggcggcagccgacgtgcgcaagcattacatggtggccgagcgcagtttcgatatcgccagcgaactggtcggcttcgatctggatttgcgcaagctcaaggcgcgtctgggcgacgacatcgcccacttcgacaatttctccggctatgccgagcgcttacgccatcagttgggcatcgccaacgagatggcgttacggctgctgcacaaaacccagtccgcgaagaatctcggcgatctcaatgtgttcctgcgcggcttcatgctcgaggcgcccaagaccttcgacgccagcgagcggctggtgggcgacttcgccgaactcgatggagcgcatcgggcggtggtcaccgcacggcggcaggtcgaaacgctgctgcccgcgcgtgcgcattacgaggacttgcagtcggtgcaacgtcagcgcggccgcttgcaggaactcaagctcggcctggacccctatcgcgagcaacgccggcttgcgttgctggatgcgcgcctgcatgcactggacgtcaacgaccagggcctggccggcgaggagggccaacgccgcgctgcagtggataaccaccaacaacgcttgtccgatctggaggcccagcgccgcagccagggcggcgagcggatcgacgcgctggaacgcgagcagctccaggtccagggcgaacttgcacgccgcagcgacaagcgtgccaaggccgaacaggcctgccaccagctcgaccagactttggccgacaacgcgcatggatttgccgagcagtccgcgcaggcgcgcgccgcgctcgaggacgggcagcggctggccgccgaacaggacgaggcgatcgtcgagcgtatcgccggcaagcgcgaggacagccagcgctttgcgcaggtgcgcgccgagatcgaggcgctcacccgcaatccctccaacattgctgcgccgatgcaggccctgcgtgcacgcctgagcgaagaaaccggcattcccgaggccgcgctgcccttcgtcggcgaactgatccaggtgcgtgaggaagatgccgcctggcgcggtgccatcgagcgcgtgctgcatgggtttgcgcaatcgctgctggtggacgagcgccattacgccgaactggccgagtgggtcaaccgcacacatctgggctcgcgcctggtctattaccgggtgcgcaataacgaacaggcgtttgccggccgcgaacccggcagcgcctcgctgctgcacaagctgcaattgcgcgagcatccctttgccggctggctgcggcgcgaactgggcaagcgttttgactacgactgcctggagagcgccaaggccttgcgcacggcagagcgcgcgatcacccgcgaaggccaggtcaagcatcccggcgaacgctatgaaaaggacgaccgtcatgcggtcggcgaccgtcggcgctggctgctgggcttcgacaaccgcgacaagctggcactgtacgagcgcgaagccattgaactggcacaacgcatcgccgcctgcgatgccgacgtggccgagctgcgtgcgcgccgcgaacgcgatgccagccggcgcctggcccagcacaccctggccaacctggcctgggaggaaatcgacgtcgccgcacagctgcaacgccgcgacgatatcgccaacgccttgcgccagctgcgcgaaggcgatgccaacctgcgcgcgctgggcgaggcgatcgagcgcacgcgcggcgacctggaacaggccaagcgcacgttcgacggtgtgcgcgaggaacggatcgcgctgggggtcgagcgcacgcgcctggaaaagcaacgcctgcactgcgccgacgccgatgcccgggtggtcacgccgctgcagcgcgaggggctggaggagcgcctggccaacctgggcgcgcttagcctggacaatctcgaagcgcattttcgccagatcggcaacgccatcgccgagcagaccagcgccagcgacagcgagcacaatcggctcgaacagttgctgctcggctgctttcgccggtatagccaacagtggcccgaagacagtggcgacttcatcatcagcctggccggcgccgaggattttcttgcccgcctgctgcgtctggaacgcgatggcctgccgcagcacgaagcgcgctttttcgagctgttgcagagccagagcaagaacaatctgctcgccttgcagcgccacaccgccgaagcacgcaaatcgatcgcccaacgcctggacgaggtcaacgccagcctggagcaggtgccgttcaaccatggcaccttgctgaccatcgaactcagcgatcggcgtttgccggaggtgatcgacttccatcaacgtctgcgcgatgtgctcggtcaccaccagaccgaacagcgtgacgtggccgaacagcaatttgccgtgctgcgcgaactggtgcgtaagctcggctcagccgatggcgaggacaagcgctggcgcgagctggtgctggatgtgcgtctgcatgtggagttcgtcggtgtcgagctggatgcggccacccgccagcaggtggagatctaccgcagcggcgccggcaagtccggcggccagcggcagaaactggcaaccacctgcctggccgccgcgctgcggtatcaacttggcggcgaagacggcgaattgccgcgctacgcggccgtggtactggacgaagccttcgacaaggccgacaacgaattcaccgccttggcgatgaacatcttcgagaatttcggcttccagatggtggtggccacgccgctcaagtcggtgatgacgctggagccgtttatcggcggcgcctgctttgtcgaaatcagcggccgtcacgactcgggcgtattgctgatcgaatacgacgaacaggcacgccggctcaagttacccgagcgctcgcgcagcgcagccgccgccggtgcggcgcgcgcgaccgagccgtccgccgccgtcggcggagcgagcgtcgatgaactgcactga

SEQ ID NO: 46250 - DNA, 1182 bp, Xanthomonas oryzae pv. oryzicola
atggcccccgccgcgcccatgatgttgcctgccgctgcgctgctggccttgcgcgggcagtggcagcgcgcacgcgggcagtggctgatcggcgagggcgcaccgcaggcgatcggattgcgggtgccgacccaggcacaggccatcgcccggttcgatgccttcggtgcgtggttgcaggagtggagccgcacaggcctgccggggcgggtggagtatcgcgcggtgagctggacgcagctggggccgcagcgcctgccgcagacctgggtgctggacgatgcgggccaggccgctggcgcgcttggcgagggcgagcgttgggcgcgtgcccgccaacgcagcgcggccttgcaggcgcgctggccgcaggcggtcgcgctggcggcgcggctacgccgtcaattcgatctgctggccgactggccggaggccgagttcgcacgcttggtggcggtggtggagtggctgcaccagcatcgcgacagtggactgttcctgcgccagcttcccatcgccggcatcgacagcaaatggatcgaaccgcatcgcggcgtcatcgccgactggcttgccggcctgcgcggcatcgccgagccgcgcagctttgccagcctgtccggcctgcgcaacgcgccggatcgggtgcgcttgcgattgctcgacccggccctgcgccaccacctcggcggcctggaggacatcaccgcaccgatcgcgcagatcgccgcgctgcgtctgcctgcgcgccgcgtgctgatcgtggaaaaccgcgaaaccggtctggcctgcgaatcgctgccgggcacgctggtgctgatggcgcgcgggtacgccatcgaatacgtgagcaatatcgcgtggctgcgcgaattgccgctgtactactggggcgacatcgacacccacggcctggcgatcctgcaccgcctgcgcacgcacgctccgcacaccaccgcggtgttgatgaatgaggccaccctgcaggccactccgcgcgcgttgtgggggcacgaacgcaggccgcaccgcgcccaacgcctggctgcgctcagcatccaggagcagcgcctgtatgcagacctgcgcggcggccggttcggtccttcgccgcgcctggagcaggaacgtatcgcctgggactatgcctggccgcgcatccaggccgcattggcggactga

SEQ ID NO: 46251 - DNA, 1473 bp, Xanthomonas oryzae pv. oryzicola; identical to SEQ ID NO: 42286

SEQ ID NO: 46252 - DNA, 699 bp, Xanthomonas oryzae pv. oryzicola; identical to SEQ ID NO: 42287

SEQ ID NO: 46253 - DNA, 3429 bp, Xanthomonas oryzae pv. oryzicola; identical to SEQ ID NO: 46249

SEQ ID NO: 46254 - DNA, 1182 bp, Xanthomonas oryzae pv. oryzicola
atggcccccgccgcgcccatgatgttgcctgccgctgcgctgctggccttgcgcgggcagtggcagcgcgcacgcgggcagtggctgatcggcgagggcgcaccgcaggcgatcggattgcgggtgccgacccaggcacaggccatcgcgcggttcgatgccttcggtgcgtggttgcaggagtggagccgcacaggcctgccggggcgggtggagtatcgcgcggtgagctggacgcagctggggccgcagcgcctgccgcagacctgggtgctggacgatgcgggccaggccgccggcgcgcttggcgagggcgagcgttgggcgcgtgcccgccaacgcagcgcggccttgcaggcgcgctggccgcaggcggtcgcgctggcggcgcggctacgccgtcaattcgatctgctggccgactggccggaggccgagttcgcacgcttggtggcggtggtggagtggctgcaccagcatcgcgacagtggactgttcctgcgccagcttcccatcgccggcatcgacagcaaatggatcgaaccgcatcgcggcgtcatcgccgactggcttgccggcctgcgcggcatcgccgagccgcgcagctttgccagcctgtccggcctgcgcaacgcgccggatcgggtgcgcttgcgattgctcgacccggccctgcgccaccacctcggcggcctggaggacatcaccgcaccgatcgcgcagatcgccgcgctgcgtctgcctgcgcgccgcgtgctgatcgtggaaaaccgcgaaaccggtctggcctgcgaatcgctgccgggcacgctggtgctgatggcgcgcgggtacgccatcgaatacgtgagcaatatcgcgtggctgcgcgggttgccgctgtactactggggcgacatcgacacccacggcctggcgatcctgcaccgcctgcgcacgcacgctccgcacaccaccgcggtgttgatgaatgaggccaccctgcaggccactccgcgcgcgttgtgggggcacgaacgcaggccgcaccgcgcccaacgcctggctgcgctcagcatccaggagcagcgcctgtatgcagacctgcgcggcggccggttcggtccttcgccgcgcctggagcaggaacgtatcgcctgggactatgcctggccgcgcatccaggccgcattggcggactga

SEQ ID NO: 46255 - DNA, 1473 bp, Xanthomonas oryzae pv. oryzicola; identical to SEQ ID NO: 42286

SEQ ID NO: 46256 - DNA, 699 bp, Xanthomonas oryzae pv. oryzicola; identical to SEQ ID NO: 42287

SEQ ID NO: 46257 - DNA, 3429 bp, Xanthomonas oryzae pv. oryzicola; identical to SEQ ID NO: 46249

SEQ ID NO: 46258 - DNA, 1182 bp, Xanthomonas oryzae pv. oryzicola; identical to SEQ ID NO: 46254

SEQ ID NO: 46259 - DNA, 1473 bp, Xanthomonas oryzae pv. oryzicola; identical to SEQ ID NO: 46180

SEQ ID NO: 46260 - DNA, 699 bp, Xanthomonas oryzae pv. oryzicola; identical to SEQ ID NO: 42287

SEQ ID NO: 46261 - DNA, 3429 bp, Xanthomonas oryzae pv. oryzicola; identical to SEQ ID NO: 46182

SEQ ID NO: 46262 - DNA, 1182 bp, Xanthomonas oryzae pv. oryzicola; identical to SEQ ID NO: 46183

SEQ ID NO: 46263 - DNA, 1473 bp, Xanthomonas oryzae pv. oryzicola
atgaaacaccgtgcccgtatcgcccgctatcgcgccctgcgcgagcagccgctgtggaaactactggcggccgatcagtcgccggaagtgatcggcctgctgcagacgttgttgctcgacagcgagcgcggtttgcccgcggcggtcctgcatgaacgcctgcagcgcatgcttgacgatctcaatgtcgatcagctctcgcgcgagctgccgcgcactgcgcaggcctatgtagcgcactggctggcgcagggctggctggaacggcgcctgcccgagggcgcgcagcaggagcagtacgagttgtctacccaggcgatacaggcgattcgctttgccgatggtctggagcaggcgcgtggtgccgcgaccgagagccggcttgcgctggtgatgcagcagttgtcgcagttggccgcgttgaccgaaaccaatcccgatgcgcggctgtcggcgctgcgcgacgagcgtgatcgcattgatgcggagatcgcgcgggtggctgccggcaaggtcgcctcgttggatggcaaacgcgcgctggagcgtgcgcggcaggtgatcgcgctggccgacgagctgaccgaggattttcgccgggtacgcgacgatttcgagcagctcaatcgccagttccgtgagcgcatcatcgacgacgagggcgagcgtggcgaggtgttgacgcggctgttcgagggcgtggacgtgatcggcgacagcgaggccggacgcagttttcaagcgttctgggcgctgctcaacgatgccgaacaaagcgcgcagctggatgcggcgctggagacggtgttggcgcgggcgttcgcacgcaagctcgaccgccgcgagcgcagcttcctgcgcggcttgaccggtaccatgctcgaacgcggcggtcaggtgcacgatgtgatgcagcatttcgcccgcagcctgcgcggcttcgtccaaagccgtggctatctggaacaacgccggctcaatcaattgctcaagcaggcacaggccgaggcgttggggctgcgcgagcatctgcgtgcgcagcgctcggtcgggcacgacctcaacctgaccaccagccgcttacgctcgctgtcgcaatggcgtctgcacgatccgcgtcagacccaggtcgatggcagcatccagcgcaacgacgcagccgcgatctcgctggacagcgtcggcgatctggtcgcgcagtcggaaatcgacttccgcagcctgcgccgtgatctgtacgagctgctcggcgaacacgcacagctgtccatcgcgcaggtgctggcgcaacggcaggcagagcaggggctcggcagtgtgatcggctacctgtcgcttggcacgcgtcatgggcaggtggatgcgcaacgcagcgagatcgcgcgatggcgtggcggcgatggccagtggcgcggcgcacgtattccgttagtgtggttcagccaggagaaacgcaatgaattggcaggctga

SEQ ID NO: 46264 - DNA, 699 bp, Xanthomonas oryzae pv. oryzicola
atgaattggcaggctgacaacgccgaaaccgacgcgcacgcgccgagcgcccacgtcgatgcggctgcgcccgaggcggacgccgcgacaggcctttttcccggcgatagcggtgcgttgccggtggatgcgcggcgcgtgctgtgccaattgctcgccggccccagcgtggacgtgcagcgccacagcaagttgtggccagcgttgctgcgccatgaagcggccgtgcgcagccgcctggccgatctcttcctggaattgatgctcgaccgcgacgccggcgtcgccttcacccgccaggccgacaccggcgagctcgaagcgccggtgctgctgcgctctctgccgctgaccttcatcgattcggtgttgctgctgcatctgcgtcagcaactggccgaagccgatgcgcggggtgtgcgtgcggtggtcgaagatgcgccgttgagcgaggccctggccgtctacgagaagaatctgtccaccgaccgtgccggcttcatgcgtcgggttggcaacgccattcagaagatgaaggacaaccacgtgctcacgcgcctgcgtggcgaagacaaccgctacgaggtttcgcccacgctcaagctgctgttctcggccgaggatgtgtccgcgctggcgcagatctatcgccagctgcgcgagcagcccggcaccgtaggcgatgcagagcgcgcctga

SEQ ID NO: 46265 - DNA, 3429 bp, Xanthomonas oryzae pv. oryzicola
atgaaatcttcttcctccagcctgtttgccgacgatctgcccgacccgcgcgtgcagcagtttcgcatgcgccgcctgcaggtccataactggggcacgttcaacggcttgaccgacgtgccgatcgccgcgaagggcttcttgttcgtcggccgttccggttcgggcaaatccacgctgctggatgccatgtccgctctgttgaccccgcccaatctggtcgacttcaatgccgccgcgcgcgaggccgagcgcactggccgcgatcgcaacctggtgtcgtatgtgcgcggcgcctgggccgaccagcaggacagcgcctccggcgaaatcgccacgcaatatctgcgcaagggcagcacctggaccgcgctggtgctggaataccgcaacggcgagggacgggtgatcagcctgatacggctgttctggatcgctggcagcggtgcggcggcagccgacgtgcgcaagcattacatggtggccgagcgcagtttcgatatcgccagcgaactggtcggcttcgatctggatttgcgcaagctcaaggcgcgtctgggcgacgacatcgcccacttcgacaatttctccggctatgccgagcgcttacgccatcagttgggcatcgccaacgagatggcgttacggctgctgcacaaaacccagtccgcgaagaatctcggcgatctcaatgtgttcctgcgcggcttcatgctcgaggcgcccaagaccttcgacgccagcgagcggctggtgggcgacttcgccgaactcgatggagcgcatcgggcggtggtcaccgcacggcggcaggtcgaaacgctgctgcccgcgcgtgcgcattacgacgacttgcagtcggtgcaacgtcagcgcggccgcttgcaggaactcaagctcggcctggacccctatcgcgagcaacgccggcttgcgttgctggatgcgcgcctgcatgcactggacgtcaacgaccagggcctggccggcgaggagggccaacgccgcgctgcagtggataaccaccaacaacgcttgtccgatctggaggcccagcgccgcagccagggcggcgagcggatcgacgcgctggaacgcgagcagctccaggtccagggcgaacttgcacgccgcagcgacaagcgtgccaaggccgaacaggcctgccgccagctcgaccaaactttggccgacaacgcgcatggatttgccgagcagtccgcgcaggcgcgcgccgcgctcgaggacgggcagcggctggccgccgaacaggacgaggcgatcgtcgagcgtatcgctggcaagcgcgaggacagccagcgctttgcgcaggtgcgcgccgagatcgaggcgctcacccgcaatccctccaacattgctgcgccgatgcaggccctgcgtgcacgcctgagcgaagaaaccggcattcccgaggccgcgctgcccttcgtcggcgaactgatccaggtgcgtgaggaagatgccgcctggcgcggtgccatcgagcgcgtgctgcatgggtttgcgcaatcgctgctggtggacgagcgccattacgccgaactggccgagtgggtcaaccgcacacatctgggctcgcgcttggtctattaccgggtgcgcaataacgaacaggcgtttgccggccgcgaacccggcagcgcctcgctgctgcacaagctgcaattgcgcgagcatccctttgccggctggctgcggcgcgaactgggcaagcgttttgactacgactgcctggagagcgccaaggccttgcgcacggcagagcgcgcgatcacccgcgaaggccagatcaagcatcccggcgaacgctatgaaaaggacgaccgtcatgcggtcggcgaccgtcggcgctggctgctgggcttcgacaaccgcgacaagctggcactgtacgagcgcgaagccattgaactggcacaacgcatcgccgcctgcgatgccgacgtggccgagctgcgtgcgcgccgcgaacgcgatgccagccggcgcctggcccagcacaccctggccaacctggcctgggaggaaatcgacgtcgccgcacagctgcaacgccgcgacgatatcgccaacgccttgcgccagctgcgcgaaggcgatgccaacctgcgcgcgctgggcgaggcgatcgagcgcacgcgcggcgacctggaacaggccaagcgcacgttcgacggtgtgcgcgaggaacggatcgcgctgggggtcgagcgcacgcgcctggaaaagcaacgcctgcactgcgccgacgccgatgcccgggtggtcacgccgctgcagcgcgaggggttggaggagcgcctggccaacctgggcgcgcttagcctggataatgtcgaagcgcattttcgccagatcggcaacgccatcgccgagcagaccagcgccagcgacagcgagcacaatcggctcgaacagttgctgctcggctgctttcgccggtatagccaacagtggcccgaagacagtggcgacttcatcatcagcctggccggcgccgaggattttcttgcccgcctgcagcgtctggaacgcgatggcctgccgcagcacgaagcgcgctttttcgagctgttgcagagccagagcaagaacaatctgctcgccttgcagcgccacaccgccgaagcacgcaaatcgatcgcccaacgcctggacgaggtcaacgccagcctggagcaggtgccgttcaaccatggcaccttgctgaccatcgaactcagcgatcggcgtttgccggaggtgatcgacttccatcaacgtctgcgcgatgtgctcggtcaccaccagaccgaacagcgtgacgtggccgaacagcaatttgccgtgctgcgcgaactggtgcgtaagctcggctcagccgatggcgaggacaagcgctggcgcgaggtggtgctggatgtgcgcctgcatgtggagttcgtcggtgtcgagctggatgcggccacccgccagcaggtggagatctaccgcagcggcgccggcaagtccggcggccagcggcagaaactggcaaccacctgcctggccgccgcgctgcggtatcaacttggcggcgaagacggcgaattgccgtgctacgcggccgtggtactggacgaagccttcgacaaggccgacaacgaattcaccgccttggcgatgaacatcttcgagaatttcggcttccagatggtggtggccacgccgctcaagtcggtgatgacgctggagccgtttatcggcggtgcctgctttgtcgaaatcagcggccgtcacgactcgggcgtattgctgatcgaatacgacgaacaggcacgccggctcaagttacccgagcgctcgcgcagcgcagccgccgccggtgcggcgcgcgcgaccgagccgtccgacgccgtcggcggagcgagcgtcgatgaactgcactga

SEQ ID NO: 46266 - DNA, 1182 bp, Xanthomonas oryzae pv. oryzicola; identical to SEQ ID NO: 46183

SEQ ID NO: 46267 - DNA, 1473 bp, Xanthomonas oryzae pv. oryzicola; identical to SEQ ID NO: 46263

SEQ ID NO: 46268 - DNA, 699 bp, Xanthomonas oryzae pv. oryzicola; identical to SEQ ID NO: 42287

SEQ ID NO: 46269 - DNA, 3429 bp, Xanthomonas oryzae pv. oryzicola; identical to SEQ ID NO: 46265

SEQ ID NO: 46270 - DNA, 1182 bp, Xanthomonas oryzae pv. oryzicola; identical to SEQ ID NO: 46183

SEQ ID NO: 46271 - DNA, 1473 bp, Xanthomonas oryzae pv. oryzicola; identical to SEQ ID NO: 42286

SEQ ID NO: 46272 - DNA, 699 bp, Xanthomonas oryzae pv. oryzicola; identical to SEQ ID NO: 42287

SEQ ID NO: 46273 - DNA, 3429 bp, Xanthomonas oryzae pv. oryzicola; identical to SEQ ID NO: 46249

SEQ ID NO: 46274 - DNA, 1182 bp, Xanthomonas oryzae pv. oryzicola; identical to SEQ ID NO: 46254

SEQ ID NO: 46275 - DNA, 1473 bp, Xanthomonas oryzae pv. oryzicola; identical to SEQ ID NO: 42286

SEQ ID NO: 46276 - DNA, 699 bp, Xanthomonas oryzae pv. oryzicola; identical to SEQ ID NO: 42287

SEQ ID NO: 46277 - DNA, 3429 bp, Xanthomonas oryzae pv. oryzicola; identical to SEQ ID NO: 46249

SEQ ID NO: 46278 - DNA, 1182 bp, Xanthomonas oryzae pv. oryzicola; identical to SEQ ID NO: 46254

SEQ ID NO: 46279 - DNA, 1470 bp, Xanthomonas sp. NCPPB1128
atgaagccgcatgtccggatcgccggctatcgccagttgcgcgaacagccgctgtggaagctgctcgccgccgaccatgccccggagctgatcggcctgctgcagaccctgctgggtgacgcccagcggcggttgccggccgacgtgctgcacgagcgcctgcagcgccagctcgatgcgctgaaggacgacgagctgtcgcgcgaactgccgcgcaccgcgcaggcctacgtggcgcactggctggcgcagggctggctggagcggcgcctgcccgagggcgatgcgcaggaagactacgaactgtcgcggcaggcggcgcaggccatccgcttcatcgccggcgtgcgcgacagcgccagcgtggccaccgagagccggctgtcgctggtgatccagcagctggtgcaattggccgggcagaccgagaccgatccggatgcgcgcctggccgcgttgcgcgccgagcgcgagcgcctggacgcggagatcgagcgcgtggccgccggcaagctggccgcgctggacggcaagcgcgcgctggagcgcacccgcgacatcatccgcctgtccgacgacctgaccgaggacttccgccgcgtccgcgacgatttcgagcggctcaaccgcgagtttcgcgagcgcatcatcgacgacgaaggcgcgcgcggcgacgtgctggagaagctgttcgccggcatcgacgtgatcggcgagagcgaggccgggcgcagtttccaggcgttctggagcctgctcaacgacgccgagcagagcgtgcagctggacgcggcgctggaggcattgctggcgcgcggcttcgcccgccgcctggaccgccacgaacgcgccttcctgcgcgggctcaccggtaccctgctcgaacgcggtggccaggtgcacgaggtgatgcagcatttcgcgcgcagcctgcgcggcttcgtgcagagccgcggctacctcgaacagcgccggctcaaccagttgctgaagcaggcccagggcgaggcgctgcagttgcgtgatcacctgcatgccaccgccgccaccggctacgtgctgccgctgagcagcgcgcggctgcgctcgccgtcgcagtggcgcctgcacgacccgcgcagccagcaggtggatgggcgggtgcaggcggccgaggcggcgacgatctcgctggacagtgtcggcgacctggtggcgcagtcggagatcgacctgcgcggcctgcgcaacgatctgcacgacctgctcggtcgacagccgcagctgagcatcggcgaggcgctgcggcagcgcccagcggcgcagggcctgggcagcgtgatcggctacctggcgctgggcacccgccacggcgtggtggtcgacggcgaatgggaagcggtgcaatgggagggcggcgacggccaggtccggcgtgcgcgcatcccgctggtgtggttcaccaaggaaaaacgcaatgagttggtctga

SEQ ID NO: 46280 - DNA, 687 bp, Xanthomonas sp. NCPPB1128
atgagttggtctgacgaattccacggtcacgatgcagatgccggcgacgccgctgcggccgctgccaccgccgatgccgataccggcaccgcgctgttcgccggcgacagcggcagcctgccgctggaggcgcggcgcgcgctgtgccagctgctgtccggccccagcgtcgatgcctaccggcacggtccgctgtggcaggcgttgctgcgccacgaggccgcgatccgccgcgtgctgagcgagctgttcctggagctggtgctggaccgcgacggcggcgtggcgttcgcgcgccaggccgacaccggtgaactggagacgccggcattgctgcgcaccgccccgctgaccttcatcgaatcggtgttgctgctgttcctgcgccagcaactggccgaggccgacacccgcggcgagcgcgcggtggttgacgaggcgcagttgctggaagtgctgtcggtgtacgaaaagaacgtgtccaccgatcgcgccggcttcgcccggcgggtgctggcggcgatcgccaagatgcgcgacaaccacctgctgtccaagctgcgcggcagcgaggaccgctacgaagtctcgccggcgctgaagctgctgttctcggccgaggacgtgcaggcgctgtcggcggcctaccgcggcctgcgcgatggcgcggctgaggcggcgccatga

SEQ ID NO: 46281 - DNA, 3807 bp, Xanthomonas sp. NCPPB1128
atgacgtccctgtccgaatcgtccaccgtccccgtcgctccgtccctgttcgccgagaccctggccgagcaacgcgcgcagcagtaccgcatgcgccgtctgcaggtgcacaactggggcaccttcaacggcctgaccgacgtgccgatcgccgagaagggcttcctgttcgtcggccgctccggctcgggcaagtcgaccctgctcgatgcgatgtcggcgctgctgacgccgccgagcatcgtcgacttcaacgccgccgcgcgcgaggccgagcgcagcggccgcgaccgcagcctggtgtcctacgtgcgcggcgcctgggccgaccagcaggacagcgcctccggcgagatcgccacccagtacctgcgcaagggcgcgacctggtcggcgctggcgctggagtaccgcaacgcgcagggccaggcggtgagcctggtgcggctgttctggatcgccggcagcggtaccgccgcggccgacgtgcgcaagcactacatggtggtgccgcgcggcttcgacgtggccgccgagctggacggcttcgacctggacctgcgccggctcaagctgcgcctgggcgaggacgtacaccacttcgacagcttcgccggctacgccgagcgcttccgccacctgctcggcatcggcaacgagatggcgctgcggctgctgcacaagacccagtcggcgaagaacctgggcgacctcaatgcctttctgcgcagcttcatgctcgacgagccgcgcaccttcgaggcggccgaccgcctggtcgatgatttcgccgaactcgacggcgcccaccacgcggtggtaaccgcgcggcgccaggtggaaaccctgaccccggcgcgcgactaccacgccgaactgctggcgctgcggcgcggcgtcggcgagctgcgcgagctgcagctgggcatcgacggctaccgcgagcagcgccgcctggccctgctggacgcgcgcctgcaggaactggacacgcaggaccgcggcttggccggcgaggaagggcagcgtcgcgaagcgctggacaaccacgagcagaccctggccgagctggagacgcagcagcgcgcgcagggcggcgagcaggtcgaggcgctggaacgcgagcgcggccgcgtcgagcgcgagcgcgacgagcgcatgcgccgccgcggccaggtcgaacaggcctgccgccagctcggcatgggcctggccggcagcgccagcggcttcgccgagcaggtggcgcaggcgcgcgcgctgcgcgacggcgtcgccggcgaggccagcagcctggacgaggcgatcgccgaacgcatggccgagcgccgcgaggacgaacgccgcttcgcggtcatccgcaccgagatcgaggcgctgctgaaggcgccctcgagcattcccgcgccgatgcaggcgctgcgcgcgcggctgtgcgccgagaccggcctgtccgaggcggccctgccgttcgtcggcgaactggtgcaggtggaggccgaccaggccgcctggcgtggtgcgatcgagcgcgtgctgcacggcttcgcgcagtcgctgctggtcgacgagcgccattacgccagcgtcgccgactgggtcaacaagacccagctcggcacccgcctggtgtacttccgggtgcgccacaacgacccgctgcagcgccgcgagcccgatgcaaagtcgctgctgcgcaagctggagctgcgtgatcacgcctatgcgccgtggctgcgccaggaactggcgcggcgcttcgactacacctgcgtggacaccgtggcgcagttgcgcgacgccgagcgcgcgatcacccgcgaaggccaggtcaagcatcctggcgatcgctacgagaaggacgaccgccacgcggtcggcgaccgcaagcgctggctgctcggctacgacaaccgcgacaagctcaaggtcttcgagcgcgaggggcagaccctggcgcagcgcatcgccgcctgcgatgccgacgtcgccgccctgcgcaagcagcgcgaacaggaccagggccggcaactggccgcgcacaccctggccgagcgcgagtgggacgagatcgacgtcgcgcccaagttgcagcgcctgagcgacatcgccgagcagctgctgcagttgcgcgagggcgacaccgcactgcgcgcgctgggcgagcagatcgccaccgtccgcgcccgccgcgaccaggcccgccgtacctacgaggacgtgcgcctggagcgcgcgcagctgagccgcgagcgcgcccgcctggaagcgcagcgcgagacctgcgccgcgcgcgtggccaccgcggtgatcggcccggcgcaggtggcgggcctggacgcgcggcttgcggcgctgccgccgctgagcctggacaatctggaagcgcatctgcgcagcgtcgagcgcggcttgggcgaacagctggcgcagagccaggcgcaggacgcgcggctgagccagcaggtgctggactgcttccgccgctactgccagcagtggccggaggacagcggcgacttcaccgtcagcctggccggcgccgacgatttcctggcgcgcctgcagcgcctggagagcgacggcctgccgcgccacgaaggccgcttcttcgacctgctgcagacccagagcaagaacaacctgttggccctgcagcgctacaccgccgaagcgcacaaggcgatcaagcagcgcatggacgaggtcaacgccagcctggaacaggtgccgttcaaccgcggcaccctgctgaccatcgaggtcagcgaccggcgcctgctcgaggtgcaggagttccagcagcagttgcgtgccgtgctcggccaccagcagaccgaggaccgggcgctggccgaggcgcagttcgccatgttgcgcgggctggtgcagcggctcggcgcgcaggagccggagctgcggcgctggcgcgaacaggtgctggacgtgcgccagcacgtggagttcgtcggcgtggagctggacgccgagagccgtgcgcaggtggagatctaccgcagcggcgccggcaagtccggcggccagcggcagaagctggccaccacctgcctggccgcggcgctgcgctaccagctcggcggcgaggacggcgaactgccgcgctacgccgcggtggtgctggacgaggccttcgacaaggccgacaacgaattcaccgcgctggcgatgaacatcttcgagaacttcggcttccagatggtggtggccacgccgctgaagtcggtgatgacgctggagccgttcatcggcggcgcctgcttcgtcgagatcagcggccgccacaactccggcgtgctgctgatcgaatacgacgcgcaggcgcaccggctgaagctgcccgagcgcagccgcaacgaggcggcgacgcctgcggcggaatcggtcgaggcggtggaccaggctggcgccgatctgccaccgcctgccgcggacgcagcagacgcaactgcggagaccctcgcagacgccgttgccaagccggcgcgtgcatccggcaaggcacgtgatgccggcagcaaaccacggaccacgcccaagacgtcgccagcgacgcccggcaaacgtgcccgcaacgctggtgcgacgcctgcggccaaggcttcatcggcgaaggcgccacgcacgtccgccgcggccgcggcacctgcgtccacggctacgcggtcggccgcgcagccggcgtcggcgaagaccgcgaaagccgccatcggcagcaaacctgcgacgccagccaaggcggcggcgcgcaagtcgcctcccgcgaccgtcaagcgccgcggcggctga

SEQ ID NO: 46282 - DNA, 1437 bp, Mycobacterium chlorophenolicum
gtggacgaccacggggggcgatcggccgctgacctgctcgagctgaatcgcgacctgcagagttcgccgaccgtccggctgctcgccgccaccaacctgagcctgtactcgacgttgatggaccgtcacctgtccggcggggtggtcgccgagaccgagctcgtggtccggatcgagcgtgacctcgccgacctcgaggacgaccagtccgggctcgcgctgatcaagtcgtgggccagccagggttggctacatcggatcgtcgatgaacgcaccgaccagaacgtctgctacctgacccaggacgcgcgccgcgcgctggacttcctgcgcggcatgcgccgccaggacacgatcgcgaccggcggatcgatcaacggcatcgccggccggctccggcacgtcgccctcaaggtcggcaacgaccccgcccgcatccgcaagcacatcgagaacgagatcgaggcgctgcgccgcgaactcgatcaactcgaggccggcgagcgccccgaacccgacgtcaccgacgcctacgacgaagcccgggcgatcgcgctgcagatggaacgcctcatcaccgatatcggccagtacggcacgatgatcgagcaggccaccgccgccctcgacgagccgatcgacagcaacgtggagtaccgcgaccgtcagcggcagatgtacgccgactaccaggcggcgtgggattcccagggccgcgacagccaccgcgcgttcctgcggatgatcaacgacccggaccagcgcgccgagttcgaggccgacgtcgccgccgtcgccgaggcgctgcctcacctcgatccggcgctgcgcgcggtgatggccgggttcttcgagctcgtcggtcaccagatcgacgaggtcgaacgcatccagcagcgctgcgcccagcgggtcaaacggttcaccgcgttcggcaccctggagcagagccgcggtgtggcccgtcagctgggcgaggccatcggcgcggcccgcacgctgctcaagacctcgctcaccgattcgcggctggacctcgaactgccgctggcccgccacgcgatcagctccgtcggcgcgctcagcttcaagatcggcgatctgtcgaatcccaagcccgccaagcccgccgacggcgaggtcgatctggccagcttcgccgcgctcaccacgcaggtggacgcgcccgcgatgtcggagatgctcaacgccgccgtcgcccgcgggccggtgacgctgcccgacgcggtggccatgctcgataacgcgtacctcggccacgtcatcgtgctgtggtcctgggcgctcaagcagccgaacgacgacaccggcaggtcgacgaccgtccggttccggtccctggacggccgggaccgcgaaatggccgttcccgacctgtctttcaccgaaccgatcaccgcaggagtggcctcgtga

SEQ ID NO: 46283 - DNA, 687 bp, Mycobacterium chlorophenolicum
gtgagcaccgacacagcggccgacttcgctgcgttttccgacttgccgcaggtcgaccagagcgcccgccccccgcaccagcgccggccccgcttcgacggcgatgtctccgaactgcccgaccgcgcctgctgggcgttgcagcacctgctcacccggcgctacatcagcgccgaatccgacagcgacatctacgcgtgggtgctcgagtaccgccaccagctgtcggtgcggctgtcggaactggacctgctgctgcgcatcgtggacgggaccgacgtcgcgttcgtcgagcaggcccgctacgaatccgccaagggcatcaagcttctgcgccgtgagccgctgggcacctatgactcgatcctcgcgctgcacctggcgcagatgatgcgcgcctcgggtgggcagagcgtgctgatctcccgcgacgagatgcacggactcttctccggtgtactcaacgacgtcgaccgggacgcggtgacgttcgccgggcgcgtcgacgccgcgatcgcgcgcctcaccggtctggagatcctgcggcgcagccgcgacgacgaggacagctacaccatcagcccggtgatcaccgcggtgatgaccgccagcgtgatcagcgaactgcagcagcagttcgagctgttggccaacggcggaacgaccgctgaggagatccaggagtga

SEQ ID NO: 46284 - DNA, 3357 bp, Mycobacterium chlorophenolicum
gtgaccgagcagttccacctgtcccggctgcaggtcatcaactggggcgtgttcgacgggtaccactcgatcccgttcagcgagggcggcgctctgatcgccggcgcctcgggcagcggcaaatcatcactgctggatgccatttcgctgggcttcctgccgttcaaccggcgcaacttcaacgcctcgggcgacaacacggccgccgggtcgagcgcgggccggcgcaccgtcgacaagtacgtgcgcggcgcgtgggggcagcgcagcgacggcgggaccagccgggtgatgtatctgcgcggcgacgggaccgcgtggtcggcggtggccgtcacctacgccagcgactccggacgcaccgtgacgggcctggtgctcaagtggctgacgggcgagtcgcgcaacgactcgtcgagccgcttcgtgctcggcgacggcgacctgggcatcgaggacgtctgcaaccgttgggcggcagggcgtttcgacaccggcgtgttcaaggaggacggctggcgattcaccacgaaggtcgaatcgcagtatctggcgcagctgtacgcgaccatcggcatccgcgcctccgacgccgcccagcagttgctcggcaaggcgaagtcactcaagagcgtcggcggcctggagcagttcgtccgcgagttcatgctcgacgagcccgacagcctggcccggctgcccgaggcgctcaagcagatcgacccgctggtcgaggcccgcgaactgctggcggtggcgcagaagaagcgcaagatcctcggcgacatcgagaagatccagcagcgctatgcctcggagtcgaccgatctgggcatcatcgacctcgtcgacctgccgatggtgcgtgcctacaccgaccatgtccggctcgcgcagtgcccggcgcagatcgcgcagctcgacaccaccgtcgaccagctcgacaacgagtacgaggacgtcacccgcgcgctgaatctggccaaggcggaagcagattcgctcaatgcgcagatcagcggcaccagcgcgaacatcggtccgctgcagagccaggtgaccgccgccgaagccgaggccgagcaggtgtcgcgccgccgcggcgcctacgaggacatgctcgccgcgcaggacctcgaggtgcccgacaccgccgacgagttctggaacctgcgcgaagacctcctcgcccaggccaccgagctgctggccaaggtggaacgccaccgcgaggcgtccaccgacgcggagtacgcgcagaaggcggcccgcatcgcgcgcgacgacgccgccaaggaactcaagcgggtggagcacgtggggtcggcgctgcccgagttcgcgctgctgatgcgcgaacagatctgcgccgcagtgggtgtcgacgccgctgcgctgccctatgtcgccgagctgatggacctgcggccggaccagacgcggtggcgcaccgcggtggagaaggtgctgcgcggcgtcgggctgcggctgatggtgcccgaccagcactggacggcggtgctgcagttcgtcaacgagacgaacatgcggggccggctggcgctgcaccacgtgcgggcgaagatgctgggcgccgatccggtggatccggaaccgaacacgttggcgggcaagctgttcgccgtcgatccggcgcatccgtgcacggccgaggcggtcgacatcgtgacagccgccggcgatcacgtgtgcgtcgacacccccgaggtgttcgcccgcttccgccgcgcggtcaccgacaccggcctgtacaaggactccgaccggctcgcgatcaaggacgaccggcgcccgctcaagcagtcggagtacctgtaccagggcgacgtgtcggcgaagatcaatgcgctgacagtggatctggccgcagccgaggaggcctaccagaaggcgcgccgcatcgccgacgacatcgcggcgcagcgccagcagtggcgcgaccgggcggcggcgtgcaaggcgatcggcgagcagtttccgcagtggagccagatcgacaccgagaccgccgacggccacgccgaccggttgcgcgagcagtacgagctgctgctggcggacaaccccgacatcgaggcgctcaacgcgcgtgccgacgaatgctggtcgcagatccagaaattgatgacccgtcgcggcgcgatccagacccgccgcgacgatctggacgcccgccggacccggctgttggagctctcggagcggctgtccccggcgttcgtgtcggaaccgctgaccgagctgctgggccgctacgccgggcagctgcccgtcgggctcgagctgctcgaccccgagccgcaccgcgacgcattgttctccgcgatcaagaaagaacgcgagcagctgcgggagagtcggcgccgctcctacgacgaactggcccgcatcctcaacaccttcgacaccgcgttccccgacgcgatcccgaacgactcgaacgatttcgacgagcgggtgcacgactacgtcgcactctgccggcacatcgacgagcgggagctgcccgaggcctacgagcggatgatgcggctggtcaccgagcaggccccggatgcgatcctgacgctgcaccgggtggccgagcaggaagcgcggcgcatcgccgagcagatcgagcgcgtcaacaccgggctgggcgcggtggagttcaaccgcggcacccggctgacgctgcgggccaccccgcgcagcctgaccgcggtgtcggagctgacggagatcgtgcgggccatctcgcggcgcatcgccgaggtggggctcggcgacaagcaggcaatcctcgaccagtacgccgacatcctgcggctgcgcaaccggctcgcgtcgacggcgccggaggacaaggcgtggacgcgcgacgcgctcgatgtccgtaaccggttcacgttcgactgcgcggagtgggacgtggcgtccgacgagctgatccgcacgcacagcaatgcgggcgacaactccggcggcgagcaggagaagctgatggcgttctgcctggcgggcgcgctgagcttcaacctggccagcccggagagtcaggacaacaggccggtgttcgcgcagctgatgctcgacgaggcgttctccaagtccgatccgcagttcgcccagcaggcgctgcaggcgttccgcaagttcggtttccagctggtgatcgtcgcgacggtacagaacgcgacgacgatccagccctacatcgacagcgtggtgatggtcagcaagaccgaggcgacgggccgcaacgcgcggccggtggcgacggtggcaacccggtcgatcgcggagttcacggagttgcggcaccagatgcggacgagggtgcccgcaggggtgtag

SEQ ID NO: 46285 - DNA, 1422 bp, Mycobacterium obuense
gtggacgaccagctgtcggcggccgatctgctcgagcgcaaccgcgagctgcaggcatccccgacggtacggctgctgtcggccaccaacctgagcctctatgcggcgctgatggaccggcacctgagcggcggagtggtcgccgagaccgagctggtggtgcgcctggagcgtgatctggccgacctgggcgacgatcagcccggcctcgcgctggtcaagtcctgggccagccagggctggctgcaccgcatcgtcgacgaacggaccgatcagaacgtctgctacctgacccaggacgcgcggcgtgcgctggacttcctgcgcgggatgcgccgccaggacacgatcgccaccggtggctcgatcaccggcatcgcaggccggctcaagcagatcgcgatcagagtcggcaacgatcccgcccgcatccgcaagagcatcgaggccgagatcgacacgctgcgtcgtgagctcgacgaactcgaggccggagaacgacccgaaccggacgtcaccgacgcctacgacgaggcccgcgcgatcgcgctgcagatggaacgcctgatcaccgacatcggccagtacggcacgatgatcgagcaggccaccgccgcgctcgacgaaccgatcgacagcaacctcgcctaccgggatcggcagcggcagatgtacgccgactaccaggcggcctgggattcgcagggccgcgacagccaccgcgccttcctgcgcatgatcaacgaccccgaccagcgcgccgagttcgaggccgacgtcgccgcggtcgccggggcgctcccgcatctggacccggcgctgcgccgggtgatggccggcttcttcgaactggtcggacagcagatcgacgaggtcgaacgcatccagcagcgctgcgcgcagcgggtcaaacgcttcaccgcgttcggcacgctcgagcagagccgcggcatcgcccgccagctgaacgaggccatcggcgccgcgcgcaccctgctgaagacctcgctcaccgattcccggctcgatctcgagctaccactggccaggcatgcaatcagctcggtcggcgcgctcagcttcaagatcggcgacctgtccaacccgaagccggccaaaccggccgagggcgacgtcgacctcgccagcttcgccgcgctcaccacccaggtcgacgcggccgcgatggcggagatgatcaacgacgcgctgccgatgtcgctgccggacgcggtcgcgagactggacaacgcatacctcggtcacgtcatcgtgctgtggtcgtgggcgctcaagcagccgcaagagacggccggtgagtccacgacggtccgcttccgttcgctggacggccgcgatcgcgagatcgccgttcccaacgcgactttcaccgaaccgatcaccgtgggagtggccccgtga

SEQ ID NO: 46286 - DNA, 681 bp, Mycobacterium obuense
gtgagcaccgacgccgatatcgacttctcgtccctgccgcaggtcgaccagaccgcgcggccgccgcatcagcgtcggccccggttcgacggcgacgtctccgagctgcctgaccgcgcctgctgggcgctgcaacatctgctgactcggcgctacatcagcgccgagtccgacgccgacatctacgcgtgggtgctcgaataccgccatcagctctcggtccggctgtccgagctcgacctactgctgcgcatcgtcgacggaacggacgtggcgttcgtcgagcaggcccgctacgaatccgccaagggcatcaagcttctccgccgggagccgctcggcacctacgactcgatcctggccctgcacctggcgcagatgatgcgcgccgcgggcgggcagagcgtgctcatctcacgcgaggagatgcacgggctgttctcgggtgtgctgaacgacgtggaccgcgacgcggtgacgttcacgggccgcatcgacgcggcgatcgcccggctgacgggcctggagatcctgcgccgcagccgcgacgacgaagacagctacacgatcagcccggtgatcaccgcggtgatgacggccagcgtgatcaccgagctgcagcagcagttcgaactgctggccaccggcggcacccccgacgtggaggtcacccttgactga

SEQ ID NO: 46287 - DNA, 3360 bp, Mycobacterium obuense
ttgactgagcagttccacctgtcccggctgcaggtcatcaactggggcgtgttcgacggctatcactcgatcccgttcagcgagggcggtgcgctgatcgccggcgcttcgggcagcggcaaatcctcactgctggatgccatttcgctgggctttctgccgttcaaccgacgcaacttcaacgcctccggtgacaacaccgcggccgggtcgagcgcgggccgccgcaccgtggacaagtacgtgcgtggcgcgtggggtcagcgcagcgacggtggcaccagccgggtgatgtacctgcgcggcgacggcaccgcctggtcggccgtcgcggtgacctatgccagcgattccgggcgcacggtgacgggcctggtcctcaagtggctgacgggcgaatcgcgcaacgactcgtcgagccggttcgtgctcggcgacggcgatctcggcatcgaggacgtctgcaatcgttgggcggcaggccgtttcgacactggcgtgttcaaagagaacggctggcggttcaccaccaaggtcgagtcgcagtatctggcgcagctgtacgcgacgatcggcatccgcgcctccgatgcggcccagcagctgctcggcaaggcgaagtcgctcaagagcgtcggcggcctggagcagttcgtccgggagttcatgctcgacgagccggacagcctggcccgtcttcccgaggcgctcaagcagatcgatcccctggtggaggcccgcgaactgctggccgtcgcgcagcgcaagcgcaagatcctgggcgacatcgagaagatccagcagcggtacgcgtcggagtccaccgatctcggcatcatcgatctcgtcgacctgccgatggtgcgcgcgtacaccgatcacgtccggctggcgcagtgcccggcgcagatcgcccagctcgacaccaccatcgaccagctcgagaacgagtacgaggatgtcacgcggtcgctgaatctggccaaggcagaagcggattcgctcaatgcacagatcagcggtaccagtgcgaacatcggtccgctgcaaagtcaggtgacggccgcggagaccgaggccgagcagatcgagcgccgccgcgccgcctacgaggacatgctcgccgcacaggatctcgacgttcccgacaccgctgacgaattctggaatctgcgcgaagaactgctgcagcaggccaccgaactgctcgccaaggtcgaacgcaaccgggaggcgtccaccgacgccgagtacgcgcagaaggccgcgcgcatgacgcgcgacgacgccgccaaggagctcaagcgcgtcgagcacgtcggctcggcgctgcccgagttcgcgttgctgatgcgcgatcagatctgcgccgcggtcggtgtggacgccgccgagctgccgtatgtcgccgagctgatggacctgcgcgccgaccagacccggtggcgcaccgcggtggagaaggtgctgcgcggcgtcgggctgcggctgatggtgcccgaccagcactggacggcggtgctgcagttcgtcaacgagacgaacatgcggggccggctcgcgctgcaccatgtgcgggcgaagatgctcggcgcggatccggtggagccggagtccaacacgctggcaggcaagctctttgccgtcgaccccgcgcatccgtgcgccgccgaagccgtcgacatcgtcaccgcggcgggcgatcacgcctgcgtcgacacccccgatgtcttcgcccggttccgccgcgcggtcaccgacaccggcctttacaaggactccgaccggctcgcgatcaaggacgaccggcgcccgctcaagcagtcggagtacctgtaccagggtgatgtgacggcgaagatcaacgcgctcaccgtcgacctggccgccgccgaagacgcctatcagaaggcacgccgcaccgccgacgacatcgccgcccagcgccagcaatggcgtgaccgcgcggcggcctgcaaggcgatctgcgagcagttcccgcagtggagccagatcgacaccgagaccgccgacgggcacgccgagcggttgcgcgaacagtacgagttgctgctggccgacaaccccgacatcgaggcgctcaatgcgcgcgccgacgaatgttggtcacagatccagaaattgatgacgcgccgcggcgcgatccagacccgacgcgacgatctggacactcggcgcacccggctcctcgaattggaggagcggctgtcgccggcgttcgtcagcgaaccgctgaccgagctgctgacccgctactccgcgcagctgcccgtcagccttgagctgctcgacccggaaccgttccgcgacgcgctgttcggcgcgatcaagaaggaacgcgagcaactccgcgagagccgcagacggtcctacgacgagctcgcccgcatcctgaacacgttcgacaccgcgttccccgacgcgatcccgaacgactcggagaatttcgacgagcgcgtgcacgactatgtcgcgctgtgccggcacatcgacgagcgcgagctgcccgaggcctacgagcggatgatgcggttggtcaccgagcaggcaccggacgcgatcctgacgctgcaccgcgtggccgagcaggaagcacgccgcatcgccgaacagatcgaacgggtcaacaccggcttgggcgccgtcgagttcaaccgtggcacccggctgacgctgcgtgccacgccgcgcagcctgaccgcggtgtcggagctgaccgagatcgtgcgggccatcagccggcgcatcgccgaggtgggcctgggcgacaagcaggcgatcctggaccagtacgccgacatcctgcgattgcgcaatcggctggcgtcgacggcgccggaggacaaggcgtggacgcgcgacgcgctcgatgtgcgcaaccggttcacgttcgactgcgcggagtgggacgtggcctccgacgagctgatccgcacgcacagcaatgccggcgacaactcgggcggtgagcaggaaaagctgatggcgttctgcctcgccggggcactgagcttcaacctcgcgagccccgaaagccaggacaacaagccggtgttcgcgcagctgatgctcgacgaggcgttctcgaaatcggatccgcagttcgcgcagcaggcgctgcaggccttccgcaagttcggtttccagctggtgatcgtcgcgacggtgcagaacgcgacgacgatccagccctacatcgacagcgtggtgatggtcagcaagaccgaagcgacgggtcgcaacgcgcggccggtggccacggtggcgacgcgttcgatcgcggagttcacggagctgcgtcatcagatgaagcagaaggtgccggcgctggcgcactga

SEQ ID NO: 46288 - DNA, 1446 bp, Mycobacterium chubuense
gtggacgaccacggggggcgatcggccgctgacctgctcgagctgaatcgcgacctgcagagttcgccgactgtccggcttctggccgccaccaacctgagcctgtactcgacgttgatggaccgtcacctgtccggcggggtggtcgccgagaccgagctcgtggtccggctcgagcgtgacctcgccgacctcgaggacgaccagtccgggctagcgctgatcaagtcatgggccagccagggctggctgcatcgcatcgtggacgaacgcaccgaccagaacgtctgctacctgacccaggacgcgcgccgcgcgctggacttcctgcggggcatgcgccgccaggacacgatcgccaccggcgggtcgatcaacggcatcgccggccggctccggcacgtcgcgctcaaggtcggcaacgatcccgcccgcatccgcaagcacctcgagaacgagatcgagacgctgcgccgcgaactcgatcaactggaccgcggtgagcgccgcaccttttcggaacccgacgtcaccgacgcctacgacgaagcccgggcgatcgccctgcagatggaacgcctcatcaccgacatcggccagtacggcatgatgatcgagcaggccaccgccgccctcgacgagccgatcgacagcaacgtggagtaccgcgaccgtcagcggcagatgtacgccgactaccaggcggcgtgggattcgcagggccgcgacagccaccgcgcgttcctgcggatgatcaacgacccagaccagcgcgccgaattcgaggcggacgtcgccgccgtcgccgaggcgctgcctcacctcgatccggcgctgcgcgcggtgatggcggggttcttcgaactcgtcggccaccagatcgacgaggtcgagcgcatccagcagcgctgcgcccagcgggtcaaacggttcaccgcgttcggcaccctggagcagagccgtggtgtggcccgccagctcaacgaggccatcggcgcggcccgcacgctgctcaagacctcgctcaccgattcgcggctggacctcgaactgcccctggcccgccatgcgatcagctccgtcggcgcgctcagcttcaagatcggcgatctgtcgaatcccaagcccgccaaggccgccgacggggaggtcgatctggccagcttcgccgcgctcaccacgcaggtggacgcgcccgcgatgtcggacatgctcaacgccgccgtcgcccgcgggccggtgtcactgcccgacgcggtggccatgctcgataacgcgtacctcggccacgtcatcgtgctgtggtcctgggcgctcaagcagccgaacgacgacaccggcaggtcgacgaccgtccggttccggtccctcgacggccgggaccgcgaaatggcggttcccgagctgtctttcaccgaaccgatcaccgcgggagtggcctcgtga

SEQ ID NO: 46289 - DNA, 687 bp, Mycobacterium chubuense
gtgagcaccgatacagaggccgacttcgccgccttttccgacctaccgcaggtcgaccagagcgcccgccccccgcatcagcgccggccccgattcgacggtgacgtctccgaactgccggaccgggcctgctgggcactgcaacacctgctcacccggcgctacatcagcgccgaatccgacagcgacatctacgcctgggtgctcgaatatcgtcatcagctctcggtgcggctgtccgaactggacctgctgctgcggatcgtcgatggcacggacgtggcgttcgtcgagcaggcccgctacgaatcggccaagggcatcaagcttctgcgccgcgagccgctgggcacctatgactcgatcctcgcgctgcacctggcgcagatgatgcgcgcctcgggtgggcagagcgtgctgatttcccgcgaggagatgcacggactcttctccggtgtgctcaacgacgtcgaccgggacgcggtgacgttcgccggacgcgtcgacgccgcgatcgcgcgcctgaccggtctggagatcctgcggcgcagccgcgacgacgaggacagctacaccatcagcccggtgatcaccgcggtgatgaccgccagcgtgatcagcgaactgcagcagcagttcgagctgttggccaacggcggaacgaccgctgaggagatccaggagtga

SEQ ID NO: 46290 - DNA, 3366 bp, Mycobacterium chubuense
gtgaccgagcagttccacctgtcccggctgcaggtcatcaactggggcgtgttcgacgggtaccactcgatcccgttcagcgagggcggcgctctgatcgccggcgcctcgggcagcggtaaatcctcgctgctggatgccatttcgctgggcttcctaccgttcaaccggcgcaacttcaacgcctcgggcgacaacacggccgccgggtcgagcgcgggccggcgcactgtcgacaagtacgtgcgcggcgcgtggggccagcgcagcgacggcggaaccagccgggtgatgtatctgcgcggcgacgggacggcgtggtcggcggtggccgtcacctatgccagtgactccggacgcaccgtgacgggcctggtgctcaaatggctgaccggtgagtcgcgcaacgactcgtcgagccggttcgtgctcggcgacggcgacctgggcatcgaggacgtctgcaaccgttgggcggcacgacgtttcgacaccggcgtgttcaaggaatacggctggcgattcaccacgaaggtcgaatcgcagtatctggcgcagctgtacgccaccatcggcattcgcgcctccgacgccgcccagcagttgctcggcaaggcgaagtcgctcaagagcgtcggcgggctggagcagttcgtccgcgagttcatgctcgacgagcccgacagcctggcccggctgcccgaggcgctcaagcagatcgacccgctggtcgaggcccgcgaactgctcgcggtggcgcagaagaagcgcaagatcctcggcgacatcgagaagatccagcagcgctacgcctcggagtcgaccgatctgggcatcatcgacctcgtcgacctgccgatggtgcgtgccttcaccgaccatgtccggctcgcgcagtgcccggcgcagatcgcacagctcgacaccaccgtcgaccagctcgacaacgagtacgaggacgtcacccgcgcactgaatctggccaaggcggaagcagattcgctcaacgcgcagatcagcggcaccagtgcgaacatcggcccgctgcagagccaggtgaccgccgccgaggccgaggccgagcaggtgtcgcgccgccgcggcgcctacgaggacatgctcgccgcgcaggacctcgaggtgcccgacaccgccgacgagttctggaacctgcgcgaagacctcctcgcccaggccaccgagctgctggccaaggtcgaacgccaccgcgaggcgtccaccgacgcggagtacgcgcagaaggcggcccgcatcgcgcgtgacgacgccgccaaggaactcaagcgggtggagcacgtggggtcggcgctgcccgagttcgcgctgctgatgcgcgaacagatctgcgccgcagtcggagtcgacgccgccgcgctgccctatgtcgccgagttgatggacctgcggccggaccagacgcggtggcgcaccgcggtggagaaagtgctgcgcggggtggggctgcggctgatggtgcccgaccagcactggacggcggtgctgcagttcgtcaacgagacgaacatgcggggccggttggcgctgcaccacgtgcgggcgaagatgctgggcgccgatccggtggatccggaaccgaacacgttggcaggcaagctgttcgccgtcgatccgacgcatccgtgcgcggccgaggcggtcgacatggtgacggccgccggcgatcacgtgtgcgtcgacacccccgaggtgttcgcgcggttccgccgcgcggtcaccgataccggcctgtacaaggactccgaccggctggcgatcaaggacgaccggcgcccgctcaagcagtcggagtacctgtaccagggcgacgtgtcggcgaagatcaacgcgctgacggtggatctggccgcggccgaggaggcctacaagaaggcgcgccgcatcgccgacgacatcgcagcgcagcgtcagcagtggcgtgaccgggcggcggcgtgcaaggcgatcggcgagcagttcccacagtggagccagatcgacaccgagaccgccgacgggcacgccgaccggttgcgcgagcagtacgagctactgctggccgacaaccccgacatcgaggcgctcaacgcgcgcgccgacgaatgctggtcgcagatccagaaattgatgacccgtcgcggcgcgatccagacccgccgcgacgatctcgacgcccgccggacgcggctgctggagttgtcagaacgcctccagccggcgttcgtgtcggagccgctgaccgagttgttgaaccgctacgccgggcaggtgccggtcgtgctcgagctgctcgaccccgagccgcaccgcgacgcgttgttctccgcgatcaagaaggagcgcgagcagctgcgggagagccggcgccgctcctacgacgaactggcccgcatcctcaacaccttcgacaccgcgttcccggacgcgatcccgaacgactcggacaatttcgatgagcgggtgcacgactacgtcgcactgtgccggcacatcgacgagcgtgaactgcccgaggcctacgagcggatgatgcggctggtcaccgagcaggccccggatgcgatcctgacgctgcaccgggtggccgagcaggaggcgcggcgcatcgccgagcagatcgagcgcgtcaacaccggtctgggcgccgtcgagttcaaccgcggcacccggctgacgctgcgggccaccccgcgcagcctgaccgcggtgtcggagctgacggagatcgtgcgggccatctcgcggcgcatcgccgaggtggggctcggcgacaagcaggcgatcctcgaccagtacgccgacatcctgcggctgcgcaaccggctggcctcgaccgcgcccgaggacaaggcgtggacgcgcgatgcgctggatgtccggaaccggttcacgttcgactgcgcggagtgggacgtcgcgtccgacgagctgatccgcacgcacagcaacgcgggcgacaactccggcggcgagcaggagaagctgatggcgttctgcctggcgggtgcgctgagcttcaacctggccagcccggacagccgtgacaacaggccggtgttcgcgcagctgatgctcgacgaagcgttctccaagtccgatccgcagttcgcccagcaggcgctgcaggcgttccgcaagttcggtttccagctggtgatcgtcgcgacggtgcagaacgcgacgacgatccagccctacatcgacagcgtggttatggtcagcaagaccgaggcgacgggccgtaacgcgcggccggtggcgacggtggccacccggtcgatcgcggagttcaccgagctgcggcaccagatgcgggccgacgcgaaggtccccgcgttggcgcgctga

SEQ ID NO: 46291 - DNA, 1449 bp, haloalkaliphilic bacterium ACht6-1
atgagcttatcctacaatgatattcttcagctctttaagtttcactccgggtggaaacttcttcgtgcagacagcgcaccgctaataatctcctttttaaacaaggcgtttatcgaaccgaatctgcgttcaatcagtcgctcaaacctgatctcaaagctggaggatacgctctatgagcttcgccaaagcgaaaacgaggagtgctatccccggagcgcttccgcataccttgaagattgggctcacgacagcaaggggtggcttcgcaagttctatcccgatgattcagacgagccgcattttgacctcacccctgcaacggagaaagtaatcggatggcttgagagtctttcgggtcgagcgttcataggcacagaatcgagacttatgactattttcgagatactcagacaaatggttttaggcgctgaaaccgatgtggcgaccagaatcgaagcccttgaggcagaaaaaaatcagatagataaacagattgaagcaatcaaaaacggagaggttccggtgcttgatcaaacagcgctcagggaacgtttcatgcagttcagcaccatgtcaaatgatttgcgaagtgatttcagagctgtagaagagaatttccgcaaactggatctgcaggtcagggaaaagattgcatcgtgggagggcagaaaaggtgatcttcttgaagagatatttggtgaacgtgacgtgataaccgattctgaccagggacgaagctttcaggctttctgggattttcttatgtccccatcaagccaggaggagttctcggagctgctccagaaagtgtttgccatggattgtatcagttcatcaaaaccagacaaccggctgaggcgtatccatttcgactggctcgaagcgggtgaaaagacccagcgcaccgttgcaaatctctctgaacagctgcgcagatatcttgataatcaagcctaccttgaaaataagcggataatgagtatccttgacagtatctcacagggagcacttcgtgtaaaacacaacatgcccagaaactccacattcatgaatcttgacaagctttcacccgacatccatctgataatggaacgtccgctgtttaaaccgaatgcagaaatcgacctctcaggggtcatccttgaggcagaagaggcggagtttgattccggtgcacttttcaaccagatctatgtggacagagcagaacttgaagccaacattcgcagagagctccaaactgtatcacaggttaccctgtgcgcactgacagaaaagtatccactgcgaaaggggctggcagagcttgtgtgctatatatctattgcaagtgcaacccacctgagtgttttcgatgaggagtgtgaggagtcaatccgctgggaagacagtgacgggcggttccgcagggcgaccctcccccgtatcattttcaacaggagttaa

SEQ ID NO: 46292 - DNA, 603 bp, haloalkaliphilic bacterium ACht6-1
atgtccgatcagaaagaatctggaaaagcattttccaaagttatgatcaacctgctcaaaggggtcatgtacgcggatgaagacccaaagctctggcagcatcttcttaaccttcaggtaagggtaagggattacgcaagggagatcggattatcgcttgaaatctcagaagatgaggggtttgcctggcttaaaaccattgaagagcagggggagggagaagagttgccacgcctcattagccgacgccagctatcctatccggtcagtctgcttcttgcactcctgagacgccgccttgccgagcatgatgccacaagcagtgacaacagacttatcttaagcaaaggtgatattgttgagatgatcacaacattcctaccctcaggctccaatgaagttaaaatggtaaaccaggtggaatcccacctcaaaaaagtagcggatatgggctttgtccgttttctccgtagcggtaaagataccattgaagtgcgcaggatactgaaagtttttgttgatgcacagtggctcaatgagtttgaccagcggataaaggaatatcttctgtctgcaggcggggaggttaaagaggatgaatga

SEQ ID NO: 46293 - DNA, 3375 bp, haloalkaliphilic bacterium ACht6-1
atgaatgatcagctttcttttagctttgatgacaatgatgctcttgctggattcagactaagccgggctgaagtgtataactggggaacttttcaccaaaaagtgtggacactctctcttgagggtaaaaacggactgcttacaggtgatatcggatccggtaagtcaacactggtggatgcggtcaccactctgcttgttccttcacaccgtattgtgtacaacaaagccgcaggtgcagataccaaagaacgctcattgagatcgtatgtaaacggctactacaaaacagaacgcagtgacggtggtgttggtgccaaacccgttgcactgcgtgaccaaaacagctattcggtgattcttggcgtatttacaaaccccggttatctacagactgttactcttgcgcaggtgttctggcaaaaggatccggcgggccagccaaatcgtttttttatagtcgctgactgtgaactgcaaataaccgaacactttgcaaattttggctccgacataaagaatctgaaaaagagattaaaggcattgcccggggtcgatgatgtatatgatagttttcccccttatgcagcatcatttcgccgccgcttcggaatagaaaacgcacaggccatggagctgtttcatcagactgtatcgatgaaatctgtgggtaaccttacagatttcgtacgtatgcacatgcttgagcctttcgatgttgattcgcgaattgcagcactgatcacacacttcgatgatttaaaccgcgctcataaggccgtgctcaaggccaaatcccagataaacaagcttaaaccaattgtaaacgatctcgacaaacaccaaaaagcatcccacaactgcgaaaactacagagtccttcgtgataccctaaaatcctattttgccaggctcaagagcgatcttctcagtaaaagattgaaaaaactctgcgatgaacatgtgaaactaaatggaaaagttgagcagacaaaggatgatatcacccggatgcagggtgaacgtgatgatctcaggcaggctatagccgacaatggcggagaccgtctggagcgtctcagaaatgagataaaggaacttgagatctccaaagacaaaagattgcaggcctataatcagtacagtacccttgcagaacagctttcgtttgagaagcccttaaaccttgaatctttccttaccaacaggcagtgcattagtgattcgatggacgaaaacgatgcacaggagacaatgcttgagaacagccgccgggaagaggatgtacagatggcacgcctgcgggatgaacacagcaaagtatctgaggaagtggaatcgctgcgcaaaaggcgcagtaacataggttctcatcaggtaagaatcagagatgaactgtgtgcggcccttgatatcagtgaggaagatctgccctttgccggtgaactcctgcaggtaagagcagaagagtgtgattgggaaggatcgatagaacgtgtgcttcacaactttgccatgtcactgcttgttcccgatcgtctctataaagatgtatcatcctgggtggactctacacaccttaagggacgtctggtatatttccgtaccatatcgagaaaaaccaaaagcacggtctcccttcacccggactctttagtcagaaagctatccatcaaacccgacagtgaattttacaactggcttgaagatgagcttgcaaagaggtttgattacgtgtgctgctcttctatcgaacagttccgcaaagagaagatggctcttacggtatccggtcaggtaaagggcagtggaaaccgtcacgaaaaagatgaccggttcaggcttcaggacaggagccgttatgtgcttggttgggataacagggcaaagctaagagctcttgagcaacagaggctaagccttgagaaggagattcaggattgtgcggagggaataagtgaactgcaaagtaagctcaaagagctaaggatccgtaaagagaatctggttcgtctagaatcattcacccgttttgaagagatagactggagaccgctctcagtgcggatcacagagcttgacaaagagcgtcaggagcttgaagaagcatccgatgtgcttaaaaccctgattcacaaacttgagcaactcaaccaaagactccgtgaactcgagtcagtccttgactcctttaaggatgagcgctctaaaaatgaagagaagcagaataacacaaagcagcttcttgagcagtgcacagagatgatggatagtggtgagagtcagcaaagaaatcagcttttcgagcagctcgatactcttcgtgagaaggttttggggaagcatcagctgagcgtggaatcctctgacagacgccagcaggagctccgagagtatcttcagggaagaatcgacagtgaagagaagaagagaagcaacctttctgaaaagatcatacgtgcgatgcaggattatcgccgtgacaatgccgctgaaaccacagatatcgatgccacagtcgagtccggccctgaattccgaacgatgctttcacaacttgaggcagatgatttgccaaaatacgagcaacgtttcaaggaattgctcaatgaaaacaccatcagagagatcgctaatttccagtcccagcttaaccgcgaacgacaggaaatacgggagcgcattgagaggataaatcagtcccttacaggaatagagtacaacaaaggacgttatattgtacttgaagcacaggagaacaccaataccgaggtgcgtgatttcagaatggctctgcgtgcctgtaccgaaggagggctcaccggatcccaaacagatcaatacgctgaggacaaatttctccaggtcaaggagataatcgaccggtttcgcgggcgtgaaggttcaaccgatatggataagcgctggacacagaaagttaccgacgttcgaaactggttcagcttcgcggcttcagagcgctacatggaagacaacagcgagtatgaacactacacagattcgggagggaaatccggaggacaaaaggagaagctggcttatactgttcttgcagcaagccttgcttatcagtttggactggaatggggagagatccgctccagaagttttaggtttgtggtgattgatgaagcgtttgggagaggttcggatgattcagcacgctttggacttgagctgttcaagagacttaacttgcagctgttgattgtcacaccactgcagaagattcatatcattgagccgtatgtggcttctgttggatttgtgtacagtccacagggccgtgaatcgatgctccgcaatttgacaatcgaggagtatgctgcagagaaagaggcctgtgctctgtga

SEQ ID NO: 46294 - DNA, 1215 bp, haloalkaliphilic bacterium ACht6-1
gtgagaaagcagacaaatcagaagtggactacacccggcgaggtcaaaaaattacttttagccagatggaaaaggggtgagtttctaagggaaattatcactccttcactcccctaccccgttgaaatcccacttaaatatccccgcggacaacttctcggagaaaactttggaactgcaagggagtgggctaaactttacagtgcatattcaggctccaaacttccatacagtgtaaaatggagtgagatcaatttcagggagatcggacggaatgaaattcctgtaagtgtacaatttgaaagtctggaaaaaatctcagaatttatagacaaaaaaaaatcactgaatcttttcaggactctctatgaagaacttatctgctcatttccaaaacttaaaccatgggtttacaacaaaccttttatgcttttggaatttgctcccgtaatacacaaacttatcattgtcacagagtggattgtgaatcatcccagacctgcaatctaccttagacaaatctctattcctcaaattgatactaagtttatagaaaaacataagagagttattggagagtggcttgacattctcctggattcatctcaaatagatgaaggatatagcggaacaaggaattttgagctgcgttatgggtttttattcaaacagccactcattcggttcagaattctcgatccagacctttttatagcaggtctcagcgacatggctcttcctgctgatcagttttgcaggttaagggcagatttcgaagatgtgtttataactgaaaacgatatcaacggcctttgcttcccttcacgaaaacggacaatagtgatctttggcagggggtatggttttgattatcttacaaacgccagctggttaaaacaaaagagaatatggtactggggcgatattgacacccacggatttgcaattcttaaccagttcagggtgtttttccctcatacacaatcgtttcttatggatcgtgaaacacttttagcgcataaggattattgggttgaagagaaagctcctgcatgtgcaaagctggagaatcttagaatccaggagactgctctctatgaagatcttgttaagggcaggttggggaaagctgtaagacttgaacaggaactggttaagtttgagtacttgctggaagcactgacaaatacagcaaaaagccaccagccacattga

SEQ ID NO: 46295 - DNA, 1485 bp, Tetrasphaera jenkinsii Ben 74
gtggcgaccggcatagagggcgacttcgctcggatcgaggctgctctgggcactcctacgctcaagctccttgaccgcaagagcgcggtcatcgtgcttccgatcttcgcagcgctgtttccggacaatgcagagcccatgcccgttgagcgtttccacacgagggtggacgccttgctagacgagctgcgcgcatcaggccaccaagtgccgtccagttccggaaaggcgcttgccatgcaatgggtgcgcgagcgatggctgtaccgcgaccccggccagggccaggagacgtaccgtcccaccggcgatgccgaacaggcgatggactacgtgacccgggctacccggacccaacttaacctctcgctctcccggatcgagacgatgcgccgggtcgtcagcgaggccgcgttggcagctcacccggaccgcgaggagcgtctgcgccggctatccgaggagatcgccaggctctctgcggagcacgaccggctcagggctggaggagaactcgcggtcgcgagcgagtccgagctgatcgagcagttcgccaacgtgctgcgcgagctcgatggcttgccgtcggacttccggcgcgtcgaggaggcgatgcgcgagatgcaccgcagcatcgcctcgcgcttccgccaggacgacagtcccatcggcgaggtgctcgacgactacctggagcagtcgagccagttgctgaccgctacgccagagggccgagccttccaaggagccctggagctgctgcgcaatcctgactggctcggcagcctgcgcaccgacctggggaccatcctcgcccacccgatcgccggcatgatgctgcccgacgagaccaagcaactgcgcgggaccgtagccgtgatacgtcggggcatcgaggacgtgaatggccaacagagccggctgaccaccacgctgaccgagcacatcctcaactacgaccacgtccgcaaccgcgagctggacgaggtgctcaagggcatcgacgcctcgatgcgcacctggatgcagactgcgcgcccgcgtgaccacgtcgaggtcgagctgatcccagcccatctggagatcgacgctctcaaactgcgcgtcttcgaccctgacagcgagcgaccacccgagaagctggccgatacctccgacgacgagcccgaagcattgtccttggagtacatccgcaagcagggcggtccctcgctggaggagctgactcggctggttgacgaggctctcgcaaacagcggtgtcatcgaatcagcggctgcactgttcaacgtccagcccgacgagctgcgccggcccgtcgaggttctcggcctgatgcacctgctcgctcgcctcgatgccgcggtcgatgcttcccagcccgagcaggtcgatgccgtgcgcccggacggcagcacacgttcgttcctgatgcccgccacatcactgcaaggcgacacacaacagcaggagcctgcctcatga

SEQ ID NO: 46296 - DNA, 786 bp, Tetrasphaera jenkinsii Ben 74
atgacagaccagtcattcgatcatgacgtcgagcccgacgaccgctacgcagagctcgatgacgatgtgttcgcctcgaactcagaggacgaggaagagcgactgtcgctggcaatgttcgagggtgacacctcgaccctgttcccgcagcagcggctgtgcctgcacgcgctcttgaagcaccggtacatctccgcagatcgccaccccgagcactgggccgtgctcatggaccacgaggggaccatcacctcccggctgcacgacctattcctggatctgcacgtcgaccgtgagcaccagatcgcattcaagcgcgctgcctcctcccacgacgatcagccgctgccgtcgttgctacgcaacgtctcgcacaacaaggaggagacgatcatgatggtctccctgcgccggcgattcttcgcccagcggcaggagggggacgacacggtcttcgtcgaccggcagacgatcctggacgaggtggccgaccagagacctgacgcggcgaccaaccgggccatggaccacaagcgcgcgaacaacgccgtcgatgcgctgctggctgcgggggtactgctgcggaccggtgatcccgaccgattccagatctcgccgatcatcgaggtcctgctgcccatcgagaagctgcgggctctgtggacctggcttctggaccgcagcagcagcgaccgcgaggcggcccacgacggagtggacaacgacaacgacgaggctgcctcgcctgactcgttgttcgactcgggtgacgtggaggccttatga

SEQ ID NO: 46297 - DNA, 3393 bp, Tetrasphaera jenkinsii Ben 74
atgactgccgaactgaccctgccgatcgtcgctccatcgagtgcggcgaaacccagcgatcacgcccaatggcgcatcgagtccatccagatggtgaactggggcggcttccacggggcccaccaggtgcgcgtccaccacggctcgacgctcatgtccggcgcctcgggttccggcaagagcactgtgctcgatgcctacatcgccctgatgatgccttcggacacaccgttcaatggcgcctcgaacgacgcagccggccgggcccgctccgccgagcagcgcaacctactcacgtacctgcgcgggaaaatggacagcgcccgcgtcgacggctcgaacgagttgcgcgaccacgtcctgcgcggagggaacggcgagcacatctggggagccctcgctgcgaccttcctcaacgagaacgggcgccgcttcaccgtggtgcgcatctacttcgtcaaggccggctccacgaccggcggcgacgtcgtcacgtcctacgcaaccttcgatggccacctccacctcgcccagctcgaaccgctggctgcgacccgattcgacaagcgggcgctgcgcagcatcggcctgctccctttcaacacgttccgggagtttgaggacacgctccacacgcgtctgggcatcggcgggggcgacggaggccgcaaggcgatgcgcctactggccagggtccaggcaggcatggaggtcaagcgggtcgacaccctctacaagtccatggtcctggagcagccgatcaccttcgagaaggccgacaacgccatcgagcacttcgccaacctcgacgcgtcgtacaagaagatgctcgacgaggccgacaaggtgaaggcgctgcagcaactgccggacctgcagcacgagctcgcgcaggcggagtcgaccgctgccctcatcgaggcattcggcgtcaaccgtgaaggccccactcccttccaactgtggcgcctgcacaccgagcgcgaactgctcgatggggccgtcgcgacgaacaggagcgagtacgcaacgaccaagactcgcttcgagcaggccagggaagacgaacagcgccacgccgaacggctcaagcagatcgcccaggagaagcgcgccaacggtggcgacgccatagacgcccgcaagcgcgagatcgatatcctcgcggggcaccaggatgccgtgtacgccgccaacctgaagttccaggcaagcaccgagcccatcaacctgctcgtccccgagaactctgctgagttcggtcaggcccaggcagatgccgccgagttcctcgccggcttcgatgcgcgcgcggacgacctgcgcgaccaagaggacgccatccgcgatgacgacctgtcgccactgaccaccaagaagcgagagctgctagaggagaaggcgtccttggccggtcgcgccggcatggttccgcggcgcctacacgaggcccgggtcaagatggcccaagccgctgggctggaccccatgatcgatctccccttcgtcgccgagctgatcgacgtgcgccccgatcaggagcgctggcgcaaggccgtcgagacgaccttgggcgggatcgcacgaacggtgctcgtcgatcggcatgcgcgccagcggctctcggctgccatcgatccgatcaagatcacgccacgtatccgcttccaaggcgtagacctggctgcccacgaggagttcccctgcgacgaggcctatgtctcgggcaagctcgccttcaaggactcgcccttctctgcctgggtccaggacagggtcaccgctcacggcaccgaccaccggtgcgtcgagaacgccagccagctcaacgaccgcgagccgatggtcacccttacggggcagacgcgcgacggcgacaagggcgcccacggcgagtcccacgacggcaacatcatcggcttttccaatgaacggcgcctcacggacatcgaagctgagctcggtgccctcgaacccgcgatcagggccgtgcggggcaggatcgagcagctccgcgctcgttcggccagcctgcagtcccagaaggaggcccacacctacgtcgccaacgccaggtgggccgacatcgatcacctcgggctcgcacgccggatcgaggagctcgaagccgagatcgcgaagctgcgggcggccaactcgatcctcgacgcactccaggccgaggaagaaaaggtcagcctcctgcacaaggaggccaaccgaaccaaggtcctcgacgaggacagactgaccgagctgacaaagcagcacggtgacctcgcctccgagcaggacgccgtgcaggacgccatcgatgcgatcgacgacgcccaatcggctcacgtgaccgatgagcagcagagctatctcgacgagatgttcgccgccaactgggacgtcaccagtctggggtccttccattcgaacatgcgcgccatgggcaagcgactgcgcgatgagagcgcaactgctcggcagagccgcgaccgcaccgtgcgcgccatggagtcgatgttcgagcagtacaaggcgcgctggaccgagaacaacctcggcacgagcatcgcctcggccgacggctatcgcgagatcctcgaccggatccagaccgggggactgcacgagcggcggaacaagtggcgtctggagttcgccaaatggtccagcaacgacctgctcaccctcaacgaggcgttcgacacagcgatggaggacgtcgaggaccggctcgtgccgatcaacgcgatcctggcgacgctgcccttcggcggcaagggtcacctccagatcaaacaccgccggatgatcagcgaggacgtctccaacttcaagcgcgacctgcgcaagctgtcctcgggggttgctctcgaactgaccgacgcggaggtcgagtcgcgcttcaagaggctgcgcgagttcatgaccaagatcagcatcccgcccggtcacaccaagaaatcgacgtcgatgcgcgacggctacctcgacgtccgccagcacgtggtcatcaacgccgtgtgcgtcgaccagcacggccatgagatcgcgacctacgactcgctcggcggcaagtccggcggcgagacccaggagctcgtggccttcatcgtcggcgctgcgctgcgctaccaactgggcgacgagtcgcgcagcaggccccggttcgcgccagtcttcctggacgagggcttcatcaagtccgacagcgagttcgccgggcgtgcggtgacggcctggcagaacctcggcttccaactcatcatcggcgcccctcttgggcaggtcaccgcgctggagccgtacatggatctgctgctcaccgtgaccaagagtcccaagggctactcgttcgtgcgcgagttgagcgatgcgcagcagcagggctcgtcgtga

SEQ ID NO: 46298 - DNA, 1188 bp, Tetrasphaera jenkinsii Ben 74
gtgaagacgcctgcagcggtcaccaaggacatggagcgccggctggtcaaccattggcactcggagatcgtcagcgctacagaaggcgccacgtcggcgttcccgcacgccttcccgctaggccgtgcggccagtgctgacctgcgggccgactacgccgccatccacgcgctgaccgtcacgtggcaggaatgggctaggggccatggcgtcgagctgacctacacgtcgcgcatcgccaagggcggtacacggcaagtagtgcctacccacgtgctgctcacgtcggtcgaccaggccgcaaccatcgtcgggaagggttggcaggagcggttggcacgtgggcgggagcgcctcgcagtgctgctggaccgcagccgtacccttgaccgggccgatgccggcagaatcctgcggctcgtcgacggctacgcagacatcgacttcgcgctgttgctaaaagtcgtcgattggtatcgagctgacccatcgctggcacggggcctgacgcctcggcaggtgccgattcccggcgttcacgccaagtggctgcaggcgcatcgtgcagccgtgctcgcgctcactgggctggacgaccttggcctgttggcgaaccatcctgcgcgaatccacttcacctacctcgatccggatcaccgagccgatggccgcaggctgcacgactcggcgacagtgggcgatacgttcgcaccggcctaccagcccgaggtggtcgtcatctccgagaacaaggacactgccatccacttccctgagctggccggaggcctcattgtggagggcgtcggcagaggaggccgcaccgtggcgtccttcccttggatcagagaagcgcccctggtcgtctactggggcgacatggaccgcgacggctacgagatcctcaacggctaccgcatcgacttcgatcgagacctcgattcgatcttgatgaacgttgcagcgtatgaggagttcgaaccgtacggcacgaaccacgaccagaacggacgtgacctcgtggcgggcgcaccgcgagtggtcgaccacctccgagccgacgagctcgaggtgtacctgcgtctgctgcaccccgagcactctggccaccgccggatcgagcaggagcgcattccgctcaccagagccctgtctgaagtcgaacgcctcgtgagcccgacaaactga

SEQ ID NO: 46299 - DNA, 1449 bp, Pseudarthrobacter siccitolerans
gtgccccgctccgccaggtcatccgctgacgccatcagcgcccggctccgggacctcgaactcctgaccaagggacccgcctgggccctgacgcgctccgcaccctgggtgatcgcggtgctgcaggcatcctttacccgcacccggccgcagctgccgctcgaggaattccatgccgacgtcgactccttccttgaggagctccgccggcaggagcccgggctgggcggcggggccaacggaaaggccttcggcgatgagtggacccggcggcagtttctgacccggcggaaccagtccggccagatcgtttatgaggtcaccgagccggcggcccgcgtgctggcgttcctggacagcctgtccagtgagcggtccacgcttaacggttcccggctgggaacgctgctcggtgacgtggagaagctcgccaacgagaccaacccggaccagagcgcgcgcctcgaggccctggaagaggagatcgaggaacgccagcagctgatccaggacatcagtaccggcgagttcgacggattgctcgatgacgacgaggccgtggaggctgccggaaacatcctggacctcgccgccagcctgcctgctgactacaaaaagatgcgtgaccggatcgaggaactggtgggcgagctgcgcaaccagatcatcgaggagtcactgaccaagggcgccaccatggcccaggtcctggaagcggacaagcggctccggcaaagccccgaaggcaggaccttccgttccttcaccgcattcctggaggacccgcagcagcagctgcggttccgctcggccatcggggaggtcctcagccggcagttcgcggacgacctttcgccggaggaccgcgaaaccctgaagaacctggtggccgaactccggcagcagcacagccagatccaacggatctacggcaagctcagcgaaagcctcaacacctacatccaaagcgacgacttccgccagtcagtccggctccggcaggtattgcgggaagccgagcaggccatccggtcactttcgtacgagcgggaacgcccggccctggtgcgcgggcccgtcctctttaacgcgggctttgagtcgctgtccatggtgaagctctttgatccggacgagttcgcggctccgcccaaactggctgaccccatcgccttcagcgattccgaccgcgtgcgctcgccgaggaccggcaaggccaagcccgaggtggtgcggtcggccatggccggcgcatccaccctttcggaggcgtggcagcagctgccgccggaggagcagcacatcaacaccatccgggcgctcctctcgcacgccctgcatgacggcgccgccttcaacacccaagcggtggacgccctggacttcgaacagattgacggcaccacgcgcagggcctacctgccgctggtcaccctcccgaaggattga

SEQ ID NO: 46300 - DNA, 1020 bp, Pseudarthrobacter siccitolerans
atgactgaagacacgacgacggccgccccggtggttgagcccgtcgaaacccggcaggatcccttttcggtaactccccgcgacaccttcgtggatggtgccgcgctgttccccggcgatacgggcgtcctctccatgaaggtgcggcaggccctggtgaaactcctcaagggcccctacgtggacggcggccgcgacgaaaaactgtggacggtcctgcttgatcaccaggtcatcctccgcagccgtctctccgagctgttcctcaccatgcagctggaccacgaacggaagatcgccgtgctgcgcccggttgatccggacgccatcggaggcagtgcccgctccagcatcctccggcagcagcgcgcgctcagccgggtggagaccatcgtgctgttacggatgcgcctgctcctggaccggcacgtcaccgcccagacggatcccaccatcacgcgtgaagaaatcgccgatctggtcacccactaccaacccgcgggccaacaggacgcgctccgcgattccgacgtggtcaaccgggccatcaccaagctcctggcccgccaactcctcctccccacgggcctggacgacgtctacaccatctccaacgccctgcccctggccctccccttcgaaaacatcggcgatatccccgcccaaatcgaagcgctggcagcagcaaccaccgaccccaccggtaccgaagcgctgatagaactcgacgccgacccggtggttgagcctgtcgagaccgaggacgacgacgccgatgccgcccccgccccttcgccgggcggcattcgtcctgcggacgatgcgcccggctccgacaggcccgatgccactcccggggcggcatcggcatcgtctcccttgggtgcggaggtgccgggcacgagcggtgacaccggggacatgcggcagcgtgcgtctaagcgaggaacgagcgagcacgccgagcatgtgtccggtggcgtcgcgaacggaaccaccacacaggaggcagccaagtga

SEQ ID NO: 46301 - DNA, 3465 bp, Pseudarthrobacter siccitolerans
atgttgccgatcggcgacgtgacgaaccctggccagatgcgccttgccctggtgcaggtggtcaactggggcacgttccatggggcgcacacaatgcacgtggaccggaacggtacgctgctgacgggcaactcgggtgtgggcaagtcgacgctgttcgatgcgatgctgcgggtcttcgatgcccggccgaggtccaacgaggcggctgcccagcggtcgggcggtgcggtggaggacaagcgcaccacgtttacgtacatgcgcggcaaggtgggcgacaaggccgtgggtgagggctcggcgagtgctttccagcggccgggcgccacgtggtctgccgtcgcactgacctttgataacgctgccggcacccgggtaaccatctcggcgctgttcgacctgccgaagaacggtacggagtcgagcgtggggcggttctacgtgatcgaccatgctccgctggatctcgaagcgctggaaggcatcgcggacaaacggttcaccaaggctgccctggagacgatcttcccggacgcccaggtcttcgacgtgcacaaggccttcgcagagcgcttccgccggctgctgggcatcaactcggaccaggccctgccgctcctgcgggtcatccaggcgggcaagggcctgggcggcagcgtgaacacgttcttccgggaccaggtcctggacgcccccgcaacccttgccgcggccgacgacgtggtcgaggagttcagcaacctgatgtccatccggcagcggctggaggacgtccggcagcagcgcgaccagctggccccggtgccgggcctgaaccgggaatacgcacagtcgctgctggacgcgaaccggctgcgggacctggcgggcgaggaattcgaggcctacaagcagaaactggccgtcacggtccaccagaaaaccctggcgcgcttcaaggagctggcgcaggcgaaggccaaggaactcggcgccgagcgaagcgtccgggacggcttggccaaggaactgcgccagctggagacggaatacaacaaccagggcggcaacgccatctccgccatcgagcagtcgctggaaaacgcgcgggtgggcctgaagctccgccagcaggtggaggaagcggcccgccaggcattggccgacgccgggctgcagctcgagtggacggaggcaggctgggagcaggcgcatgagcaggctgccgcccggtccgcggagctcaaggatgactcccaggccctgcaggagctccgctttgaagccttcgacgcccacgcaaccaggaagcgggagctggccgcggctgagcaggagctcgtgtcgctgaagacgcgcaaatccctgctgccgccgtcgagcattgaaaaccgcgcggccatcgcggccgccaccagcattccggaggaccggatgcccttcgccggcgaactgatggacctcgccgaggggcaggagaaatggcgccccgccgccgagcgcgccctccggaacctcgccaccaccctgctggttcccggcgagcatttcgccgccgtgacccgttacctgaacgaccacaacgtccgcggcgcgctgcgggcggtggacgtttccaagccgcttgccggcggtgccctggccctggaggacgtgcacgacggcgacctgctgaccaagctggacatcctcaccacgggcgtcgccgccgaagccggggcatggatccgtgagcgcatcgcactggactttgcctacccctgcgtggaagatccggacgaactcgcgcggctggaccgcggcctgagcctgggcggcgtggtgaagcgcaaccgccacaccgtggagaaggacgaccggttcaccagccggcaggattacgtcctcgggttcgacaatgccgccaagctggaactcgtggccggacaggtggaggacctccgccaggacgtggccaaagcggcagagctcgcccaaagccgcgaggattcgcaccagggcatgagccggcagctcgatgcgctgcgccggatcgccgaggaccaccgcccctgggaacaggtttctgctgccgtcgcggccgatgagctggcccggatcgagcagcggctgaaggatgccctggccgcgcaggccgaccttgagccgctccgcgcaaccatcgaaggcgtgcggcagaaacaccagtccagcactgaggcggctgccgtcctccagagtgaatacaaggcgctggaccggcaacttaccgctgccgataccctgctggaagctgcgcgggaacgcctcacccaggctccgccgtcggacaccactgtcaccgcgctggaaccgtacttcgccgatttcggcgacgtcagcgagatgcacgagctggacaacctcgccaaccgggtccggaccgcgctcctgggcgagctgcacaccgcggagtcccgcgggcaggccaccgccgagcggcttacccggattttcgagggtttcgtgcgcgagtggggcagcgcgatttctgctgaccacggcaccaccatcggtgccgccagcgagttcgagacgcgctaccacgccatcgtcagcgacggcctgcccgcgcaggaggccgaattccggcagttcttcaaccagcgcacgcacgaatccttcagcacgctgctccacctgctcgacgaggaacgccggtccatcaccagccgcatccttcccctgaacgggatcctgtcccaggtcaacttccacgagggcagctacctggagctggacatcaagcagaccctgccgcccacggccaagcagttcaaggacgccatccagaacgcccttaaggcccgccatacccggccggccagggcagaaggcgcccggacggacggcagcagtggggcaggggatgacgatgccgagctcaccgcccgctacaagtccctggaaaccctggttaagcggctcggttcgcaggcgccggaggacaggcgctggcgggccgaggtgctggacgtccgcggccacctgcttatccagtgcaaagaacaccgcgaggtggccgggccgtcctcgggcaaaaagggcggcgccaaaaagaccgaagtctttatgcacgcggacaccggatccatgtccggcggcgagcgccagcgcttcacggccttcatcatggccgccgcgctgagttaccaactgggcatcgccgagcagggcttcaccacgtacggcacggtgatgatggacgaggcctttgtgctggcgtcggaggagttcgccggcgccgggatcaaggcgctgcacgagttcgggttccagctgctgctggccgccccggagaacgtgattgacctgtcccggcacctgggctcagtgaccgagatcctccgcgacaggcgcaccaaccgctctggagttctgaccgcacccgttatcaagcggcgcgcgggcgaagagggaacctggcgctcggaagcgaacccggtggacatcattttgcgctag

SEQ ID NO: 46302 - DNA, 1476 bp, Mycobacterium nonchromogenicum; identical to SEQ ID NO: 43807

SEQ ID NO: 46303 - DNA, 765 bp, Mycobacterium nonchromogenicum; identical to SEQ ID NO: 43244

SEQ ID NO: 46304 - DNA, 3363 bp, Mycobacterium nonchromogenicum; identical to SEQ ID NO: 43245

SEQ ID NO: 46305 - DNA, 1476 bp, Mycobacterium fortuitum subsp. fortuitum DSM 46621 = ATCC 6841; identical to SEQ ID NO: 43807

SEQ ID NO: 46306 - DNA, 765 bp, Mycobacterium fortuitum subsp. fortuitum DSM 46621 = ATCC 6841; identical to SEQ ID NO: 43244

SEQ ID NO: 46307 - DNA, 3363 bp, Mycobacterium fortuitum subsp. fortuitum DSM 46621 = ATCC 6841; identical to SEQ ID NO: 43245

SEQ ID NO: 46308 - DNA, 1461 bp, Mycobacterium abscessus UC22; identical to SEQ ID NO: 44403

SEQ ID NO: 46309 - DNA, 750 bp, Mycobacterium abscessus UC22; identical to SEQ ID NO: 41998

SEQ ID NO: 46310 - DNA, 3348 bp, Mycobacterium abscessus UC22
atgacgacgagtgatgcagcgacacaacagttctggttgtcccggctgcaggtcatcaactggggcgtcttcgacggctatcacagcatcgagttcagccgtcgcggtacgctgatcaccggctcctccggtagcggtaaatcatctctactggatgcgatctcgctggcattcttgtcttcgaaccgccgtaacttcaacgcttcgagcgacaccaccgccgcgggttccagcatgggcaagcgtaccgtcgacaagtatgtgcggggcttgtggggagagctgaaaaacccgggggagcgccccaagcagatgttcctgcgcggcaagggtggggcctggtcggctatcgccgtcacctactccggcaccgacggtcgggtgatcaccggcctggtactcaagtggcttgccccgggctcggactcggactcgtccagccgctactacctgatcgacgcggacgccgacatccgtgatctctgcaatgcatgggccagcaagggatacgccggctcggtattcgagggcgcgggttggcgcggccacaagagcgaacgctggtacctggaacagctatacgccgccgtcggtattcagggttcctctgccgcgcagcagctgctgggcaaggccaagtcgctcaagagtgtcggcggcctggagcagttcgtacgcgagtacatgctcgatgaaccggagtcgatggcagcgatatccgaagcgctagggcagatcacaccattggtcgacgcccgtgccgccttggcgatcgcgcagcgccagcggcagacgctgggcgatatcgaacagatccaacagacgtatgccagcgatgcggcgcagttggccaccgtggacgtcgtggaccatcacaccgtgcgcgactacgtggatcagcagcgcctggcgctggcgggcccggagatcgatctgctggataccgagatcacccggctgggcggtgagtgtgacgaaatccagtcgcgccaggacattctcacgggagagcgggacaaattgctcggccggatcgccgctgccgacagcaatctggcaccactcaaaagcgagctggctcatgctcgtgcccgcgcagaagaggtgtcgcgccggcgtacggcctacgacagtgcattgtgggacctgggtcatgaagacgatatcgaatctgccgaggaattcgaggccatgcgggtggagagcctgcgggcagtcacccggatcaacgctgagctcgaagccggccacgatgcatatgtcatggccgcgggtgcgctctcgacggcacgtgaccagctgcgtgccgcatccgccgaattcaagcgggtcgagcacctgggtaccccggtgccaccggatgaggaccgcatgcgcggggagatcgcggcggcgcttgggcttaccgccaaggacctgccctacgtgtgcgaactgatggatttgcgcccagggcaggaacggtggcgcaaatctgtggagaaggtgttgcgctccaccgggctctgcctgctggtgcccgatcagcaccaccgtcaggtgctgcgttacgtcaacgagaacccgatgcgtggctacctgcagatggagcgggtgattccctccggtaccccgcggcgcgccgagccgggcacgctcgccgactgtttgcgcctgaccaaccccaaccacgaatgcgccagtgccgccatgaatctggtggccggtgtcggcgactacgtgttggtcgacagccccgacgaattcagcaagcaccgccgggcggtcacagatcagggactccgcaaggacggtgaccggcgcgcggtcaaggacgatcggcgtgaattgcgggcctcccagtacatctatcagggcaacgccggtgacaagcgcgccgcgctttccgacgatgtggtcgaagcgcagcaggcggtcagtgatgccgaaaagttcattggcgaaatggacaccaagcgcgaagagctgcgttcggaggtggtgcggtggtccaagctgcacagccagtacgagtattggagccagattgatacggactcggccgaagctgccgtggcgcgtctgcaggaccagtacgacgcgatgctggaagccaaccccgacctgaccggattgcagcagcaggccgactcctacctcgacgagatcaagaggctctccgaacgcatcggagcattgcgcaagcaagaatccgagcatgattcgcgccggacccggctgctggatctgctggacaacctgagcccgcgtgaggtgggtgggcacacccgatcgggaatcgaggcctacgtgccccaactctcgtccagcctggatgtgttggaacccgatgcctaccgactggagctgtggcggcagatcgagaaggatcagtcggtgctgcgtgagagcgtcacccgctcacgtaacgagctgaaccggattctcaacgcgtacgaccgggacttccccgactctatccccaacgacagtgagaacttcgacgagaagatccacgactatgtcgcgctctgccgccggatcgatgaacgcgacctgcccgctgcctacgaacggatgctgcggctgatcaccgagcaggcgcccactgccgtgttgcggctgcaccagctcgccgaggaggaggcacaccgcatcaccgaccagatcgaccgtgtcaatagcggtttgggttcggtcgagttcaaccggggtacccggctgaccctgcgtgccgagccgaaggcgctcgaagcggtcggcgagctcaacgagcgtgcccggcggatatccgggcgtgccgtcgccgtttcgatgggggacgagaaggccatccacgatcagtaccaggacatcctgcaactgcgtaacctgttggccgctgagacacctgaggcgcgccagtggacgcgcgacgcgttggatgtgcgtaaccgcttcgtgttgtactgcgaggagcgcgatgccaggaccggcgaaccgatccgtacctacagcaacgcgggtgcgaattccggtggagaacaagagaagttgatggcgttctgcctcgccggcgcgctgagcttcaacctggctaacccggagacgggggacaaccggccggtcttcgcgcagcttatgctcgacgaggcgttctcgaaatcggatccgcagttcgcccagcaggcgctgtccgcgttccgcaagttcggattccagctggtgatcgtggccaccgtgcagaacaccaccaccatccagccctatatcgacagcgtggtgatggtgtccaagccggacggcccgggggtgcgtccggttgcttcgacgcgcacggtgccgatcggtgagctcggtgacgtacgcaaggccgtgagcgcccgctag

SEQ ID NO: 46311 - DNA, 1470 bp, Stenotrophomonas maltophilia
atgaagcatcgcgaacgcatctcccgttaccgccatctgcgcgaacagccccagtggaagctgctcgccgccgaccacgctccggaaatcatcggcctgctgcaggggctgctgatggacggcgagcgcacgctgtcctcgtcggtgctcaacgagcgcctgcaacgcgcgctggaccagctcaacggcgatgaactgtcgcgcgacctgccgcgtaccgcgcaggcctacatcgcgcactggctggcccagggctggctggaacgccgcctgcccgagggcgccgaccaggagcagtacgaactgtcgaccgcggcgctgcaggcgatccgcttcgcagatggcctcgagcaggcccgcgtggccgccaccgaaagccgcctggcgctggtcatcgaacagctctcgcagctggcagcgcagaccgagtcggacccggatgcacgcctgtcggcgctgcgcgacgagcgcgaccgcatcgacgccgagatcgcccgcgttggtgccggccgtgtgatcgcgctggatggcaagcgcgcgctggaacgtgcgcgccagatcatcggcctggccgacgagctgaccgaggacttccgccgcgtgcgcgacgacttcgagcagctcaaccgcgatttccgcgaacgcatcatcgacgatgagggcgagcgcggcgacgtgctgtcgcagctgttcgaaggcgtggacgtgatcggcgagagcgatgccggccgcagcttccaggcgttctggcgactgctcaacgacgccgaacagagcgcccagctcgatgctgcgctggaagcggtgctggcgcgtggcttcgcccgccgcctggaccgcaacgaacgcaacttcctgcgcggcttcaccagcaccatgctcgagcgcggtggccaggtgcacgacgtgctgcagaacttcgcgcgcagcctgcgcggcttcgtgcagagccgtggctacctggaacagcgccgcctcaaccagctgctgaagcaggcgcagtccgaagcgctggcgctgcgcgacgagttccccgcacagcgcggcatcggccgtgacctgcagctgaccaccagccgcctgcgttcgtggtcgcagtggaagctgcacgatccacgcagtgcccaggtcgatggcaacgtcgagtacaacgacgcggccgcgatcagcctggagagcgtcggcgacctggtcgcttcgtccgaaatcgacttccgcaccctgcgccgcgacctgcacgacctgctcgatgcacagccgcggctcagcatcgcccaggccctgtcgcagcgcgaggcgccgcagggtcttggcagcgtcatcggctacctgtcgctgggcacgcgcttcggcaacgtggtcgccggcgagcaggagcttgcgcaatggcgtggtggcgacggccaggtccgtcgcgcccgcatcccgctggtttggttcacccaggagagacgccatgagctggcatga

SEQ ID NO: 46312 - DNA, 702 bp, Stenotrophomonas maltophilia
atgagctggcatgaagatcccatcgacgcaccgctggccgacgtggcggaagacgcctacgaggccgagccggtggcgaccgtggcgcagccccgccgtggcaacgacgtgtattacctgggcgataccgggcgcctgccgctggatgcgcgccgcgcgctgtgccagctgctgatcggccccagcatcgaccagctgcgccacgccaagctgtggccggcgctgatccgcagcgaggcggccatccgttcgtcactggcggacctgttcctggaactggtgctcgaccgcgacagcggcgtggccttcacccgccaggccgacacggaagacgttgatgcgccggtgctgctgcgtacctcgccgctgaccttcatcgattcggtgctgctgctgtacctgcgccagcagctggccgaggccgatgcgcgcggcaaccgtgcggtggtcgccgacgccgagatggccgaagcgctggccatctacgagaagaacctgtccaccgaccgcgccggcttcaaccgccgcgtcgcttcggcggtgcagaagatgaaggacaaccacatcctgacccgcctcagcggccaggaagaccgccacgaagtctcgccggcgctgaagctgctgttctccgccgaagacgtgtcccagctttcggcggtctaccgccagctgcgcgaaaccccggccgccgaggcctga

SEQ ID NO: 46313 - DNA, 3381 bp, Stenotrophomonas maltophilia
atggctatctccaagcacactcccgccctgttcaacgaaggcctgccggacccgcgcctgcagcagttccgcatgcgccgcctgcaggtgcacaactggggcaccttcaacggcctgaccgaagtaccgatcgccgagcgcggcttcctgttcgtcggccgttccggctcgggcaagtcgaccctgctcgatgccatgtccgcgctgctgacgccgccggccatcgtcgacttcaatgccgccgcgcgtgaagccgagcgcagtggccgcgaccgcaacctggtgtcctatgtgcgtggcgcatgggccgaccagcaggacagcggcaccggcgaaatcgccacccagtacctgcgcaagggcgcgacctggaccgcactggtgctggagtaccgcgccggcgatggccgcgtggtcagcctggtgcgcctgttgtggatctccggcaacggcacctcggccggcgacgtgcgcaagcactacatgatcgccgagcgcccgttcgacatcgccaaggacctcggcggcttcgatctggacctgcgcaagctcaagcagaagctgtccgacctgcaccacttcgacaccttctccggctacgccgagcgcttccgcgacctgctcggcatcgacaacgaaatggcactgcgcctgctgcacaagacgcagtcggcgaaaaacctgggcgacctcaacgtcttcctgcgcgacttcatgctcgacacgccgaagaccttcgacgccgccgagcgcctggtcagcgacttcgccgaactcgatggcgcgcaccaggccgtggtcaccgcacgccgccaggtggaaaccctgttgccggcacgcgcctactacaacgatctgaaggaaatgcaccgccagcgcggtgacgacgaagcgctgaagctcggcgtcgacagcttccgcgaaagccgccgccaggcgctgatcgaagcgcgcctgcgcgagatggatgtgcgtgaccgtggcctgcttggcgaagaagcccagcgtcgcgccgcattggacaaccacaccgagcgcctggccgaactggaactgcagcgccgccagcagggcggtgaacgcatcgaggaactggaacgcgagcagggccgcgccgaagccgagcgcgaccgccgcaaggccaagcgtgaccaggcccaggaagcggcacagcagctgcaggccgaactgcccgacgacgcccatggcttcgccgagctggtcgagcgtgcgcagaacgaactgcaggaccgccagcgtgcctcggctgcactggacgacgcgatcagcgatcgcctcggcggcaagcgcgatgacgagcgccgcttcggtgaagtgcgcagcgaactcgaagcgatgcagcgcaccccctccaacatcccggcgccgatgcagaagctgcgcgcgcgcctggccgaggaaaccggcatcgccgaagcggcactgccgttcgttggcgagctgatccaggtccgctcggaagagcagggctggcagggtgccatcgagcgtgtgctgggtggcttcgcgctgtcgctgctggtcgatgacaagcactacaacgacgtcgccgagtgggtgaaccgtacccacctgggcatgcgcttcacctactaccgtgtgcgccgcaacgatgatgcattcgcgcgcgagccgtcggcgaagtcgctgctgcacaagctggagctgcgcgagcacgtgttcgaaagctggctgcgccgcgagctcggcaagcgcttcgactacgagtgcgtggatgccaagcagctgcgcaacgtcgaccgcggcatcacccgcgaaggccaggtcaagcatccgggcgaccgtttcgagaaggacgaccgcagtgcggtgggcgaccgtcgtcgctggatcctcggcttcaacaaccacgacaaggtgggcgccttcgagcgcgaagcacaggaactggccaagcgcatcgccagctgcgagaccgacatcgcacgcctgcgcggccagcgcgaccgcgacaatgagcgccgcctggcctgccacgagctggtcagcatcagctggaacgagatcgacatcgctgccccgcagcagcgcctgagcgatatcgaagcgactctgcgcgacctgcgtgaaggcaacgccgacctcgccaagctggccaagcagatcgacgccgtgcgcgcggatatcgaacaatcccgccgcacctatgaagacgtccgtgtcgagcgtggccagctggtcaaggaacgtgatcgcctcgaccgcgcccgccagcagagccgtgcgctggtgctgccgagcctggcccaggagcaggaagccgggctggccgagcgcctgcaggagcagggcccgctcagcctggaaacgctggaagcgcacatgcgccaggtcagcaacgcgttgaatgagcagctgtcgtcctcgcagcaggacctcaaccgcatcgagaaccagctgatcggctgcttccgtcgcttcatccagcagtggccggaggaatcgggggacttcaccgtatcggtggcctcggccgaggacttccttgcccgcctcgaacgcctggagcgcgacggcctgccgcagcacgaagagcgcttcttcgatctgctgcagaaccagagcaagaacaacctgctggccctgcagcgccacagtgcagaggcccgcaagtcgatcggccagcgcctggatgaagtgaacgccagcctggagcaggtgccgttcaaccgtggcacgctgctgaccatcgaactgagcgaccgccgtctgccggaagtcggtgagttccacctgcagctgcgcgaggtgctgtcgcagcagcagaccgagcagcgcgagctggccgaatcgcagttcaccgtgctgcgccagctggtcaaccgcctgggttcgcaggaaggcgaggacaagcgctggcgcgaactggtgctggacgtgcgcatgcacgtggagttcatcggcgtcgagctggatgcggaaacgcgccagcaggtcgagatctaccgcagcggtgccggcaagtccggtggccagcgccagaagctggccaccacctgcctggccgcggcactgcgctaccagctcggcggcgccgacagccagctgcccagctacgccgcggtcgtgctcgacgaagccttcgacaaggccgacaacgagttcaccgcactggcgatgaacatcttcgacaacttcggcttccagatggtggtcgccactccgctgaagtcggtgatgacgctggagccgttcatcggtggcgcctgcttcgtcgaaatcagcggccgccacgactccggcgtgctgctgatcgagtacgacgaagaaggcaagcgcctgaagctgcccgagcgcagccgccagcaggccaacgaaccggaagaagcggaggcctga

SEQ ID NO: 46314 - DNA, 1476 bp, Mycobacterium conceptionense
atgcctgaaccgggtatgagcggcccctcgctggaccagctctaccagctcaatcgcgaggtcgccgactcgcgttcggcccggctgctggtgacgaacaacctggccacctatctcacgctgatggaacgccacctggaccgcggcgccaagctcaccgagatggaactcgtggtccggctggaacgtgatctggccgacctgggcaccgaaaccgagcagtccggcctggcgctgatcaagtactgggccagccagggctggctgcatcggatcaccgagcagtccggcgataccgaacgcaacgtctgctacctcacctacgaggcacgggccgtcctggatttcgcccgccgaatgcgtcgggaggacaccctcgccaccggcggctcgatcacgggcatcgcggctgggttgcgccgggtggcgggtcaggtcagcaacgatccggaacgcatccgggctgacatcgaagccgaaatcgccaagctccgcgacgaattggatgccctggaccaagggcagcgtcccgagccggacctggtggacgtcgaggacgaggcgcgcgccatcgcgttgcagatggaacagatcatctccgacatcggccagtacggcagcatgctcaaccgcatcaccacccgcctgctggatgcctccgccgacaccgatctcgggtaccgagagcggcagcgccagttgttcgacgactacgagtcactgttcgcctcccgtgagagcgcgtcgtacaccgccttcacccggatgattcaggaccccgagcagcgggcggcgttggtggccgacatcgacgcggtcacccgtgagctcccacatctggacccgggcctgcgtgaggtgatgacgggtttcttcagcctggtgtcagcgcagaccgcagaggtcggccggacgcggcagcgttgcgcccgtcgcatcaaacgcttcgtcgcctccggaaccctggagcacagccgcggcgtcacccgccagctcaacgatgccttggccagtgcgcacgacttgctcagcgtctccctggccgacagccgcatcggtatcgaggtgccgttggtgcgcaccgacttcaattcgatcggcgccgtggcgttcaagatccgtgacgcgatcccgccgtcgcaggccgagccgtcggaaggtgaggtgaatctgtcggcgttctcggccctggcctcgcaggtggatgccgccgaactggctcagctggtcaacggtgccctcgctcgggggccgttgccgctgcccgatgcgatcggcatgctggactcggcctacctcgggcatgtgatcgtgctgtggtcctgggcgctcaagcaacaacctgctgacggagccgaatccgggcattcggtgcgggtgcggttccggtcattggagggcgccgaccgcgaaatcgaaattccccgactggttttcaccgaaccgatccctactgtcagcgagagcctgctatga

SEQ ID NO: 46315 - DNA, 756 bp, Mycobacterium conceptionense
atgaccgacaacccggacccgtcgcccgtcaaagacggggtgatcgatttcgacgccctgccgagcatcgacgccgtcgagcggtccaccgaccagcggcgtgcaccccgcttcgacggggatgtcagcgaactgcccgaccgcgcctgctgggccttgcagcacctgttgtcgcgccgctacatcagcaaggacaaccactccgagctgtggtcctgggtcacccgctaccgcgccgagctcaccgtccggttgtcggaactcgatatgcgactgtgcatctcggacgatcacgacatcgcctacgtcgagcaggccgactacgaatcgcagtggcggcgccgcctgctgcggcgtgagaccctcaatacctacgactcgatcctggcgctgcacctggccaagctcatgcgcgccgcggcgcgcgacgagaacgtcttgatcagccgtgacgagatccacgagctgttcgccggggtgaacaacgacaccgatcgcgacaccgcctcgttcgacaagcggatcgacaacgcgatcgagcggctcaccgacatcgagatgctcgcgcgcaaccgggaggacgaggacagtttcaccatcagcccggtggtcaacgcgatcatgacggcatcgatgatcaccgaattgcagcagcagttcgagcagctcaagcgggccgcgaacggcactgtcgatgatcccgacgaccccgatgtatctgaccggctctccgacgatgtggacgctcatggctga

SEQ ID NO: 46316 - DNA, 3417 bp, Mycobacterium conceptionense
atgatcccgacgaccccgatgtatctgaccggctctccgacgatgtggacgctcatggctgaaccgaccaaccagttctctctgtcgcgcctgcaggtgatcaactggggcgtgttcgacgggtatcactcgatcccgttcagtccgcacggcaccctgatcaccggctcctcgggtagcggtaagtcctcactgctggatgcgatctcgctggctttcctgccgtcgcaccgccgcaacttcaacgcttcgggcgataccaccgcggcgggctcgggcaccggcaagcgcacggtggacaagtacgtccgcggcgcgtggggcgagcgccgcgagggcaccagccgccagatcatgtacctgcgcgggacgggtccggcctggtcggcggtcgcggtcacctacagcgatcgcaccgggcgctcggtcaccggtttggtactcaaatggcttgccgccgagaaaaattcggatccgggcagccgctactacctgatcgacgccgaccgtgacatcttcgggctgtgcaaccggtgggcggccaacgggtatgacgccgcggtgttccgcgatgacggttggaccggtgggcgcagtgagagccagtacctggcccagctgtactccagcatcggcatccgtgcctccgacgctgcccagcagctgctcggcaaggcgaaatccctcaaaagtgtcggcggtctggagcaattcgtccgggaattcatgctcgacgagccggccagcctcagcggcgtggaggaagcactcgaacagatcaacccgctggtcgaggcccgcggcttgctcgacgtggctcggcgtaagcgcaacaccctgggcaacatcgccgcggtgcaagcacgttacgccgacgaggcggccaagttcggggtgatcgacaccatcgacaacgcgatgatccgcgattacgtcgaccatgtgcggctggctcaggccggtccggagatcgccaatctcgacgatcagatcacccaactcggcgcccagcgtgatgagttcggcacccagcagcgtcagctgaagaatgagcacaattccctcatggcccagatcaacacggtcaccgtggatctggtaccgctgcagcaacggctgaccgaggccgagcggatcagcgaggaggtgtcgcgccgacgcagcgcctacgaggacaaggtcacgtcgctgggcctgaccccgccggacaacggtgaggagttctggtcgctgcgtgagactttgatggaggaagccgaccggctgcaccgcgagctgttcaccggcaaccagccctacgtcgaggcctcggccaaggaagtccgggcccgcgaggcgcgggagagtgtggaggccgagctggaacgcgtgcagcggctcggctcgccgctgcccaagaccgagtacgagatgcgggcccgcatcgcccgcgccctcgacatctccgaacgcgatctggtgtacgtcgccgagttgatggagctcaagcccgacgagacgcggtggcggctggccgtcgaaaaggtgttgcgcggtgcgggactgcgcttgctggtgcccgatgcctacatggagcgagcgttgcgcttcgtcaacgagaacgacatgcgcggccggatccagttgcagcacgtccagcacggcgcgcagctgcgtacccccgccccgggcacgctggccaccaaacttcagctggccgacccgacacacgacagcgcggtggaggcactcaacgtggtagccgctgtcggcgattacgtgtgtgtcgacgggcccggggagttcaccgagcaatcccgtgcggtcaccgaccagggtctgcgcaaagacagcggtcggctctcgatcaaggatgaccgctcgaggctgcgaccgtcggactacatcttcctcggcggcaccgccgccaaagtcgaagcgctgcaggatgatctggcggccgcgcacgatgtgtaccaggtggcccgtaccgcgcgtgaacggctcgacgaacaccgcggtcagctgcaatcgcgggagcgggcctgccgggcgctgtgcgatcagtacatgcagtggagcgacatcgacaccgattcggtcgatgagatgctcgagcggctgcaggacgaacacgatctgctggtctctgacaacccggacgccgaacggctgcaacagcgggccgacgaatgctgggagcgggtggagaaggtcatccagcagatcggctcgctcaacgaacgtgagaccgcgctggatcgccggcgcaccgcgttgctggagctgagcgaggccttgaccgagcggctcgggtccagtgagttcccgtcgcatgcccgcgacacgatcgacggatatgccgccgacatcgcgctgaccctggaattgctcgaacctgagccgtaccgaaacgagctgatccgggtcatcagccgggagcgggatcggctgcgggcggatcgcaaccgctcgcacgacgagctggccggcatcatggccgcctacgacagctcgttcccggatgcgatccccaacgacagcgatgtcttcgacgagcgggtgcacgactatgtggcgctgtgccgtcggatcgacgagcgggaactgcccgacgcctatgagcggatgcagcggctgatcaccgagcaggcgccgggcgcgatcctgaacctgcacatgatcgccgacaacgaggcccggcggatcaccgagcagatcgcccgggtgaacacgggcctgggcgcggtggagttcaaccgcggcacccggctgaccctgcacgccgggacccggcacctggcggcggtcgacgaactgaacgagaaggctcagcgcatctcggcgcgggtctcgctggtcagcttcggtgacgagaccgcgatgttcgagcagtacaccgacattctgcaattgcgaaagttgttggccggcaacacacccgaggaccgacagtggacccgcgacgcactcgatgtgcgcaaccggttcgtgttgtactgcgaggagcgcgacgccgagaccggcgaggtgatccgcacctacagcaactccggtgacaactccggtggggagcaggagaagctgatggcgttctgcctggccggcgcgttgagcttcaacctggccagcccggacagcaacgacacccggccgctgttcgcgcagctgatgctggacgaggcgttctccaagtcggatccgcagttcgcccagcaggcgctctcggcgttccgaaagttcggcttccagttggtgatcgtctcgaccgtgcagaacagcacgacgatccagccctacatcgacaacgtggtgatggtgtccaagtccgacgcgtcggcgcccaacgcgcggccggtcgcctcggtcacctcggcgtcgatctccgaattcgccgatctacgacggacttcgggggacgcggtaccgagcgcctga

SEQ ID NO: 46317 - DNA, 1500 bp, Yersinia similis
atggaagaaaacgctcaacaatgcacagaaaaatatatttcagcacgtagccagcatcctacttggatcttgctcgcctctcgtcgcgcccctttggtactgggttgtctgcgagccatgtttaagacgtcacatgacggtataccgatggaagatgcgcttcaggcgctggcgggtatcctctccgcgcatgccagtcaggaactgtatgaaatcgagcctgataatacccatcttcaagctgggcgcgagctacgggagtggatcaaacgccgtctggttgttgagcgagaagggcgaatttttgcaacggatgcactggaagtcgcgatacagtttgttgaatcgctggatagccgcattatgacctccacagcttcacgtctgtccgtggtgcaacgtgaaatagaaaatcttgagaccagtcttaatcccaacccagagagccgaattaataagctgcgtagtcgaataaaggcgctggaggaggaactgtcgctggcagaagcgggacacatcgtggtgctagatgaagcacaggcggttgaagggatcagggaagtctacaatttggccacttccttgcgtgctgattttcgtcgtgtagaggattcttggcgagaggctgatcgggcgttgaggcaatctattatcagcgagcagtatcaccggggtgaaatcatcgaccgcctgcttgatgatcaagactcactgctgaacacacctgaaggtcgcgtgttcgacagcttccagcaacaacttcgccagacgattgaactggacaatatgcgccatcgcctgcgcaccattctgcgccatcccgttgtacccaaagcattaccatggtcacaacaacgggatcttcactttctggtgaagcgtctggttcaagaaactaaggtggtgttgcaggccagatcccgtagtgagcgggatgtgaaaggttttatgaaaaccggccttgctgcggagcaccaccgtgtagggcaactgctcaatgatatctttagtcttgctttgaatctggattggcagcggctggcgataaggcggcaagagatccctttgccgcccttgggaatggcggtgacaggcgttcctgcggtagagcggttacgttttaaaacactggatgaggatattgagccagaactggatctgagcaccacgtcagtcggcttggaacaagtgggtgatgatttttgggatgcctttgatggtttggatcgagaggcgctgatccaaggtaccctgagagttctcgcagaacaaaacagacccattagccttggtgaattggcggttttactccccccagcacacgatctggaaacttttgccctttggctgggaatggcacatgaagccggtatcaccattcagaatgaacagcgagaagcggttgaactgattgacgatgaacagcgcatatggcgcttctatcttccctatgctgggctggaaagtcaggcacttaaggatattgactgggagttgtga

SEQ ID NO: 46318 - DNA, 759 bp, Yersinia similis; identical to SEQ ID NO: 44502

SEQ ID NO: 46319 - DNA, 3291 bp, Yersinia similis; identical to SEQ ID NO: 44503

SEQ ID NO: 46320 - DNA, 1155 bp, Yersinia similis; identical to SEQ ID NO: 44504

SEQ ID NO: 46321 - DNA, 1359 bp, Pseudomonas putida
atcgacctcgacgacgctctacattcgttagcccaagcaattgccaacaatgctgatcaagagcaaagccaaaccgagcctggcacagcgttacagcaagcgaaccgcgagctaggtgaatggataaaacgacggttgatcgttgagcgcagcgggcgcctttacgctaccgatgctctggagtcggcctttcgctttgttgattcacttgacgatcgagtgatgacatccactgcctcccgcctgtcagtggtgcagcgtgagatcgaaaatctcgagacgaacctcaactcagaccccaagagccgcgcactcagcttgaagcgcaggatccgtgaactgcagatcgagcttgaccgggccaaagccggccatgtaccgatctttgatgaagccaaagcgattgaaggcatccgcgagatctacgcgctggcgacgagcctgggggctgatttccgaagagttgaggactcatggcgtaatgctgaccgcctgcttcggcaatcgattatcagtgatcagtgcacgagaggggaggttctggataaccttcttgacggtcaggatgcgctgctgacaacgccagaagggaaggtctttgacagcttccagcttcaactgcgggcgcctgtagaacttgatctaatgagaacgcggatacgcaacatcatgcgtcatccagccgtaccgcaggcactgcacaaatatcagcagaccgagcttctgcgattggtgcctcgtctgcttcaggagtcagccgccgtattacgtgcgcgggccagaagcgagcgggacgtcaagagcttcttgaaaactggcctagtcgctgagcatcaccgtgtgggtcacctgctcaatgagtttttgagcttggcattaaggatcaattggcagcgccaggcgatcaggcgtacgccggtacccattcctccggttggtatggcgctgtttggggtgcccgctgtcgagcgcctgagattcaaagcaattgccgaggagcatgcgccaactctggatctgacaccgcgtccggctgacctagagcagattgaggacgagttctggcaatcatttgacggactcgaccgcgacgccttcgtgcttgaaacgttgagaattctggcccaggagggacgtccgttgtccctggcagagctcgcaagcttgctaccgcctacgcatgacttggagtgcttcacgttgtggatcacgatggccagggaggccggactgctcatagatgaacaggaaatcgagagatttgacctagcggacgctgaggatcgctggtggcggtttaaccttcctttcacccaacttgagtctgagaagcttcagaacatcaaatgggagctttga

SEQ ID NO: 46322 - DNA, 642 bp, Pseudomonas putida
attgacgaggaactgcggactacacgagccgtccgggaggttgtgcaactgctctataaaaatggcgatatcgaagagtctgaagatcctggcctttacagggccgcggtggctaacgccgacttggtagagcggataatggagccttttgaccttaacgttcagttagacgagctgagaggattggcctttgtcgtcgtccgtcaggagcccggagacacagctgacggttggacacaccctcttgtccgcagacataggttcaccctcgagcagaccttgttgatcgcgctgctccggcagcacctgatcgcattcgaaatggagagtggtgtgggcgccggtgtggcgcaaatgaccgtagacgatgtggtaactcagcttcatacctatctgggcgaaccgggaagcgatctcaaagaccgtagccgcgctctgaatctgttggagcagctgaaaaatcaccacttggttacgacgatagatagtaatgatcgtttcaccatacgtccgcttatcgctcatgttgcaaaccctgacaacctttcaaccttgatccgttggctcgagaccttcggctccagcctggacaggtcgaccaatgtcgatcctgtcgatgaggaaggggaggaacagccatga

SEQ ID NO: 46323 - DNA, 1152 bp, Pseudomonas putida
atgaagtcgcctcaggagttacgcaataagctgttcaggtactggaggcagccgggtctgcgcctccggcaactgctcgatcaggcagcatggcctttggtgttgagcatcggtaaacctacggcacaggttttcagctcgcaggtggcaatggtgcagaagcatgttgaggcctggcgggaggtgtcggtcgggaaagttgagtggaaacgcattgggtaccgaagtggcgccgatttagtgagcatacccactcaatggtgtttgcgcagtcccaccgagtggattacagcgatgtctaatgaggagataagtgcccaatacatgtcgctggaacacctggttgaacaccttcctgcagtttatcggcggttgatcatcacccgcccgtccctatggaagaataagcgttctgaagaggtcattcaggtcgcgggtttagcgcagcgattatctcccggatgcgcccaaggactgccactgcggttgctgtccgggtacggcgtagataccaagttttttgagaggaacgaactgttgctgagcaagatgctcgatgtccgctatgaaggcgaggcgtcaaggcaagggctctgcgactttctggatgcgtacgacgatacgagtcactgggtgcttctggcgccgctggaggctggtctgctgccgtttaaacgtcagttagtcacgacctctgagcttggcagggcaagcttacctgggacaaggcttctgatcgtcgagaatcaaaagtgccttcatctcttgcgcgagctgcccggaacgatcgcgattttaggatgtgggtcggatctcgcttggctcggatccgcccaactccatggcaagtccattgcttactggggggatgtcgatacctggggtatgcggatgctggcgcgtgcgcgctcaaggttcaacgcagtgataccgctccttatgacggctacagtgttcgatgcacactctgattttacagtcccagagcccattagggcgcaggatacaccaccagcggacttaaccccgtccgagacagcattgttcaagaggcttgtgcagtgcagtcgcgggcgcctggagcaagagttcatttcacgtgaagttgtatgggcagcactggaggagtggattcagcgtcgaaggggctga

SEQ ID NO: 46324 - DNA, 1476 bp, Mycobacterium conceptionense
atgcttgaaccgggtatgagcggcccctcgctggaccagctctatcagctcaatcgcgaggtcgccgactcgcgttcggcccggctgctggtgacgaacaacctggccacctatctcacgctgatggaacgccacctggaccgcggcgccaagctcaccgagatggaactcgtggtccggctggaacgtgatctggccgacctgggcaccgaaaccgagcagtccggcctggcgctgatcaagtactgggccagccagggctggctgcatcggatcaccgagcagtccggcgataccgaacgcaacgtctgctacctcacctacgaggcacgggccgtcctggatttcgcccgccgaatgcgtcgggaggacaccctcgccaccggcggctcgatcacgggcatcgcggctgggttgcgccgggtggcgggtcaggtcagcaacgatccggaacgcatccgggctgacatcgaagccgaaatcgccaagctccgcgacgaattggatgccctggaccaagggcagcgtcccgagccggacctggtggacgtcgaggacgaggcacgcgccatcgcgttgcagatggaacagatcatctccgacatcggccagtacggcagcatgctcaaccgcatcaccacccggctgctggatgcctccgccgacaccgatctcgggtaccgagagcggcagcgccagttgttcgacgactacgagtcactgttcgcctcccgtgagagcgcgtcgtacaccgccttcacccggatgattcaggaccccgagcagcgggcggcgttggtggccgacatcgacgcggtcacccgtgagctcccacatctggacccgggcctgcgtgaggtgatgacgggattcttcagcctggtgtcagcgcagaccgcagaggtcggccggacgcggcagcgttgcgcccgccgtatcaaacgcttcgtagcctccggaaccctggaacacagccgcggcgtcacccgccagctcaacgatgccttggccagtgcgcacgacctgctcagcgtctccctggccgacagccgcatcggtatcgaggtgccgttggtgcgcaccgacttcaattcgatcggtgctgtggcgttcaagatccgtgacgcgatcccgccgtcgcaggccgagccgtcggaaggtgaggtgaatctgtcggcgttctcggccctggcctcgcaggtggatgccgccgaactggctcagctggtcaacggtgccctcgctcgggggccgttgccgctgcccgatgcgatcggaatgctggactcggcctacctcgggcatgtgatcgtgctgtggtcctgggcgctcaagcaacaacctgctgacggagccgaatccgggaattcggtgcgggtgcggttccggtcattggagggcgccgaccgcgaaatcgaaattccccgactggttttcaccgaacctatccctactgtcagcgagagcctgctatga

SEQ ID NO: 46325 - DNA, 756 bp, Mycobacterium conceptionense
atgaccgacaacccggacccgtcgcccgtcaaagacggggtgatcgatttcgacgccctgccgagcatcgacgccgtcgagcggtccaccgaccagcggcgtgcaccccgcttcgacggggatgtcagcgaactgcccgaccgcgcctgctgggccttgcagcacctgttgtcgcgccgctacatcagcaaggacaaccactccgagctgtggtcctgggtcacccgctaccgcgccgagctcaccgtccggttgtcggaactcgatatgcgactgtgcatctcggacgatcacgacatcgcctacgtcgagcaggccgactacgaatcacagtggcggcgccgcctgctgcggcgtgagaccctcaatacctatgactcgatcctggcgctgcacctggccaagctcatgcgcgccgcggcgcgcgacgagaacgtcttgatcagccgtgacgagatccacgagctgttcgccggggtgaacaacgacaccgatcgcgacaccgcctcgttcgacaagcggatcgacaacgcgatcgaacggctcaccgacatcgagatgctcgcgcgcaaccgggaggacgaggacagtttcaccatcagcccggtggtcaacgcgatcatgacggcatcgatgatcaccgaattgcagcagcagttcgagcagctcaagcgggccgcgaacggcactgtcgatgatcccgacgaccccgatgtatccgaccggctctccgacgatgtggacgctcatggctga

SEQ ID NO: 46326 - DNA, 3363 bp, Mycobacterium conceptionense
atggctgaaccgaccaaccagttctctctgtcgcgcctgcaggtgatcaactggggcgtgttcgacgggtatcactcgatcccgttcagtccgcacggcaccctgatcaccggctcctcgggtagcggcaaatcctcactgctggatgcgatctcgctggctttcctgccgtcgcaccgccgcaacttcaacgcttcgggcgataccaccgcggcgggctcgggcaccggcaagcgcacggtggacaagtacgtccgcggcgcgtggggcgagcgccgcgaggggaccagccgccagatcatgtacctgcgcgggacgggtccggcctggtcggcggtcgcggtcacctacagcgatcgcaccgggcgctcggtcaccggtttggtactcaaatggcttgctgccgagaaaaattcggatccgggcagccgctactacctgatcgacgccgaccgtgacatcttcgggctgtgcaaccggtgggcggccaacgggtatgacgccgcggtgttccgcgatgacggttggaccggtgggcgcagtgagagccagtacctggcccagctgtactccagcatcggcatccgtgcctccgacgctgcccagcagctgctcggcaaggcgaaatccctcaaaagtgtcggcggcctggagcaattcgtccgggaattcatgctcgacgagccggccagcctcagcggcgtagaggaagcactcgaacagatcaacccgctggtcgaggcccgcggcttgctcgacgtggctcggcgtaagcgcaacaccctgggcaacatcgccgcggtacaagcacgttacgccgacgaggcggccaagttcggggtgatcgacaccatcgacaacgcgatgatccgcgattacgtcgaccatgtgcggctggctcaggccggtccggagatcgccaatctcgacgatcagatcacccaactcggcgcgcagcgtgatgagttcggcacccagcagcgtcagctgaagaatgagcacaattccctcatggcccagatcaacacggtcaccgtggatctggtgccactgcagcaacggctgaccgaggccgagcggatcagcgaggaggtgtcgcgccgacgcagcgcctacgaggacaaggtcacgtcgctgggcctgaccccgccggacaacggtgaggagttctggtcgctgcgtgagactttgatggaggaagccgaccggctgcaccgcgagctgttcaccggcaaccagccctacgtcgaggcctcggccaaggaagtccgggcccgcgaggcgcgggagagtgtggaggccgagctggaacgcgtgcagcggctcggctcgccgctgcccaagaccgagtacgagatgcgggcccgcatcgcccgcgccctcgacatctccgaacgcgatctggtgtacgtcgccgagttgatggagctcaagcccgacgagacgcggtggcggctggccgtcgaaaaggttttgcgcggtgcgggattgcgcctgctggtgcccgatgcctacatggagcgagcgttgcgcttcgtcaacgagaacgacatgcgcggccggatccagttgcagcacgtccagcacggcgcgcaactgcgtacccccgccccgggcacgctggccaccaaacttcagctggccgacccgacacacgacagcgcggtggaggcactcaacgtggtcgccgttgtcggcgattacgtgtgtgtcgacgggcccggggagttcaccgagcaatcccgtgcggtcaccgaccagggtctgcgcaaagacagcggtcggctctcgatcaaggatgaccgctcgaggctgcgaccgtcggactacatcttcctcggcggcaccgccgccaaagtcgaagcgctgcaggatgatctggcggccgcgcacgatgtgtaccaggtggcccgtaccgcgcgtgagcggctcgacgaacaccgcggtcagctgcaatcgcgggagcgggcctgccgggcgctgtgcgatcagtacatgcagtggagcgacatcgacaccgattcggtcgatgagatgctcgagcggctgcaggacgaacacgatctgctggtctctgacaacccggacgccgaacggctgcaacagcgggccgacgaatgctgggagcgggtggagaaggtcatccagcagatcggctcgctcaacgaacgtgagaccgcgctggatcgccggcgcaccgcgttgctggagctgagcgaggccttgaccgagcggctcgggtccagtgagttcccgtcgcatgcccgcgacacgatcgacggatatgccgccgacatcgcgctgaccctggaattgctcgaacctgagccgtaccgaaacgagctgatccgggtcatcagccgggagcgagatcggctgcgggcggatcgcaaccgctcgcacgacgagctggccggcatcatggccgcctacgacagctcgttcccggatgcgatccccaacgacagcgatgtcttcgacgagcgggtgcacgactatgtggcgctgtgccgccggatcgacgagcgggaactgcccgacgcctatgagcggatgcagcggctgatcaccgagcaggcgccgggcgcgatcctgaacctgcacatgatcgccgacaacgaggcccggcggatcaccgagcagatcgcccgggtgaacacgggcctgggcgcggtggagttcaaccgcggcacccggctgaccctgcacgccgggacccggcacctggcggcggtcgacgaactgaacgagaaggctcagcgcatctcggcgcgggtctcgctggtcagcttcggtgacgagaccgcgatgttcgagcagtacaccgacattctgcaattgcgaaagttgttggccggcaacacacccgaggatcgacagtggacccgcgacgcactcgatgtgcgcaaccggttcgtgttgtactgcgaggagcgcgacgccgagaccggcgaggtgatccgcacctacagcaactccggtgacaactccggtggtgagcaggagaagctgatggcgttctgcctggccggggcgctgagcttcaacctggccagcccggacagcaacgacacccggccgctgttcgcgcagctgatgctggacgaggcgttctccaagtcggatccgcagttcgcccagcaggcgctctcggcgttccgaaagttcggcttccagttggtgatcgtctcgaccgtgcagaacagcacgacgatccagccctacatcgacaacgtggtgatggtgtccaagtccgacgcgtcggcgcccaacgcgcggccggtcgcctcggtcacctcggcatcgatctccgaattcgccgatctacgacggacttcgggggacgcggtaccgagcgcctga

SEQ ID NO: 46327 - DNA, 1476 bp, Bordetella hinzii
atggcactggaccacctcacactcacgacataccgcgatcggcatcctgcatggcgattgctggcctcgccacatgcgccattggtggcaagcttcctgtaccgggtgttcgtcgcgccgaacgtgcgggtgacgagcgaagcggatctgaccgagatgctggaagacgagttgtttgccctgcgcgaagccctcggcgccgaggtgtatccgaaagccgcaaccgaatacctgaatgactggtgcgcgccagacaagggctggctgcgcaagttctacaagcccggcaccgacgaggcccagttcgaccttacccctgccacggaaaaggccatcgcctggctggtgtcgctgactgagcggcctttcgtcggtaccgaatcgcgcctgctgaccttgttcacgctgctggagcagatcagcaccggaagccaggctgatccagccaggcgcctggaggaacttcgtcgcaagcgcgacgagatcgatgccgagatcggacgcgtcctgtccggcgatgtgccgctcatggatgacacggccatcaaggatcgcttcctgcaatttcagcaactggcgcgcgaactgctgagcgacttccgtcaggtggagcacaatttccgccagctcgaccgcagcgtccgcgagaaaatcgcgttgtgggacggcagcaagggggctttgctcgacgaagtcatgggcgagcgcgatgccatcggagattccgaccaggggcgcagcttccgtgcgttctgggatttcctgatgtccagccgtcgccaggaagaactgtccgcacggctcgaccaagtcctcggcctgcctgccgtggccgcgctcaagccggagccgcgcacccgccgggttcaccacgattggctggaagcgggcgaacatacccaacgcacggtggcgcagttgtcgcagcaactgcgccgcttcctggatgaccgggccttccaggaaaaccgtcgcatcctcgaactgttgcgcagcatcgagatcaaggcgcttgcattgcgcgacacgccaccggccggcgaagtgatgctcctcgacgagatgggcgcggacatcgccttgccgcaggaacgccccctgtttgcgctccatgccaagccacgcctggcggaactgatacttgaatccggcgaggacgacgacatcgacaccgcacgcctgttcgaccagcacgtcgtggacaaggcccgcttgcgtgaggccctgcggcaggcattgcggcaacagtcgcagatcagcttgcgcgcgttgctggagactcagccgctgcaacagggattggccgaactggtcacctggctggaactggcccacgcgggaaaccgcgggctggatggcctcagggccacggtggatgacgatgcgcaggagatcgtcgaatgggccatgcaggacagcgatggctcgacggtacgacggcgggcgcgaatgccgcgcgtgatctttacgcgctga

SEQ ID NO: 46328 - DNA, 675 bp, Bordetella hinzii
atgaacgatatgcatcaggatgatccagaaggcagtgccgaatcgcgcccgcccgtggtagcggaactctcgcaactgatggtgcatttgctcaaaggcgtgttgtaccgccaggacgacgagcgcctatgggccagtctgctgaacctgcaggcgcgtgtacgggagcaggcggcggtgttgttgctggatctggtgctggacgaagccgagggctacgccttcctcaaaagccagccggagccggagcatgcggacgccacacctcgcctgccacgcctgatcgcacgacggccgctgtcctatccggtcagcctgatgctggccttgctgcgcaagcgcctggccgaatccgacgccggcggcggcgatacccggctggtgctgtcgcgcgaggagatcgccgaactgatgcgcgtgttcctgccggacggcaccaacgaggcgcgcctcatcgaccaggtcgattcgaccatcaccaaggtggtggaactgggctatctgcgcaagctcaagcccgctgccggtgcaagtcagcaggcaccccgctacgaggtgcggcgcatcctcaaggcgttcgtcgatgcgcagtggctggccgacttcgatgcgcgcctggagggttatcgcaccgcgttgtcaggtggcgatcgcgacaaggaagccggccgatga

SEQ ID NO: 46329 - DNA, 3378 bp, Bordetella hinzii
atgaacgatttttcgccacagcagctcgatttcgtggccgacgacagccgcgtcggctttcgcctgcagcggctggaagtcctgaactggggcacattcgaccggcgcgtctggcgctatgaactcgatgggcgcaacggcctgctcactggcgacatcggttcgggaaaatccaccctggtcgatgccgtcaccacgctgctggtgccagcgcaccgcatcgcctacaacaaggccgcgggcgccgaaacgcgtgagcgatcattgcgatcctacgtgctgggccactacaagagcgaacgcaacgaagccaccggcagcgctcgcccggtggcgctgcgcgacaccaccagctacagcgtgatcctgggtgtcttccgcaacgaaggctacggccaggcggtcacgttggcgcaagtcttctggtttcgcgaaccacagggccagcccgcgcgcttgttcgtgactgtagagcgggaactgtccatcaccgagcacttttccggaatcggcagcgacatcaacggcctgcgcaagaagttgcgcgcgatgggctgcgaactgaacgacagcttcccgccctacggcgcctggttccgccgccgcttcggcatcgagcacgagcaggcgctggaactgttccatcagacggtttccatgaaatcggttggcaacctgaccgacttcgtgcgcagccacatgctcgaaccgttcgacgtgggcagccgagtcgaggcactgctcggccatttcgatgacctcgatcgcgcccaccagtcggtactcaaggccaagcgccagatcgagctgttgacgccgctggtggaggatggccgtcgccacgggcagatagctgccgagatccaggcgctgcgcgaaggacgcgatgcactgcgcccatacttcgccggcttgaaggcagcattgctggagaggcgcctggaattgttgactcaggatgcgatgcgctgggatgcccgcatcaagcaactgggagagcaacgagacaacgcccgaatcgagcaggggaagctcgaaggcgcactgcgcgagaacggcggcgaccgactgcaacaactcgctgccgccattcagcagcaggaggcagagaaacagcaacggcaggagaaagcggacgcctacaccacgctattgacgcgcattggagaagcagcgccgggagacgaagctgctttcatgacacaaagatccaccatcggagaacacgccgaagcgctgcgcacaagcattgcggaccacgatacgcagatcaatgaagacggatatgcgctgcgacggggtcaggaagaacacaaagcgctcagcgacgagatcgacagccttgcgcgtcgcaaaagcaatatcgatgcggcgcaggtgcgcatccgcgaagccctgtgcgccgctttgtccatcgccgaggaagacctgccctttgccggtgaactgatccaggtgcgcgaggacgagcgcgactgggagggcgcggccgaacgcctgctgcatggcttcggcctgtccctgctggtgccggatgcgcactacaaggacgtggccgattgggtggagcgccagcaccttggcacgcgactggtgtacttccacgtgcgtgcacgcaagtccacgcaggccgtcagcctgcacccccagtcgctggtgcgcaagctgctcatcaagcccgacacgccgcactacgactggctggaacgcgaactgcaccatcgcttcgacctggcctgctgcgacagcaccgagcagtttcgccgcgagacccgcgccatcacccgcgccggacagatcaaggacccgagcgggcgccacgaaaaggacgaccgccgccgcatcgacgatcgcagccgctacgtgctgggctggagcaacgccgacaagttgcgcaccttgcgtgacgaacgcgagggcctggaacagcgaatgggcgatatcggtctgcgcattgccgacgcgcagcgattgcgcgggcaatgccaggcgcaactggaagccttggccaagctcgaagtcttcacccgctacagcgagatcgactggcaggcgccggcgcgcgagatggcccgcctgaccgaggaacgcgaccgcctcaaggcggcctccgataccctgcgggaactggaaagccaactggcgcaggtcgtcgaacgcctgaaggagatcgaaggcgatcttggcgaggcccaaggcaagcgcggagaaatccgcagcaagcacgaaactgccttggcacagcacgcacaggctctcgaaatccaggcgcaagccgcacttgacgacaagttgctgcaaacccttgagggctggcgcgccgaagtcctgggcgaccaccagctcacggtggaatcctgcgacaaccgcgaacaggacgtgcgcaacggcttgcaggcgcgcatcgatgccgaagacaagcgtctgacacgcctgaccgaacgcatcatcaacgccatgcgcggtttcaaggagaccttcaaggcagagaccgccgagatcgacatcagcctggccgcgctgcccgagttcgagcgcctgatgaacgagttgcagcgcgacgacctgccgcgcttcgaggcgcgtttcaaggagctgctcaacgtcaataccatcaacgagatcgccaacttcaacgcccagctcgcgcgcgagcgggaaacgatcaaggagcgggtcgatgccatcaaccaatccttgcaggtgatcgactacaaccccggacgctacatccggttgctggcgcaacccagccccgatgcggagatccgcgacttcctgcaggatctgcgtgcctgcaccgaaggcgcgctgagcggctcggaagacgagcagtattccgaggccaagttcctgcaggtcaaggccatcatcgaccgcttccgcggccgcgaggggctggccgaggtcgaccggcgctggatgcagaaggtgaccgacgtgcgcaacggcttcctgttttccgccagcgagcgctggcgcgaggacgatgccgaacacgaacactattccgactccggcggcaaatccggcgggcagaaggagaagctggcctataccgtgctggccgccagcctggcctaccagttcggcctggaatggggggcggtgcgctcgcgctcgttccgtttcgtcgtgatcgacgaagccttcgggcgcggctcggatgagtcggcccagtatgggctggaactgttccgccagctcaacctgcaactgctgatcatcacgccactgcagaagatccacatcatcgagccctacgtgtccagcgtcggcttcgtgcacaacgaaagcggccgcgagtcgcggctgcgcagcctgagcatcgaggaataccgggcacagaaggctgccgccacgggaggcgctgcatga

SEQ ID NO: 46330 - DNA, 1206 bp, Bordetella hinzii
atgacatggagccggcccgccgaccttcgcgcgcaaatcgaacggctgtggcagcgcggcgagttgctgcgtgccgtggtcggtgacggcgcgctgggctggccgttgcggctgtcgctcaagtcgccttccgctgccgatctcagcaaccgtttcgatgccgtgcgcggctgggtgcgcgatatcagcgccatgccacgcgtgcgcatcgagtggcgcgagtggacgcaccgggtacagggccggcaacgcctgccggacacgctctggatcgatacgctggaagacgctctggcgatgatcggcaagaccggagatggccgccggttccaggcactctggcagcaaactgccgaagcgcaacccgcactgctgccatggctgcacagatcaccgttgcagaccctggcactggccgaacactggccgcgcctgctggccgtggtagcctgggtgcaggcccatccgcgcccaggcgtctatcttcggcaggtcgacgcgccgggcgtggacagcaagttcatcgaagcgcatcgcggcatactgggccaatggctggacctggccttgccgactgaagccatcgagcctgctgcaaccgggatggccgggtttgcccgtcgctacggctttctggagaagcccgttcgcatccgcctgcgcttgctcgatccgcagctgctccagcttcccggctgcacgggactgaccgacatcaccctggatgaggacagcttcgccacgctcgccctgcctgcgcagcgtgttttcatcaccgaaaacgaggtgaacttcctggcgttcccaccggtctccggtgccatcgtcgtgttcggtgccggctatggctggggagcgcttgcccgagccaactggctgcatcgcgcctctctgcactattggggagacatcgatacccatggctttgccattctggacagcctgcgcaagtatttcccgctagccgcttcgttcctcatggaccgctctaccctgatggcccacgcactccaatggggtgaggagcccctcgacaaacgccatatgttgcccttgccccgactggtcgatgaggaggcagctctctacgacgacttgcgtaatgaccgaatccggccacagctgcggctggaacaggaacgcatcggctatcgctggctatgcgcggcgttggcgacaacagcccaggacgattctcggccgtag

SEQ ID NO: 46331 - DNA, 1365 bp, Coprobacillus sp. 8_1_38FAA
atgggaggaattatggttaatatatttgatacattacccgtaaagttttttaatatttttaatacatctgatcgagttgttattagtgaatgtattggtgttctttatgagtatattaaagatgacgcttcttttgcttcactgaaagaaaatcttatttatgaacttacaaaatattttactaaccatttaattgaactagaagatgttcaaattcaatcaccacgtgaaagagccttttatgtttatcgtcgcttaaaagaatgcggctggattagtgaggaagtgggagaaaattatcaagtttatactagttttgaagactatgcgattagtattattgaaactttaatgaatttggatgaagatcgtgatattgaatattcaagtatggtttatagtatttactcgcagtttaaaaactttgatattgaaaatggacataaaatcattgatgctcaatatagcatgacaaaaagtttaatgacaaaattaaagaatcttaatacaaatattaagcgttatatcaagcgattagtaaaagataatatgaagaatgatttgaatcaaattttagattctttattaagtgattatcagatgaagattgttgatcgagcattttataatttgacgacaaaagatcatcctttaaaatatcgaaatagtattatttcacaaattcaaaaaatagtagatgatccacaaacaacagaaataatcattggtaatataatgctttctaaagatatttcttaccaagaagctagcgatttattttataaacaaacttcgtatattattgatgcttttgaaagtattcttgatttaattaatgaaatcaatagaaagaatgaaaagtttgttgcttcagcaacaaatcgtattatgtttttaatgaacgctaaagaagatattggtggcaaaataaatgatattcttaaagaaggacaatattatatagaagcttttgaaaatgtgacgacactttctgttaataaatatttagatcaaaattctctttacttgccaagaaccatcaaaaaagtaaagaatgtcgatttaatcattgatgaccctttagatgaaaatgcacgtttagaggccattgaaaaattaaaacgtaatgaaaaatatacgaagacagcaatagaaaaagttgttttagaagaattaagtgaaaaagaatctcttttaggttccacttattttgaaaatcaaaaagatttatcgatgtttattttaacgtggctttatggctttagccaaaatgcctgttataaaattgaacctcaagatcaaatcattataaaagaacattatcaatttagagaatttatgataaggagagttgaagatgaataa

SEQ ID NO: 46332 - DNA, 639 bp, Coprobacillus sp. 8_1_38FAA
atgaataaaaatgaactaatgaaaaatatgtcccaagcatatttattgttgtctgaaaaaaagaaagaagaattttcacgtattttaaatcgtttattagcggtaaattatttatgtggaggacgtaaaagagatcgagaagattattattttataagtgaaaatgaacaattatttaaagattttttgatgatgctagattatgattttcatttatataaagcagatcgtgtcatctttatttataatattaataattacaatcatttaaatcttaatcaaatgcaaacgattgttttattgttgcttagaaaactttattttcaaaaatcacaagaacttcaagatacggaatttattcatattactttaggagaacttcatggagaaatagaagccacaggaatttataatgagcgtttaaagaaaactgaattaaaaacgatttatcaatttttatcacgttacaatatttgtgaacgagttggcgatttgaatgaagatgattctcgttttattatttatccaacaatcaattatattttacctgttcaaaaaatagaagaaataaatcaacgtatccaacaatttaagaaaggagaccaacatgaaaacattaacgaaagtgaaactgattaa

SEQ ID NO: 46333 - DNA, 1215 bp, Coprobacillus sp. 8_1_38FAA
atgaagaattatagagaagatattttaaataactttattgaacgttatgaaaagagtagttactacaaaggaaaatctttaaaaccacaaaaaagttctattgttttacatgaacgttatcctcaatatggacagagtcgatatccagaagttcttgaaaagattgaagatgttgttcttcaattagaaaaagaagatcttattcaatttgcaaagggaagcatagaaggaaacagaaaacttatttttgttccaacagaagaacgtgtttcaaagatttatcaagaattagatagaacaccgcttaaagaaaaaagaaatcgatatttaaattgtttaaaaatgtatgagttagattctttttttaaagattttcaaatagcaatggaagaaaaagttttcaactatgaaagtgtattaccttatttaaaagtctatgatcaagaagatttaaagaatgttatgaaaatactgcagggaatgaaaaatcaagaagaagagatttcttttagaaagttttctgaaaaagtattgggtgatactaagaagttagaaaaatataaaaataaaatatatcatattattaaagatttttatgatgattctattgaaaatatagatgatgcttttgaactattttatatacgtaaaaatccagcctatgtttatttaaaaggaagtgcgattttacaaatcaatgaacaaattattgatttaaatgaaatgaatcattattttgttttaccaagtagttgtattaaagatttaaaaataaaacgaatagatgcaagacaggtaatgacggttgaaaatttaacatcatttcatgatatatctttaaaagacactttctttatttttacaaatggttttcataatcatgttatagaagcatttttaaagtgtctttatgattttttaggagaaagagtttcttatcttcattttggcgatattgatgcaggtggtttccatatttatgaatctttaataaagaaaacgcaaattccttttcaaacatataaaatgaacgttaatatgttgaaaaagtataaagcttatacaaaacctttaactgaaaatgatcgcaagagattactttcagttaaggatagacatcaagaagttattgattatatgttaaaatataatgttaaattagaacaagaaatcataggagaagaagatgaaagaaaaaacacttacacgtattag

SEQ ID NO: 46334 - DNA, 1383 bp, Clostridium bolteae WAL-14578; identical to SEQ ID NO: 42131

SEQ ID NO: 46335 - DNA, 834 bp, Clostridium bolteae WAL-14578; identical to SEQ ID NO: 42132

SEQ ID NO: 46336 - DNA, 3393 bp, Clostridium bolteae WAL-14578; identical to SEQ ID NO: 42133

SEQ ID NO: 46337 - DNA, 1179 bp, Clostridium bolteae WAL-14578; identical to SEQ ID NO: 42134

SEQ ID NO: 46338 - DNA, 1380 bp, Clostridium citroniae WAL-19142
atgatacttatgaatgaaataccggaccggttttggagcttattccgctctataaaccggtctacttatattgaagcgctattaaaaatcaatgaggaatatgagtacagcaactactttctcagcagggaaatgtgcatccagcttctcagcgaatatttttccagaaaaaagtatgtcctatggcaggacgagacggaagatgactgggatacccttgagcccccagccaccagggtcctgaactggcttttgagaaacggctggctgaggaaagtggatgattatgccaatatgaccgtgaatattgtcatccccgattatgcggctgttatgatcgaagcatttgcaaggcttgcaagggatgaggaagatgagacggaaatttatatccagaatgtctatgccattctattttctctgaaaaatgatccccggtccagtataacccttctcaacaccgcgctggtcaatacaaagaagctgaataagtctctgcaggatatgctccataatatggacaaattcttcggcagccttttggagcagaaaaattatgagagcctgcttaaagagcatctggaccgctatgtggaagaaattgtaaacagaaaataccatatccttaagacttccgataacttttatctgtataaaacagatatcaaacgctggatcacagccatgcgccaggacgaggaatggatcgggcagatgtgcgcaaggcccgctggtttctttgtgcggaaaccctccaatgtaaccgaggcagaagtcatggaaaagctggatcagctggaacgcggctttgacgacatagagcaccgcattgccaacatggacaaggaacacacccgctatgtgcgggccacggttaccaggctcaactatctcctgaaccaggaggataacatgaagggactggtggtgcagctgctgaaccatttatcggaatatgactgtccccaggaggatgtatcatccattggggccaggatgaacctgtcccaggtaagtattttatcggaacgatccctgtacaaaaagcgcaggacaaagacggattttaaagaacagttaaaggacgaggccctgtccagggagctgtccatggaggaggtcctgaacctgaacaaggtaaagaaccgctacagcagaaaagagatcgaaggctttattgaaacccatatggagaacgggatcatggcagtggacaaggatactgtttccaatgacgaggagtttgaaaagctgatcctggcttacgattattccacccgcttaaaaagcgcctatgaggtggaggaccaggaaccggagatgatacacaacggcagatacacctatccgggctttgtatttgcaaggaggaaaaaataa

SEQ ID NO: 46339 - DNA, 798 bp, Clostridium citroniae WAL-19142
atgccatttgacataccctattatgacggcctgatgcaggaagaacaggcccaggtcacaggatccatacgccttttgctccaccagacatttatcctggagcgcaaatttgacaggcgcacctggcgtttccagtataaccaggagttccgcgcctgcaacaagcatctggaatttatcaggaactattttgcggtcagcggggtcgaagttcaggagaacagccagctgggccttatctatatccagggagaaaatctcatcggagataagctgcccaagctggccactctctatctgctggtgctgaagctgatctacgatgagcagatggagagcgtgtccaccagcgtcaatatctacactaccctgagggagatccatgaaaagctgggcagctaccgtctctttaaaaagcagccctcccccacggacatccgcaggacagtcacacttctcaaaaaatatcagatactggagccactggacctgctggaggacttaaacagcgacagccgcatgatcatctatccctgcatcaacgtggtgcttatgggggatgatgccagacagctgctggcatcctttgatgagcggcaggaggatgagggcgtacagggaaaagcggaccttccgcttgaggaacctgatgtgacggaagaaagcgaattggaagaaaatgaacttgaggaaaatgaacccgaagaaaatgaacccgaagaaaatggacccgaggaaaatggacccgaagaaaagaacatagaggagaaaggagcgtcagacaatggaattgactga

SEQ ID NO: 46340 - DNA, 3423 bp, Clostridium citroniae WAL-19142
atggaattgactgaaataaaccggacagcccaggaacattcccctgctccacaggaagggaccccaggaaaaagccgcttccttgccctttccaggatctgtctgaataactggcactatatcagcaggcgcaccctctcctttaatgaaaatatcaactttttcaccggccattcgggaagcggcaaatccacggtcattgacgccatgcagatccttctgtacgccaacacggacgggcgtgggttctttaataaagcggcggctgatgactcggaccgaagcctgatcgagtacctgagaggcatggtcaacattggggacaacaatgagttctcctatttgaggaaccagaacttcagctccaccattgtgctggagctgaagcgcagtgatacaggtgaatgccagtgcgtggggatcgtatttgacgtggagacagccaccaatgatatctcgcggcgttttttctggcataaaggccctgtttgggaaaatgaataccgcaccggaaaaaggaccatgtccattgcggaagtggagtcataccttcagtcccactacaacaaagaggagtgctttgcaacctcccacaatgaacggtttcgcaggatcctttacgatacctatctgggcgggctggatcctgagaaatttcctcttctgttcaaacgcgccattccctttcgcatgaatatcaagctggaggattttgtgaaagaatatatctgcatggaaatggatatccacattgaggatatgcaggagagtgtgatgcagtacgggcgcatgaggaagaagatcgaggatacctgtgtggaaatacgggacctggaggagatccgccaggcctttgcgtcctatgaggaaaaggaaaaccagatcaagaaatgcacctattttgtgaaaaagctggagattctggacctccagacccaggtcagaactctggccgacaagctgaatcttgccaaaacagacctgctgcgccaggaggaggcaagggcgggcgtggaaacacagatcgctgacctgacggaacaaagcgatgacctgctgcgccggattgcatccaccgggtacgaggacctgaagcagcaggcggagagtctgaacgagctgctggagcgcctgggaaaaagtgaagccaggtggcagcagaccacacaggcgttaaaatgctgggaggaggaggatatcacctccaatcaaaccctttgggatattgaggaatttgaaaaccgcaccattgatgaacacactctttgccggttaaaggagtccattggctccatgtgcaccgacacggaaaagcagcgccaggaagcgtcctctgtgatccgggacctgaaaaacaaggaaaagcagactaaggatgagctggagaaactgcgctccggaagcaaggcatatcccaaatatctggaaaacgccagaaccttcctgcagcgccgtctgctggaggagacgggaaagggcgtggatgtccatgttctggccgaccttttggaggttaaaaatgcccagtggcgcaatgcggtggagggctatctgggcagccagaagctgagtcttgtggtggccccggggtatgccaaagctgccctgaagatctacggggaactggacaaaaaagaatatcacagcgtggctgtgctggatacggaaaagatttcgggaagccagcacgcggtgctgcccaatgcgttgtcccgggaggtaacggtcagggagtcctacatacagccctacatggatctgctcctgggcaaggtcatcaagtgccagaccatagaggacctgcgtgagtgccgcatcggcattacgccggactgcatgctgtatcacagctaccggctgcagtatatcaatccggatcaatacagcaaatttgcctacattggcaaggacagcatgagacggcgcatccgccttctggagcaggaactggaatccctgggcgtccagagaaagccccatgaagaggtggtcagggaatgccagcgcatcctcaccctggagcagctatcactggagcctggagagtacatggagtggcttaaggatatcggttcctggaatgaaaaacagcgcgagaaaaagcggatccttcagaaactggagaaactgaaggttcagaacgtggaccagctggagcaggagagaaaggctgtggtcagcctgtgcgatggcaaaaagagggagcgggatgagctgctgaatatgataagggataaggaaaatgagatcagccgttatcagaatgcggccattgccctgaacgtgaccctgacggaccaggaacggggatgggagacaaaccacgatttcgagtcccagctggccggatacctctcgtccaaggaccaccccagatatgacagggaaagggagagttatgccgccagatgtgttaagcttacggagagcagggacacggccttccaaaacctgatgaccgtacggaccgattacctgaggcgctatcccaaccgaaacttcccggtcaacacaaaggacaaccaggcctatgaccacctgctaaagagcctgtcctgcgaccacctggacgagtacagaaaaaaggcggccgaacaggccagggcagcggtggagcattttaaaaatgactttatgtacaagatccgaagcgcgatccgtgaagccatgctgcgaaaggacgagctgaaccgtatcatcagccgcctggattttggaaaggataaataccagtttgtcattggacgcaacaggggggcggacggccggtactatgatatgttcatggacgagtccctggaggtaaacccctccgagctggcggattcctttgatcatcagatggacctgttcaccgcacagcacgagaaccggtacggggagcttatgggagaactcataagcatattcatctctccggaaaacgccaatccccagcagatggaggaagccaagcggaacatggacaaatatgccgattaccgcacttacctttcctttgacatgcagcagctgatccaaaacgaggatgaggtcatcaaaatacgcctgagccggatgatcaagaagaattcaggcggagagggccagaacccgttatatgtagctcttcttgccagctttgcccaggcctaccgcatcaatctctcccccaagatggaacgcaatcccaccatccgcctggtggtgctggatgaagcgttctccaaaatggatgcggagaaggtggccagctgtattgaactcatccgcggtctgggattccaggccatcataagcgccaccaatgacaaaatccagaactatgtggagaacgtggacaagacctttgtgtttgcaaatcccaataaaaagtccatctccatccaggaatttgagagggagcgtttcccggagctgataaaagatttggaagaggaatag

SEQ ID NO: 46341 - DNA, 1383 bp, Clostridium clostridioforme WAL-7855; identical to SEQ ID NO: 42748

SEQ ID NO: 46342 - DNA, 750 bp, Clostridium clostridioforme WAL-7855; identical to SEQ ID NO: 42749

SEQ ID NO: 46343 - DNA, 3390 bp, Clostridium clostridioforme WAL-7855; identical to SEQ ID NO: 42750

SEQ ID NO: 46344 - DNA, 1179 bp, Clostridium clostridioforme WAL-7855; identical to SEQ ID NO: 42751

SEQ ID NO: 46345 - DNA, 1530 bp, Sphingobium yanoikuyae
atgctgttcggccaactccattccgatatcttcgcgctgttcgccgggtcgaaccgctttctctacgagcgcgtgctgatcggcctctatgaaggcttctaccgttccgacctgcatttcccgacccagggcgaggtcgtccagctgatctatacgctgctgggcgacaatgcggagctgtggcgcgaggatgaaagcccggtggtgctggacaagctggccgcgcgaccgggccgccgcgtgcgccggcgcaagctggaagccgccgacgcgcaggcgaccagcgcggcgatgatgcgcgcccggcatatctacaaccgactgcaggcaaccggctggatcgaggaaagccgctatggcctgaaggtcacggtcgacatgccggccggcgccatgcgcctggccgaatttctctgcagcttgcgcgaaggcctgtccgaccagcttggcggccttgtcatccaggtgaagaacgagctggaagccctgcagcgcaatgcgcgggaaaatgcgcccggcctgcacaaggcggcgcgcgacgccgccagcttcggccgctatctgcgcagcgtgctgagcgcgctgcgcgacatcgacaagcgggtggtggaaagcgacagcgtcggccgccggctgcgccattatttcgaggatttcgtcgagaagctgctgctgcaggattatgcggccatctcgaccacttcccacccctatcgcttccgccatcgcatcttcaccgcgctggaggcgatcgaggattcgatcgccgacgtcgccgccatcgccgaagcctataatgaggcccgactggcgcccgatccgtctgccgcccgcgatctggtctatgacgatctgcacaaggtgcggcgcgtgttcgaccagatagaggaggctttcgagcgcatccagcagcatcgcagccggctggagacgcggctgcgcaacaccgtccgctatgccggacggcgcggcaacagcttcctccagcgcagcgagccgatgctgctgcaactcgatcggctgctcgcccggacggatggacaggatatggcgccgtccatgtccggtctgctggaaccgcgccggtcctactggtcccccgccctgcttgctcggccgcgcacctatcgttcgacggtttcgggcggcctgctggtcctgccgccgcccgatcccctgcgcgaatggcgcaagcggctggaccgggactatctggcccgccttgccgtcacgcccgaacaggtgagccgcttcctcgaacggcgcgtggcgcccttcggatcgggcgaggccagccgcttcgcgatcgagacggtcgatgatttcctgacgctcgaagcgctgcgcctgtccgtgctggccgccgatgccgacggccggggcaataccatcgccaaccatctggcgccccatttccgcttctcggtcgataccggatcgaccatcgacaatgactggctgcactgcgcgggcttcaccgtctcgcgcatcggcgatgccgtgaccccagagatacaagatgctcagtga

SEQ ID NO: 46346 - DNA, 669 bp, Sphingobium yanoikuyae
atgctcagtgaatttcagaccctggaggcgcgcgatccgcgccggatgcaccgcgtgacccaggcgatcagccagttgctgcgccatcagttcctgcatgtgcaggatcgcggctcatcggcgctgctcgaagtcctgctccgccccgaggtcgagcggctggtggcggattatttcgaagtcgccggctaccggctggtggtgcgcgaaagcgagggctgggccggcatcctgcccgacaccgaacagatcggccatccgcgcatgcggatcgacgagacgctggtgctgctgctgttccgccgattgtgggaagaaggcatccaggaaggcgatgtcgaacgctatggcagcgtgatggtgacgctcaacgccgcctatgacgcctatcaggacatggtcgcccgcgcccgccgcgcgacgctgggcatcaacgagttcaaggcactggtcaccgcactcgaccgccgggcgatcgtccatatgggcgacatcgacgacgagatggaggacatgccgatcaccatccgcgcgctgatcgccaccgtcgcgggcgaggagttcatggcccatctcgaacaattgctggccggcggcgactatcaggaaagcgagacggaggagcccgtcatcgatctggatgacgccgacgaggaggaggtcgcatga

SEQ ID NO: 46347 - DNA, 3444 bp, Sphingobium yanoikuyae
atgatgcagcttgcccatatcgcactggtgcaatggcatctgttcggtcgcgaggacctggccgtcggcggcgacaccgccgtgctgggccagaaccgctccggcaagtcgacgctgatcgacctcatccaggcggtgatgaccggcggttcgcggcgctggtatcagttcaatcgttccgccggcgaaaccggcagccgcaagtcggaacgcactctgcgcggctattgcctcggccagctcaacgaacatgaatttctgcgccaggaatccgtcacccacatcgtgctgacgttcgacgaccccgacggcatgcgcccaccggtgagtgtgggcctgtgcgtcgaggcgtccgcgatcgaggatgcacaggtggtcggccgctatatcgcgcccggcgtgcgagtggataccgacctgctgatcgagcatctggatggcgggcagcagcgctcggcgccctggagcctggtgcgcgaacggctggagcaggcctgcgcagcggccggcacccagctcattcgccccgacggcccgcgcaaccatatccgcgaatatatgcgccagctgttcaccggccggcgccacagcgatccggatcgcttcatccgcgccttcgtcatggccctgtcgttcgaggatatgcgctcggtcgagggcttcgtgcataatttcctgctcgcccggaacgacatcgacatcggcgaactgcgcgagggcatccagcgctatcgcgacatccagaaggatgtgcatgagctggaacggcggctcgacgcgctgcgggcgctggccgaactcgtgtcgcgcttcgtcaccttgctggagcgggaggatgtcgcccgcggcaccgcccgcctcgccgccatgatcgaggcgggcgccgcgttgatcgccaatctgcgcgaacggcgcgacacgctggcggaactggacgacatccagcaagacatcggccgctgcgatgcggagatcgcggcactgggcgatcggcaggacagcctgctcgcccagtccgtggcggagggtgctgccggcaagcgtgccgtggtcgccagcgaactcaaggccgtggacctggcccgcaccggcgtcgtgcaacggctcgaagcccgcttccgcgcggccgcgctcggcgccagcctgctcgaccatcgcgagcggcttgcccccctgaagctcggcgccctgttccaggcgctggaggcgctgcggcagcagagcgacgggctggagccgccgacatggccgcgcgatccgctggcgatggagtatctgatcgccaccgcccgccgcagcgccatcgatagcgtcgccaagatccaggaacggcgcgaccaggcgatcgcccagcggcgtggcctgcaggacgaactggccgatctggtcgcgcgccgcgacaaggcgcgcgccggccaggtgagcctggatgatcgcaccatccgcctgatggcagcgctggagcgggagaatatgcgcccgcgcacgctctgtcaggtggccgaaatcgtcgatccgcaatggcgcgaagcggccgaggccctgcttgggcgcgaccgcgaggcgatcctggtcgatcccgaacatgcgtcccgcgcggtcgagatcgtgcgcgccaaccgtgacggcttccgcggatgccgggtcatcaacagccgccgcctcgccgaacagccgcccggcttcgacaccgattccctcgccaccgtctttgccagcgacgacccattggcgatcgccttcctgcgcttccgcaccggccaggtgcgcctcgccggcacccaggcggaattgctggcgggcggccgcgcgatcatgcgcgatggcgcctataatagtggcatcgtggttgaggtgctgcgcacccgcgacctcaagatcggccgggccgcagccccgctgatggaggccgaactgcttgcccggatcgaggatcggcaggcgctgatcgccgtccatgccgaaaccgagcggttccacgatgatattcatcgcaagctgctgccgctgatggccgatgtcgatccggccgaccggctcgacctgctggtcgccgcgatcgaccagcatgaggaaagccgcaccgaattgcagcaccggatcgacaagatcgcgatgacggtcgatccggcgatccagcacaatctggacaaggtgaagctgcaactgcgcagcgctaccgaggaaaaggaagaactgatcggacggcgcggccagcttggacaggccaggatcgaaatccagcggcggctggatgcgggcgatgcccagcccggctcctggctctgcctgcgctcgcggcgcgccctgttcaaggatcgggtgcgctcatcggccagcctttcgatcctgcgcgaggcctatcgccagcagcgcggacgtcccctgccccgactggtgcaggagatgatgaagcgcgcggacgaggcccgcgacgcctatcaggcgttgcagggcgaaattcgcgagacgctgggccattaccgcgccgatttcgacaatagcgcgcccattgccctgcccggcgcgatcgcgaccgaagtgaagccctggctcgccgccaatatcgcggcgctggaggaaaatgagctgatccagtatcggcgccaggccgacgaagccgccgagcagatcggccagctgttccgcaccgccttcatccatgagctgaacgcccgcttcaacgatctgcgttcggagctggacaacctcacccgcgcgctgcggatgcggccgctccatggcgagatctacacgctccatgcccgtcccaaggaggaatttgcagcgctccaccggctggcgcgcgagagcgagcatgacgaactgaccttcgacgccctctttggccgggccgccccgcgcgacgccgaacatgcccaggcgctggcggaggtcgaacggctgctgagcgacgagtccctcgatttctcggcctaccaggattaccgcaactatttcaccttcgacctgcgcatggaggatgtgaacaagggccgcaccaccagctatgacaagcgcaagggcacggcgagcggcgcggagcggcaagtgccctattatgtggtgatcggcgcggcgctggccagcatctatcatggcgcgcgccggcaatatgagcggtcggaactgggtctgggccttgccgtgttcgacgaggcgttcagcaagatggacggccccaaccagcgcaccctgctcgaattttacgacgatatcgggctgcaggtggtgatcgctgcgccatcggaaaagcgcgcggtcgtctatgaaaatctcgacagcgtgatcgacgtgttccgccatggcgacaatgccagcgccgaagccgtccgcatcaagccccatgcccgcacccagatgcgcgccgccaacccgcagcatctggacgatgccgcgctggccgaacggctcgatctcttcgcgctggacagcacggaatag

SEQ ID NO: 46348 - DNA, 1467 bp, Ralstonia sp. MD27
atgtcttccgctcgtcgggccggccagtatgacgcgctgcggcgccagcccttgtggcagttgttggccgccgacaacgcgccacaagttctggcaattctcgagaatctctggcttgagcaagagcgcaccttgttgagctcaattgcccaagagcggctcacgcgtgaactgactcgtttgcgtgaggaggggtacaacttgccccagactgcgcagtcctacttgtacgagtggctcaagcatggctggttggagcggcgtttgcgagtgggttcctccgaggaagagtacgaactctccgcgccggcagtgcaggctctgcggtttgctcagaaccaattgaagcctcgcaataccgccacagaaagccggttgaccagcgtgattgagcaagtcagccacttggccgaagagaccaacaacaatccggaggcccgcctggcacggttgcttgccgagcgtgagcgcttggacaaagaaatcgagcaaactcgagcgggacacatcaagacgttaacttcggaccaagcacttgagcgtgctcgggaaatcatttcactggttgaggacctagcggtggactttcaccgcgttcgggatggcttcgacaagctcaaccgtcagcttcgtaccgacatcctgcaatacgatgagtcgcgtagccgcgtactcgaagccttgttcaacggcgttgacctcattgcggagagcgaagaaggcaagaccttcaacgccttctggcgtctgctgacagacaatgcccaatccgccacgctgctggacgccttggatgaagtgttgagtcggccatttgctcgccgactagacccggaagagcgcaagttcctgcaccgtctaaccgaccggctgatgaccgaaggtagcctgattcatgaggtgcagacgcagtttgcccggagcttgcgcacatttgtccagagtcgcgagttccaggagcaacgccgcttgcagacagtgctcaagcaggcgcaacaagctgcgctcggagccagagacactgtttctctggtgaggccgttaccgttccatttgacgttgactgtggctgagttttcgtcagcgggacagcttacgttgcacgaccctgaattacatgcgccgccaacggtggtgacgcaggtcgagctacctccgctggatttgagccaaatcgacgagatggtacggcagtcggacatagatttcccccagctcaagcgcaacttgttggagctgctgcggcatcggtctcaggtttcggtcggagaagtcttaaccatctatccggctacgcaaggcttgggctccgtgattggttatgtggctttggccttgaacaacggtgatgctggaccggcagaacaaaaggaaaccgtgttctggaccgaccgtcaggggtcgatttgcaaagcggctcttcctcttttctatttcgtaaaggagcgggcaagtgagcttcgctga

SEQ ID NO: 46349 - DNA, 675 bp, Ralstonia sp. MD27
gtgagcttcgctgactccgattcccaagctatgctgccaggttcggtcccggtcttgtttgaggacgaccagggccagctgctgttcgaggcgcgcaaggtgctcgtcaacctgctgaagggtccgctgctggatggctctcgaacacccgaccaatgggccgtgctcgtccgcgatgaggcgttgttgcgtgcgcggctgcatgaactgttcctagagctggtgctggacccacttaacaaggtggcgttcactcgaccagtggatgcggaagagcttgaagcaccttccttgctgcgggtgcgcgctctcaccttcctcgattcggtcttgctgctgtaccttcgccagcaattgcttgaagctgaagggcagggcgtccgtgctgcggtttcgttggccgacatggcggcggctttgagcgtctatgaaagtcatcagaacacggaccatgtcaccttcgtcaaacgagtcggtgccgccattgagcgggtcaaagacatgcatctgttgaagaagctgacggatgaccgattcgagatttctccggtattgcgtctgatttttaccgcagagacgattcaggcgcttggagccgtgtatcgctccctagttgaggggaagggcgcctcggcggaaggcaacaatactggcgccgaagaagcgcaagcatga

SEQ ID NO: 46350 - DNA, 3378 bp, Ralstonia sp. MD27
atggcaacacaggccacgattgatttcgacgcgggcttaccgaaggatgagccgcaatttctgctgacgcgtatccaactgcagaactggggtacgttttcggggcgctatagcattgacgttccagcagaaggcatgcttctgacggggaactcaggttcagggaagtcgaccatcctagatgcacatgctgccttgatgacgcgccccaagtgggtggacttcaacgtggcggcacgggaaggtgaccgtagcacacgcgaccgcaatttgatgtcatacctgcgaggtgcttggagcgagcaaactggcgacgaaggcgacgccgtggttcagtacctgcgcaaagaaactacgtggtctgtcctggctgaaacctatcggtcggataccggtgcggttgtgaccgtcgcacaggtgctttgggttcgaggtaagtcgacgactccgactgacgtgcggcgacgctacctgttgttggagcgcgctttggatttaggcgagctggatgcgttcgcacagtcagattttgatgtgcggctgctcaaacgcaccattccagagctgaacgtccaagaggactttgccccgtatgaggagcgcttccggcgcttgttaggtattgaccattctacggcgatgcgtttgctgcataagacccagtcgctcaaaaacgtgggggacctcaatgcgttcctgcgcgagtacatgctgcaagagccagaaacctttgctctggcggagaaattggttgatggcttcaacgaactgaacgaagcgcatcgagccgtggttaccgcgcgtgaccagcaagccgtgctggagccggctagcgaagcccatgagcagttgctggcagcggaaaaatcgttacgagagttgggggtgttgagccttcatatcgagccctacgtcgttcaatgcaaagaaacactgcttgagagtgcgattgagtctgccaaaactaggcgggccggcttggagaccgagcttaagcagaaaactcagaaggaagaggacgcccaacggtatttgggcttgttgcgcgagaagcgtaacgaccaaggcggccgcattttggagcagttgcaagcagacctgaagcaggcggagcggcagcgtacgcatcgaaccgagaagcgcgagcaggtacaacagcattggcaagtgctgggctgggcagcgccaactacaggcatcgcgtttgttgagttgcagcagcgagcacaggtccacctggagaccctgactgccaaacaggagacgttgtcggaggagcgcgacggtctcaagcgtcagcagcatcggctcggcgaagaattgcagacgttgcgacgtgaggtcgaagtgatggagacgaaacgctccaacatcccctcaatgctgttgacaactcgagaaacgctggccaaggccattgacgtcgaagagcacgaccttccgtttgcaggggaactgctggaagtaaaggcctccgaccgagaatggcgaggcgccatcgaacgtgtgttgaacggtttcgcgcagtctttgctggtcgacgagaagcactatcacaaggtctcgcagtacgtgaaccagactcggattgaccatcggctggtctacctgcgtatgacgcctcatgctaatacgccggttcggccggaagctgagtcgctgtatcacaagctggagtttgccaagaacgcgtcgcagacggggtgggttaaggaagagctgattgcccgattcaactacctctgtgcggacaatctggacgtatttcgccaggcgacccgtgcagttacgcgagaagggcaaatcaagcataacgcaagtcgccacgagaagaacgaccggttttctgtgaacgattcacggcaatgggttcttggcttcgataacagcgcgaaaatcgccttgctgaaggaggacgcccagcagattgcgctccaactggttgaggtggacgccaacgtcaagcagttggaaagctcccgccgagatttcgatgaccaggtacgtcatgcgcaggctttgcagtacttccagtgggatgacatcgacgtggcttcgatgctggccttgatatcgactctgcagaagcaattcgaagcagagaaggcggcgcgccccaaccttgagcagattaacgcggacatcgttcaacaggaccgagtttgtcgacaattgcttgatgacattggcgctatcaagggcaagttgcataccgcgaacgctgaagtggacgggttgcagctggcgttggagaacctctcatcggcgatgttggccacggagttgccgaacgccatgaaagtcgagctggaggcgcgttttgacgctgttgggaaggctttgacgctggagaccctccccgaaattcaccgtttggcggataagcaactggagaaggagcgcagccagcttgaaagtcaccgtactacgcagaagaccttcattgaggcacagtttggacactttgtgcgggagtggcctgccgaagccggcgggctcgatgcaacgctggctagcgcagaagacttcttccataagctgcgcaaaatcgttgaggatgggctgcctcgctatgtggagcgcttccgtaccctattgcgcgaacacagcgaccagaacttgacgctgctggcgacaaaactggaccaggagcggaaggccattcgcgagggaatggagcttgtcaatgtgagtcttgcgacagccccgtttaaccccggaacgcacttggtaattgatacggaagaccgtcagcttgaagacgtgcgccagctcaagcaagatttgcgcgatgcgttgagccatgcgttcgatggtgcgcaggatgaggacgagcaacggttccaaaagctgaatgtgctggtgaagcggttgtcgagttctgagacggtggaccgtaattggcgaaatctggtgctcgatgtgcgccagcatgtggatttcattgcccgggaaatggatgcggacggtgtggaggttgagcggtatcgaggcggctcgggcaagtctggcggccagcgtcaaaaattgacgtccacctgcttggcagcagcgttgcgttaccagttgggtggtcgcgaccgagcgaagccgcaatttgccacggtcgtgatggatgaggcgttcgataaggcggacgcggcattcacggaagctgccatgaatatcttcaagacgtttggctttcagatggtcattgcgaccccgctgaagtcggtcatgaccctggagccctttatcggcggggcctgctttgtggacatcagcgaccgtaagttctcccgggtcacgctcattccatatgaccgtcaggagaaaaagctcctgctgaaatccgatgttacctctgaggccgcgaatgaagttattgctgcctga

SEQ ID NO: 46351 - DNA, 1191 bp, Ralstonia sp. MD27
atgaagttattgctgcctgaggccctgcgcactcagttgcgcaaaacgtatgaacggcatcgtgcgagctggctagcgggacaagggtcctggccacaatgcctgccgttaggtacggctactgagaaggaggcagcccaggacatcgctagtgtgcggtgctggtgtgaatcgtggcgaggctggcagggctttgggcaagttggctgggtcgaacggcagtggcttcggttgggcactcaaaatctacccgaacaggtgacgtggaccgagccggagatggtcgcacatgacgctgacgagggagcggggtggcggcgtgcgcgtgcctgtttcgagacattggttgctacctggccagccctttccggaagcgtgcccgtagcccggctctgtattgaattggcggagtatgagtcgacagatttcgctcggctcattcaggtactgagctggctattggagaaccccgcctccaatctattgttgaggcagttgcctatcaacgatgtagataccaagtgggtagagaatcgcaaggggatggttgcggcactgctcaggcttttgcggccggagactgctctcgagaccgatttccacacgttgtgtggcttgcgtaaggcaccggctcagatacgcgtacgtgtactgtgtcccattcttcgcggaaaaattggtggactgtctgacttggaagtgcctgtggaggacctggtggcactcaaatggcaacccgaaacgctgcttatcgtggaaaacctggcgacaggtcttgcgttaccggagctgcagggtacggttgcggtgatgaagcttggaaatgcagtgtcgctgctggagcccttttcttgggtgccccaagaccgagttttctactggggtgacttggacacgcacggcttggctatccttgcgcgggcgcgacaggtgttcccgcaattgcgctcggtgctaatggacgaggtgacgttgcgggcctggccgcagttttggacgcaagagaaaagtcaggcgtctttgcaagcgcttccggaactgacagtagaagaacgcgcggtctatgacgggctccaccagaaccgttggggcgagtgcctgcgcttggagcaggagcggattccttgggtcattgcagaacaatgcttgcgcgaggcattgaacggtgtctgtttcaactcgtcaagatag

SEQ ID NO: 46352 - DNA, 1461 bp, Photorhabdus luminescens subsp. luminescens
ttgaatttccaaggattacaggcaaagtaccgccgactatttcaggaaagtgctgcctggaaactgttgagagctgataatgctcctttaattttggcatttttgggggaattgttttccgaggatagtgaagtcccttttagtcgtgctcgtgtgtcacttgatgcagagttggtacgctgtcgcgaacttggtctttgggaaactgaaacgggagcgggcacttatctcaataaatggattcgggaaggctggttgcgtgagatggatgacacattaactaaaacggatgccagtgaaattgcactccgttttagccaggggcttgatgaacgcaattcaggaactactgcgtctcatcttcgaattgtgcaggaagcggtcagggactttgcagtagcgattagcccaaatgccgatgagcgtgtcgcacttttggaagatagaaaatctgagatccaaagagagattgatgctctaagggccggcgttgtgaccgaattaaccggggctgaacagcgggaaagaattcgtgaaatttaccaactggcttctgttttaacgggtgattttcgccgtgttgaagatgaaattcgtcggttggatcaggaaattcgtattcaaattattgagggggactccaccagaggagatatcctgcttgctgttttagaaaaagaagcattactggctaaaacggatgccggtagtgcgtttgaaagcttttttgatttgttatgtgatcaaaatagaactatggagctacgagatcagcttcgcagtattttaagtcgtccggtcgcagaacacttaagtgcccaacagcggcaattcttaagtcagctcatgagagaactaagccgcgagagtgacagagtttttcaaattaggcgaagaacggaagagagtttacgtgcttacatagagagtggtactgctcaagaaaatcgtgcggttgatagattgcttggtcaattagaacgactcgctattgaattgaagaactcaggttatgacttgcaaacggcaacaacgctgtcattgcctgttggcgcggcaagtattagctctcctgaaagcatgctgcttaaatcacctgatgaaaagctggatacttcaggtgctgaagaacagctcaactctcgggaaccgagtatgcaaatgctggattgccttgatgttgttcaaattcgattaattgctgagagagcgttagcaacgttaaaagagtttggtccaatgacaattgcgtctattgcaaattatcagccgattaattcagggttggaggagttagttgcctatttgcgggtggccaaatctgtcggggctgcattattggaagaaaaggaatcaattgaaatcagtgacaaacggggagttcgcttgcgggcgtctatacccactttcctgctgagtgccgacctgtttccaaacagtttggatgaattggttctttag

SEQ ID NO: 46353 - DNA, 3396 bp, Photorhabdus luminescens subsp. luminescens
atgactgatcaaactctttcggctaattcattatttcatgttggtcaaatcagattagctgaactctcagtttataactgggggtcatttaatggcttgcataccgcgttgatagatcctatgggaacgctggtcactggagataatggcgccggaaaatcgacgtttattgatggccttatggctttgctgcttcctgctggaaaggcaacttttaatgtggctgcggcgcagggtgatcgctctgaccgaactttactttcctatatgcggggaagttttggatctgcccatgacggagcggggacgagagtcagaagtaagcgtgaatatggcgtggtgactgggcttagggctttgtatcaaggtgatgatgggtcaaaaatcacgcttgcggcgcttttctggattactaaatcgacgaatgtgcttgcggatgtgacacgcgtttatgttgttgccaaaagagacctgactcttaaggaaatgctgaatgcttttgggaacggtaatgctcgggcattcaagcaatggcttcgtgatgacccaacgattacgtgctgtgatgataatttttctgattatcaagagttgtaccgaaagctcctgtatatggacaataagaatgcgcctgcgcttttgtcgcgggcgttaggtctgaaaaaaattgatgatttaaccgggttgattcgtgaattggtactggaaccgagtacggtcaaggatgatgctaaaaaggtcgtggaagagtttgctgatctggtggcaattcatagtcaattagtggatgcaagagcacaaaaagtgcacttatccaggttacctgaactcaacgcaattatcgaaaaaacaacgaaagaatttgcggagctgatagctgagaaaaatagtctcccggtctactttggggagattttcgcacaattgtggagtgaaaaaattgccgatattaaggctgaactggaagcgctactcctcaaaattagccaagctgaagagcagaaagtggatgcgaataagttggttgagcgaaggcacgaggaatatcttcaatttggtggggataaaatagagtcgctgagaaaagaggttgatcatacccaagttcaattgagtcgggtggttagaaattcatcgcaatatcaaactcatgccaacgagctggctcttccctctgtattagaggaggcggtgtttcttaaaaatcaatccgtagcatcaacccggcttgccagtattcagcaagaagaaggagagtatcaggacaggtttgccaccatcagtgctaaattcagtgggctacaagccaatatccatgatatctctcaggaaattcgtgagatcgaggcaagacccgattccaatattgatgtgaaatatcagcaactgcgagatgaactggttaattccttggaattaagtaaggaccaatgtgtatttatcggtgagcttatcgatgtcgaagatcgtgaaaagagctggcagggcgcgatagagagggcgttaggcgggttacgaaccacacttgctgtgccacatcattgttattcgatggtgactcgctggttgaacgcccggcatacgggtttacatgtccgtgttcaagttgtgaatgattctacgactcaaggccaatcggcggcgtttaagtctgatggttatctaaagaaattggtatggcgtaatcacccttatcgagagtggctcaagcaccatttgcagcgatttgacctgcaatgtgtttcaagcacggaagaattggatcaaaccccgttttcgatgacacagcaggggctaatgcacatggataaggggcgttttgagaaaaaagatcagcaccggatagatgacagaaggcgctggtgtctgggtttttcaaataaatcacgtttagccattcttaataacgataaaaaagagttaactctgcaactggcggaaaccgagaaaaaggtgagtcaagcccgtcaagatttgaattctgtttctgatcgtaaaattctttgggagaagatccaaggttaccgctgggatgatattaatgctccttactggcacgaaaagctgtctgatttgcaggctgatctcaaggtgttggaacagtcagggggtgatcttgagaaggccagagagcgttgggaatctgctaaagagcagctagttcaaattcaatcggtattaaatcagctcaactctgattctggcggcgttaaaaatacgctgaaaaatgcaaaagaagaatggagtaaagcgcaggcaaaagcgtcgaaaggattacctgattcagccaggcaattacttgagattcgggttggcgtacttaatacaaacgatttaggccggatgtctgaattggtgttgaaagttgaagacgatttggaacgtctgttagatattagccgaaacagtaaagacaaagcggaaagattagccattagcgttatggtctcattcaggtctaacgataaatggcaagtcttcacggttgactggcaaagcaatattgatggcttaccggattatcttaatcatttgcgacaactggaagaggaagggcttcccaaccttgtggagcagtttattgagcggttgaataagcatgcaacgcagtcactggcgcggattaaaactaagcttgaatctgaacgggaagatgtcctcgagcggattgatatcattaaccgggtcctcaagcgtacagagtttcgagtggggacacatttaaagctgggttcaaagagagagaaattcccacatgttaatgagtttgaacagcatttgcgtaaggtgcttagtcaggtaaccagtgatgaccatgaagcacggttccgtcaattggctaaggtagttgaaatacttgggaaagcaagtgcgccgggctcctcaaatacattggaaagtttaaggctgcttgatcctcgttatcagatgtcgttttatgctgaagagttggatagtaataccggtgagattcgtgatgtattggagtcatccagtggaaagtcaggtggggagaaagagtcatttgcggcgacgattgtagcggcaagtctggcctatgttttgacgccagatggctatgatcgaccggtttactgtactgttttcttggatgaagcattctcaaatacggctgaaacggtaagtcggcgtgtgctccgagtatttagagagctccatattcacgttaatttgattacgccttataagaacttgaatctagcaagagaatctgctcgttccctgctcattgcggaaagagatcaggaaaaccatgacagccatttatgtgaagtgacttgggaagagattgaccgaagaatgaacgaagggaaggagagaaagttgcctgatgaggctgctgatctgggtattgagtttgagaaactgacatga

SEQ ID NO: 46354 - DNA, 1197 bp, Photorhabdus luminescens subsp. luminescens
atgaaaagagggcagtatgaggtgagttgggggttattgccagcacaagttaagagcatcattaggcagtgtgagtgggatagtcttccctcactaaaagcccggttactgggcatcaaggcattccctattcgcgttggcttgaagccacccaaagggaattctgccatattagatatcattcatttccaacggtttattgatgagtggaaatcatttccccatcaagatgtcgtggagtggtcttctaagaatttcagggagctatctgagcaacgcattccaacgtttgttgtcattgaatcgatgcaatgtctgattcaatttttagggagtgatgccctttcccgaagtcaggtatgggaaagaaatatgaagccatttttgcgggttgataaagatctctatcctgcattggttaagcgtatagatattgtggaaaaactttcgttgagagatgcggaattattagcaaagctgctgccgcaattaaagcaaggcttaggggaaggacaatatctaagagcgctgccactcattgggattgatactaagtttcttgagaatcaccaaatcctgatcgaagagttggccgatatcattcacgatggggctgtttcggcatcaggtggtcttattgcttggttggggtgttcaataaatcctaaaggttggttaactatcaggccgctttgccgtgctgcgatggctgaacttggtggaataccgatactacaaatacccggcgaattacttagacagtacgaacttccggcttcgaatatattagtagtagaaaacctacagtctggtctggcattacccgaaatgtttgacacgatcgcggtgataggaggagggaaaaacattgcttggatggatgcagtctggttgaaagataaacgtgtaggatattggggagatattgatacttggggtttgtctattctcagtgacgccagaaacaagtttgtggatattgagcctctgatgatggatgttgaaaccgttaaagttcatgaagagagaatggttcctgaatcaaatccagttgaatccaatccttcatcgctaaatgaggatgaagcaaagttgtttaatgatctcatttctggccggtttcaatcttcacgtttagagcaggagcgcctttcatctgattacattagaaacaagctcatgaattggctgtcctaa

SEQ ID NO: 46355 - DNA, 1500 bp, Yersinia similis; identical to SEQ ID NO: 46317

SEQ ID NO: 46356 - DNA, 759 bp, Yersinia similis
atgacaggcatctttgatcggttagtgaatacaggcaacggagagctaacccaagatgtgctgtcgcatatcgaaagggatgatatgacaaccgatgcattgcctgatacggacagcgagtctaccgaagagaagcgcactcacaagcgagtacgtgaggctgctcaggagcttcttaagtacggtttacttgaagagagtcataaacccaatctgtatcgcatcgcactgatccacaccgaagaaatggccagcattttggagcctctcgatctgagtatggggatcgatgaggttcgtgggctactctttgtcatggtacggcagcaggaaacctcggaacaggatgattggacgcatccgttggtgcgccggcagcgcttgaatctggaacaatcgttactgattgccattttacgtcagcacttcattgcctatgaacaggaaaacggaataggtgccagccaggcattggttgccgtggatgatttgatcccacagctacaggtgtacctgggggatctgggcagtgatgccagagagcgaacacgggtgattaatttattagatcagctcaaagggcatggattggtttctactccagacgctcatgaacgggtgattgttcgcccaattattgctcatctggccaatcctgagaatttacaagctttgttagcatggctacgagatcaggtggaaaggagcgagttgccgggtgacgccagtgaactgatgggtggggaggagatgccatga

SEQ ID NO: 46357 - DNA, 3291 bp, Yersinia similis
atgaaacaatcccctctctggtgcgatagcgaaaccttcatattgacacatttggatctttttaactggggtggcttcaaaggggttcatcgggcggttattgatcccgcagggacggcggtgatcggccccacgggtagcggtaaaacaacgcttgttgatgctctgatgacgctgttgtgcgctaaccctcgctataatctggcgtctacgggggggcatgagagcgaccgggatctggtgtcctatgtgcggggggtatccggccccggcgatggcggtgccgggcagtcacatattgcccgacagggcaaaacaatcactggggttgtggctacgctggcatgtgatacacagcaaattcgcttgggtgtcttgctgtggttcgagggcaccagctctgctgcaacagacatgaaaaaactgtggctgttcagcgatgcccctggacacacccttgagcattggttgaatgtacaccatgaaggggggatgcgggcattgcgacagatggagaaagaaggcacggggatctggacctacccgagtaaaaaatcttatctggcgcgcttgcgtgattacttcgacgtgggcgaaaacgcgtttacgctactgaatcgcgctgccggcctaaaacagttaaacagtattgatgaaatcttccgtgaattggtgctggatgatcactcagccttcgagcgtgccgccgaagtcgccaatagtttcgatgatctcactgagatttaccaggaattgcaaatcgcccgtaagcagatacggtcactacaacctattgccgatagctgggggcgttatcaggtccagtcacgcctgctggaagaacggcaggcactcgaggtcattttgcctatctggttcgccgagcaggcccatggtttgtggttggtgcaaacacatcggctagagaaggaaatcagcgagactgaatccaccgtaaaagaattacagcggcaacaggccgaacagaaaaagcaggtgaatgagcggctgaaacgctattgggatgtggagggaggaagtgttgatgttctcaaagatcgcattaccgattggcagaaaacctgccatcaacgggagatgcaggcagcaaattatcaacggctagcaataaacctcgatctatcacaggagttgaccgctgcggggttgcaagcgaatcaacagaaagccgaaacacgcctgacggccctttctgaagagataagtgccgccgagcgaagcgcattcagtaaagggattaccgatcacgagttaactgagcagcttcagcagttatgtcaagaaaagatagacgttgagcgccggcccgaatctaacctgcctagccagtttcaagcttttcgcagcgcgttggctaccgagttgggcctggatgatacaaccttgcccttcgtcgccgagctggttcaggtcaagcaggaggagaaatcctggcgtggtgccatcgaacgagcaataggcagccatcgcttacgtatattggtcccccacgcgtcggctgatgctgccctgaattgggtcaatcaacgacataaccaactgcatgtgcgtttactcgaagtgaagtcgccagcgtcccagcccctatttttccatgatggttttacgaagaaacttacctacaaagaacacacctcccgagagaccgtgaaagccttgttggcagatattgatcgccattgtgtcgaaaataccgatcaattacggcataccccacatgccatgactgcgcaggggctaatgtcgggcaaggcgcgtttcttcgataagcaggaccaaaaacgtctggatgagggttggctgacgggttttgataaccgtgatcggctggcttttctggcggagcagatacaacagaaagaacaacagctacagatagcgacgcaagcgcttcgtcttgctcaggctgccgtgggtaaattgcaggaacaagccaatgcgttagcacatattcaggcgttgaacttcgagagtattgacctacccactgcgcagcgccaactggaagaattacaggctcgtctggataggctgacccatccgcagtccgatatcgctattgctaaggccgcactggatgaggctgaagcacggcaaaaagagcttgaaaggcaatatcaacaagaagtgactgcatgtgctggtttgaagaaggatctcgaacgtgcagcaatgctcagccgtaaagtccataacatcgcaaaacaaggcatgaccggtgcactacaagcgttaggcgcagcgcattttcctcaggtggcccccgagcaactggacgacattcaggacattgaacgtgagcatgcacgccaattgcaaggccgactcaatgaggtcaatgaccgattacaacggttacgggatgagcttatcaagcggatgtccgacgccaaaaaagaggatactggcgcgctttcggaagtggggcgggaattagacgatattcccaactatctggcgcgcctacagaccttgaccgaagaggcgcttcccgaaaaacttaagcgtttccaagaatatctgaaccgttcctctgatgatggggtgacgcagttactcagtcatatcgaccatgaagttgcgttgatcgaggagcgtctggaagaacttaatgacaccatgcgccgagtcgattttcagtctgggcgctacctgtgtttgatcgccaaaccggtggtgcatgacagtatgcgcacgttactgcgcacgcaacgccagcttaactcggctcgtttcgtcgatgatgatggcgagagccaatataaggcgctgcaagcgttggtcagattactgaaagatgcctgcgaacgcaaccgcacccaaggggccagagcgttgctggacccccgtttccgccttgaattcgccgtttcggtgattgagcgggaaaccgggagcgtcattgagactcgtaccggttcacaaggcggtagtggtggagaaaaagaaatcatcgcgtcttatgtactgaccgcatccctaagctatgcgctgtgccctgatggtcgcaccaagccgttgttcggtactattattctggatgaggcattctcgcgtagctctcatgttgtcgccgggcggattatcgctgccctgagggaatttggtctgcatgcggtcttcatcacgcccaataaggagatgcgtctgttgcgtcatcacacacgctcggcgatcgttgttcatcggcgtgggccggattccagtctggtctcattaagttgggaagatctaaatgaacatcatcagcagcgcaacaaaccaatatga

SEQ ID NO: 46358 - DNA, 1155 bp, Yersinia similis
atgaaatcacccattgatattggcaagcaattggccagacagtggcatcagtctaaggtgaggtctgaacgcttactcacacccggctgctggcctttgcaactgccaataggtaaaccgtcggcaaagatttttactgcaaatacgcaggtagtgcagcgccatgtcgaggtctggcgtcaggtcagtatcggtcttgttgaatgggaatccgttagctaccgtgccagcctcacgcctgtttcaattcccgttcgatggtgtttgcgcaccccctctgagtggatcaatgcagcatcgaacctgcaagtcagtcaggaatttcaacaacttgagcaactggtagcgcaggttgataaatcctttcatgccttgctgattaaccagcgggcgctttggctgcataaagatccacatgaggtgattaccgcggctaatcttgcctgcaaattgacacccggctgtgctcaggggcgacctttacgcctgctgtccgagtttggagtagacacgaagttcttcgaaagaaactattcgttgctgacaaaactacttgatgagcgttttgagggggaggcctctgggcagggtctggcaacctttcttgatgccttcgaagaaagcagccactgggtattggtcactccgttggctcccggcatactccccttcaacatgagtaaggtcacaacaacagaactggcgagcgtagatttaccatgctcacgcattcttatcgtagaaaatgaacactgtattcaccagttaccgcaattgcctgacaccattgctattctgggctcaggtctggacttgcagtggctgatttctcctaatttaaagagcaagtcgataggttattggggggatatggatacttgggggctattgatgttggcgcgggcaagagcgttccagccagcgattaccgcacttttgatgggccgcttgttatttgaacactacgcatcaggctcagcggtcgcagagccggtcaacgctcaacaggcggttcccgaagggcttcatcaccacgaagcagacttttaccgatacttattgtcacaaccgcgggggcgtcttgagcaggagtatttaccacggggcgtggtcgaaatggcgcttactgaatgggtcggtcacatttctctttaa

SEQ ID NO: 46359 - DNA, 1500 bp, Yersinia pseudotuberculosis; identical to SEQ ID NO: 46317

SEQ ID NO: 46360 - DNA, 759 bp, Yersinia pseudotuberculosis; identical to SEQ ID NO: 46356

SEQ ID NO: 46361 - DNA, 3291 bp, Yersinia pseudotuberculosis; identical to SEQ ID NO: 46357

SEQ ID NO: 46362 - DNA, 1155 bp, Yersinia pseudotuberculosis; identical to SEQ ID NO: 46358

SEQ ID NO: 46363 - DNA, 1353 bp, Pseudomonas aeruginosa; identical to SEQ ID NO: 43741

SEQ ID NO: 46364 - DNA, 750 bp, Pseudomonas aeruginosa; identical to SEQ ID NO: 44461

SEQ ID NO: 46365 - DNA, 3306 bp, Pseudomonas aeruginosa; identical to SEQ ID NO: 43743

SEQ ID NO: 46366 - DNA, 1353 bp, Pseudomonas aeruginosa; identical to SEQ ID NO: 43741

SEQ ID NO: 46367 - DNA, 750 bp, Pseudomonas aeruginosa; identical to SEQ ID NO: 44461

SEQ ID NO: 46368 - DNA, 3306 bp, Pseudomonas aeruginosa; identical to SEQ ID NO: 43743

SEQ ID NO: 46369 - DNA, 1182 bp, Pseudomonas aeruginosa; identical to SEQ ID NO: 44163

SEQ ID NO: 46370 - DNA, 1353 bp, Pseudomonas aeruginosa; identical to SEQ ID NO: 43741

SEQ ID NO: 46371 - DNA, 750 bp, Pseudomonas aeruginosa; identical to SEQ ID NO: 44461

SEQ ID NO: 46372 - DNA, 3306 bp, Pseudomonas aeruginosa; identical to SEQ ID NO: 43743

SEQ ID NO: 46373 - DNA, 1182 bp, Pseudomonas aeruginosa; identical to SEQ ID NO: 44163

SEQ ID NO: 46374 - DNA, 1353 bp, Pseudomonas aeruginosa; identical to SEQ ID NO: 43741

SEQ ID NO: 46375 - DNA, 750 bp, Pseudomonas aeruginosa; identical to SEQ ID NO: 44461

SEQ ID NO: 46376 - DNA, 3306 bp, Pseudomonas aeruginosa; identical to SEQ ID NO: 43743

SEQ ID NO: 46377 - DNA, 1182 bp, Pseudomonas aeruginosa; identical to SEQ ID NO: 44163

SEQ ID NO: 46378 - DNA, 1353 bp, Pseudomonas aeruginosa; identical to SEQ ID NO: 43741

SEQ ID NO: 46379 - DNA, 750 bp, Pseudomonas aeruginosa; identical to SEQ ID NO: 44461

SEQ ID NO: 46380 - DNA, 3306 bp, Pseudomonas aeruginosa; identical to SEQ ID NO: 43743

SEQ ID NO: 46381 - DNA, 1182 bp, Pseudomonas aeruginosa; identical to SEQ ID NO: 44163

SEQ ID NO: 46382 - DNA, 1353 bp, Pseudomonas aeruginosa; identical to SEQ ID NO: 43741

SEQ ID NO: 46383 - DNA, 750 bp, Pseudomonas aeruginosa; identical to SEQ ID NO: 44461

SEQ ID NO: 46384 - DNA, 3306 bp, Pseudomonas aeruginosa; identical to SEQ ID NO: 43743

SEQ ID NO: 46385 - DNA, 1182 bp, Pseudomonas aeruginosa; identical to SEQ ID NO: 44163

SEQ ID NO: 46386 - DNA, 1353 bp, Pseudomonas aeruginosa; identical to SEQ ID NO: 43741

SEQ ID NO: 46387 - DNA, 750 bp, Pseudomonas aeruginosa; identical to SEQ ID NO: 44461

SEQ ID NO: 46388 - DNA, 3306 bp, Pseudomonas aeruginosa; identical to SEQ ID NO: 43743

SEQ ID NO: 46389 - DNA, 1182 bp, Pseudomonas aeruginosa; identical to SEQ ID NO: 44163

SEQ ID NO: 46390 - DNA, 1353 bp, Pseudomonas aeruginosa; identical to SEQ ID NO: 43741

SEQ ID NO: 46391 - DNA, 750 bp, Pseudomonas aeruginosa; identical to SEQ ID NO: 44461

SEQ ID NO: 46392 - DNA, 3306 bp, Pseudomonas aeruginosa; identical to SEQ ID NO: 43743

SEQ ID NO: 46393 - DNA, 1182 bp, Pseudomonas aeruginosa; identical to SEQ ID NO: 44163

SEQ ID NO: 46394 - DNA, 1353 bp, Pseudomonas aeruginosa; identical to SEQ ID NO: 43741

SEQ ID NO: 46395 - DNA, 750 bp, Pseudomonas aeruginosa; identical to SEQ ID NO: 44461

SEQ ID NO: 46396 - DNA, 3306 bp, Pseudomonas aeruginosa; identical to SEQ ID NO: 43743

SEQ ID NO: 46397 - DNA, 1182 bp, Pseudomonas aeruginosa; identical to SEQ ID NO: 44163

SEQ ID NO: 46398 - DNA, 1353 bp, Pseudomonas aeruginosa; identical to SEQ ID NO: 43741

SEQ ID NO: 46399 - DNA, 750 bp, Pseudomonas aeruginosa; identical to SEQ ID NO: 44461

SEQ ID NO: 46400 - DNA, 3306 bp, Pseudomonas aeruginosa; identical to SEQ ID NO: 43743

SEQ ID NO: 46401 - DNA, 1182 bp, Pseudomonas aeruginosa; identical to SEQ ID NO: 44163

SEQ ID NO: 46402 - DNA, 1353 bp, Pseudomonas aeruginosa; identical to SEQ ID NO: 43741

SEQ ID NO: 46403 - DNA, 750 bp, Pseudomonas aeruginosa; identical to SEQ ID NO: 44461

SEQ ID NO: 46404 - DNA, 3306 bp, Pseudomonas aeruginosa; identical to SEQ ID NO: 43743

SEQ ID NO: 46405 - DNA, 1182 bp, Pseudomonas aeruginosa; identical to SEQ ID NO: 44163

SEQ ID NO: 46406 - DNA, 1353 bp, Pseudomonas aeruginosa; identical to SEQ ID NO: 43741

SEQ ID NO: 46407 - DNA, 750 bp, Pseudomonas aeruginosa; identical to SEQ ID NO: 44461

SEQ ID NO: 46408 - DNA, 3306 bp, Pseudomonas aeruginosa; identical to SEQ ID NO: 43743

SEQ ID NO: 46409 - DNA, 1182 bp, Pseudomonas aeruginosa; identical to SEQ ID NO: 44163

SEQ ID NO: 46410 - DNA, 1353 bp, Pseudomonas aeruginosa; identical to SEQ ID NO: 43741

SEQ ID NO: 46411 - DNA, 750 bp, Pseudomonas aeruginosa; identical to SEQ ID NO: 44461

SEQ ID NO: 46412 - DNA, 3306 bp, Pseudomonas aeruginosa; identical to SEQ ID NO: 43743

SEQ ID NO: 46413 - DNA, 1182 bp, Pseudomonas aeruginosa; identical to SEQ ID NO: 44163

SEQ ID NO: 46414 - DNA, 1353 bp, Pseudomonas aeruginosa; identical to SEQ ID NO: 43741

SEQ ID NO: 46415 - DNA, 750 bp, Pseudomonas aeruginosa; identical to SEQ ID NO: 44461

SEQ ID NO: 46416 - DNA, 3306 bp, Pseudomonas aeruginosa; identical to SEQ ID NO: 43743

SEQ ID NO: 46417 - DNA, 1182 bp, Pseudomonas aeruginosa; identical to SEQ ID NO: 44163

SEQ ID NO: 46418 - DNA, 1353 bp, Pseudomonas aeruginosa; identical to SEQ ID NO: 43741

SEQ ID NO: 46419 - DNA, 750 bp, Pseudomonas aeruginosa; identical to SEQ ID NO: 44461

SEQ ID NO: 46420 - DNA, 3306 bp, Pseudomonas aeruginosa; identical to SEQ ID NO: 43743

SEQ ID NO: 46421 - DNA, 1182 bp, Pseudomonas aeruginosa; identical to SEQ ID NO: 44163

SEQ ID NO: 46422 - DNA, 1353 bp, Pseudomonas aeruginosa; identical to SEQ ID NO: 43741

SEQ ID NO: 46423 - DNA, 750 bp, Pseudomonas aeruginosa; identical to SEQ ID NO: 44461

SEQ ID NO: 46424 - DNA, 3306 bp, Pseudomonas aeruginosa
atgaagcaggcactcctttggcgtgacagcgagaccttcattctcaccagcatcgagctctataactggggcggctttcagggctatcaccgtgccgagatcgacccctccggtaccgccgtgatcggcccgacggggagcggtaaaacgacactggtggacgctctgatgaccttgctgtgcgccaatccgcgctacaacctgacatccacgggcgggcatgaaagcgaccgcgacctggtgtcctatgtccggggagttaccggccccggggacggaggtatagagcagtctcatatcgctcgccagggtaagacagtaaccgcaattgcggccacgctcgagcgtgatggtgcgcaggtacgactgggggccgtgctctggttcgaaggcacaagctcctcggcatcggatctgaaaaaactgtggctgttaagcgagtcccccgagcagactctggagcattggctcagccagcatcacgcaggcggtatgcgggctttgcgtcagatggagaaggatgggacgggtatctggccttatcccagcaagaaagctttcttggccaggctgagggattacttcgaggtcggtgaaaacgcattcaccttgctcaaccgcgctgccggcctgaagcagctcaatagcattgacgagatctttcgcgagttggtgctggatgaccgttccgccttcgagcgggccgccgaggtcgccggcagcttcgatgatctaaccgacattcaccgagaactggaaacggctagaaagcagcagcgctcattgcagccggtcgccgatggctgggagcgttaccaggtcttgcaagaacagctgcacgataagcaggctctcgaaggtatcctcccggtttggttcgccgagcaggggtatcgactgtggttggctgaaaccaacaggctcgagaaggagtacaaaaaggccgaactggatcaggagcaatgcaaaagtcagcttgaggcccagaaaggtgtggtcgatcaacatcgccagcgctacctgcgagtagggggcgcagggatagatcaattgcgcgagcgcatcgctgattgggtgagggagtgcgataagcgcagcctgaaagccgagcaataccaactcttggccaaaggccttggactagcggatgagttatcggccgctgctctcaaggagaatcagcagcatatcgcggcacgcctggaaatactggaccaacaaattactgacgcgcgccaaaaggcgttcgacgcaggcctcgtccagcaggaactcaatggtcgcctacagaccttacagcaggagggtgctgaggttgagaaacggccaggctcgaacctgcccgggcaatttcatgctttccgaagcgatctggcgcaggcgcttggtgtcaatgagtcggccctgcctttcgttgccgagctggtgcaggtcaagcccgaggagctggactggcgtggcgccatcgagcgggcaatcggtagccaccggctacgcatcctggtgccgcaggactcatcccaggccgcactgcgttgggtgaatcaacggcacaaccgcttgcatgtgcgcttgttggaggtacaggagccgacgtcgcgccccgtgttcttcgacgatggttttacccgcaagctgaccttcaaggagcatccgtaccgagaagccataaaggcactgctggcggacaatgaccgccactgcgtcgaaagcccggagcaattacgtcatacccctcatgccatgacggctcaggggctgatgtcgggcaaagaacgcttcttcgacaagcaggaccagaagcgtctggacgaagactggctgaccggcttcgataaccgtgaccgtctggccttcctggctgagcagattcgcgaggtcaatgagcggctcgagccagccaagctcgccttggatgctgcccagggcgacgttcgtcagttggagactcaagcttcgctgctgaatcgtgtcaaagaactgcagttcgaggatattgatctgccgggtgcccagagtcagctggagtcgctgcgtacgcaactggccaccctgacgcgccccgattctaaccttgccatgatcaaggtcgagctggatgcggccgaggccctgcaggagtctctggatcaacagctccgccaactgatcgaacagtacgttcagttaaaaactcagtttgaccaggccgcatccgctacccgtaaggcctataacagcgcggagaaagggctgaacgatacgcagcgtgaactggcgcaagcgcatttcccgactctgaccgcggatgacctcggcgatattgtcgagctggagcgcaagcatacgcgtgagcttcaagggcagctcaaagcgcttggcgagaaactgggcgatcagaaatcagagcttgccaaacgtatgtctgatgccctcaaggtagacaccggggcgcttgcagaggtcgggcgagagctggtggatgtccccaggtatctggagcgtctgcgtgtgctgaccgaggaagccttgccagagaaactcaagcgcttcctggaatacctcaatcgctcctcggatgacggcgtcacccaactgctcagctatatcgaccatgaagtctcgatgatcgaggaacgcctggatgacctgaatagtacgatgcagcgtgtcgactttcagcccggacgctatctgcgcctggttgcaggcaaggtcatccatgaaagcctgcgcaccctgcagcgcgcccagcgccaactgaactcggcgcgtttcatcgatgatgaaggcgagagccattacaaggcattgcaggatcttgtggggttgctcaaggacgcctgcgaacacagcaggaatcagggagccaaggcgcttctggatccgcgcttccgcctggagttcgcagtatcggtgatcgatcgagaaagcaggaatgtcatcgaaacccgaacaggttctcagggcggtagcggtggcgagaaggagatcattgcctcctacgtgctgaccgcttccctgagctatgcgctttgtcccgacggcagcagccggccgttgttcggcaccatcgttctcgacgaggcgttctcgcgcagctcccatgcggttgcaggtcggatcatcgctgcgttgagggaattcggcctgcacgctgtcttcatcacgcccaacaaggaaatgcgcctgttacgccaccacacgcgttcggcagtcgtcgttcatcggcgcggcctggagtccagtctggtttccctgagctgggaagctttggatgagcatcatcaacagcgcatcaaggccatgcatgaagtcgcccactga

SEQ ID NO: 46425 - DNA, 1182 bp, Pseudomonas aeruginosa; identical to SEQ ID NO: 44163

SEQ ID NO: 46426 - DNA, 1353 bp, Pseudomonas aeruginosa; identical to SEQ ID NO: 43741

SEQ ID NO: 46427 - DNA, 750 bp, Pseudomonas aeruginosa; identical to SEQ ID NO: 44461

SEQ ID NO: 46428 - DNA, 3306 bp, Pseudomonas aeruginosa; identical to SEQ ID NO: 43743

SEQ ID NO: 46429 - DNA, 1182 bp, Pseudomonas aeruginosa; identical to SEQ ID NO: 44163

SEQ ID NO: 46430 - DNA, 1353 bp, Pseudomonas aeruginosa; identical to SEQ ID NO: 43741

SEQ ID NO: 46431 - DNA, 750 bp, Pseudomonas aeruginosa; identical to SEQ ID NO: 44461

SEQ ID NO: 46432 - DNA, 3306 bp, Pseudomonas aeruginosa; identical to SEQ ID NO: 43743

SEQ ID NO: 46433 - DNA, 1182 bp, Pseudomonas aeruginosa; identical to SEQ ID NO: 44163

SEQ ID NO: 46434 - DNA, 1353 bp, Pseudomonas aeruginosa; identical to SEQ ID NO: 43741

SEQ ID NO: 46435 - DNA, 750 bp, Pseudomonas aeruginosa; identical to SEQ ID NO: 44461

SEQ ID NO: 46436 - DNA, 1182 bp, Pseudomonas aeruginosa; identical to SEQ ID NO: 44163

SEQ ID NO: 46437 - DNA, 1353 bp, Pseudomonas aeruginosa; identical to SEQ ID NO: 43741

SEQ ID NO: 46438 - DNA, 750 bp, Pseudomonas aeruginosa; identical to SEQ ID NO: 44461

SEQ ID NO: 46439 - DNA, 3306 bp, Pseudomonas aeruginosa; identical to SEQ ID NO: 43743

SEQ ID NO: 46440 - DNA, 1182 bp, Pseudomonas aeruginosa; identical to SEQ ID NO: 44163

SEQ ID NO: 46441 - DNA, 1353 bp, Pseudomonas aeruginosa; identical to SEQ ID NO: 43741

SEQ ID NO: 46442 - DNA, 750 bp, Pseudomonas aeruginosa; identical to SEQ ID NO: 44461

SEQ ID NO: 46443 - DNA, 3306 bp, Pseudomonas aeruginosa; identical to SEQ ID NO: 43743

SEQ ID NO: 46444 - DNA, 1182 bp, Pseudomonas aeruginosa; identical to SEQ ID NO: 44163

SEQ ID NO: 46445 - DNA, 1353 bp, Pseudomonas aeruginosa; identical to SEQ ID NO: 43741

SEQ ID NO: 46446 - DNA, 750 bp, Pseudomonas aeruginosa; identical to SEQ ID NO: 44461

SEQ ID NO: 46447 - DNA, 3306 bp, Pseudomonas aeruginosa; identical to SEQ ID NO: 43743

SEQ ID NO: 46448 - DNA, 1182 bp, Pseudomonas aeruginosa; identical to SEQ ID NO: 44163

SEQ ID NO: 46449 - DNA, 1353 bp, Pseudomonas aeruginosa; identical to SEQ ID NO: 43741

SEQ ID NO: 46450 - DNA, 750 bp, Pseudomonas aeruginosa; identical to SEQ ID NO: 44461

SEQ ID NO: 46451 - DNA, 3306 bp, Pseudomonas aeruginosa; identical to SEQ ID NO: 43743

SEQ ID NO: 46452 - DNA, 1182 bp, Pseudomonas aeruginosa; identical to SEQ ID NO: 44163

SEQ ID NO: 46453 - DNA, 1353 bp, Pseudomonas aeruginosa; identical to SEQ ID NO: 43741

SEQ ID NO: 46454 - DNA, 750 bp, Pseudomonas aeruginosa; identical to SEQ ID NO: 44461

SEQ ID NO: 46455 - DNA, 3306 bp, Pseudomonas aeruginosa; identical to SEQ ID NO: 43743

SEQ ID NO: 46456 - DNA, 1182 bp, Pseudomonas aeruginosa; identical to SEQ ID NO: 44163

SEQ ID NO: 46457 - DNA, 1353 bp, Pseudomonas aeruginosa; identical to SEQ ID NO: 43741

SEQ ID NO: 46458 - DNA, 750 bp, Pseudomonas aeruginosa; identical to SEQ ID NO: 44461

SEQ ID NO: 46459 - DNA, 3306 bp, Pseudomonas aeruginosa; identical to SEQ ID NO: 43743

SEQ ID NO: 46460 - DNA, 1182 bp, Pseudomonas aeruginosa; identical to SEQ ID NO: 44163

SEQ ID NO: 46461 - DNA, 1353 bp, Pseudomonas aeruginosa; identical to SEQ ID NO: 43741

SEQ ID NO: 46462 - DNA, 750 bp, Pseudomonas aeruginosa; identical to SEQ ID NO: 44461

SEQ ID NO: 46463 - DNA, 3306 bp, Pseudomonas aeruginosa; identical to SEQ ID NO: 43743

SEQ ID NO: 46464 - DNA, 1182 bp, Pseudomonas aeruginosa; identical to SEQ ID NO: 44163

SEQ ID NO: 46465 - DNA, 1353 bp, Pseudomonas aeruginosa; identical to SEQ ID NO: 43741

SEQ ID NO: 46466 - DNA, 750 bp, Pseudomonas aeruginosa; identical to SEQ ID NO: 44461

SEQ ID NO: 46467 - DNA, 3306 bp, Pseudomonas aeruginosa; identical to SEQ ID NO: 43743

SEQ ID NO: 46468 - DNA, 1182 bp, Pseudomonas aeruginosa; identical to SEQ ID NO: 44163

SEQ ID NO: 46469 - DNA, 1353 bp, Pseudomonas aeruginosa; identical to SEQ ID NO: 43741

SEQ ID NO: 46470 - DNA, 750 bp, Pseudomonas aeruginosa; identical to SEQ ID NO: 44461

SEQ ID NO: 46471 - DNA, 3306 bp, Pseudomonas aeruginosa; identical to SEQ ID NO: 43743

SEQ ID NO: 46472 - DNA, 1182 bp, Pseudomonas aeruginosa; identical to SEQ ID NO: 44163

SEQ ID NO: 46473 - DNA, 1353 bp, Pseudomonas aeruginosa; identical to SEQ ID NO: 43741

SEQ ID NO: 46474 - DNA, 750 bp, Pseudomonas aeruginosa; identical to SEQ ID NO: 44461

SEQ ID NO: 46475 - DNA, 3306 bp, Pseudomonas aeruginosa; identical to SEQ ID NO: 43743

SEQ ID NO: 46476 - DNA, 1182 bp, Pseudomonas aeruginosa; identical to SEQ ID NO: 44163

SEQ ID NO: 46477 - DNA, 714 bp, Pseudomonas aeruginosa
atgcgtgagcgcttgcgtaccatccttcgtcatccagcggttccgaaggcactgaatcgtccccagcaacgtgagctgcgttggctggcgttacgcttggttcgggagtcgcaggctgtgcttcaggcgcgtgcccgaagcgagcgcgatgtacgtggcttcatgaagacgggcctggccgccgagcatcatcgcgtcggacagttactcaacgatttcttcaatctagcgctcagcgtcgactggcaacgccaggccgtgcgtcgtagcactgtccgtttgccgccggttggcgtagccattaccggagtcccagcgattgagcgtctacgtttcaagaccctggatgacgatgacacgggcgagctggatctgagtctgaagccagcggggctggaacagattgacgatgacttctgggatgctttcgacgggttggatcgcgaagcgctgattcatgacaccctggcggtgctggtggagcaggggcgacctgtgagtctcggggagcttgcgtctttgcttccacctgctcacgacctggaaacctttgcgctctggttggctatggcgcgcgaggcaggtattgaggtgctgacagaggagcgtcagctcgtggagctagttgacgaggatgagcaacgctggcgcttcaatctgccttatgtcggactcgaccacgaggcactcaaggacatcgattgggagttgtga

SEQ ID NO: 46478 - DNA, 750 bp, Pseudomonas aeruginosa; identical to SEQ ID NO: 44461

SEQ ID NO: 46479 - DNA, 3306 bp, Pseudomonas aeruginosa; identical to SEQ ID NO: 43743

SEQ ID NO: 46480 - DNA, 1182 bp, Pseudomonas aeruginosa; identical to SEQ ID NO: 44163

SEQ ID NO: 46481 - DNA, 714 bp, Pseudomonas aeruginosa; identical to SEQ ID NO: 46477

SEQ ID NO: 46482 - DNA, 750 bp, Pseudomonas aeruginosa; identical to SEQ ID NO: 44461

SEQ ID NO: 46483 - DNA, 3306 bp, Pseudomonas aeruginosa; identical to SEQ ID NO: 43743

SEQ ID NO: 46484 - DNA, 1182 bp, Pseudomonas aeruginosa; identical to SEQ ID NO: 44163

SEQ ID NO: 46485 - DNA, 1353 bp, Pseudomonas aeruginosa; identical to SEQ ID NO: 43741

SEQ ID NO: 46486 - DNA, 750 bp, Pseudomonas aeruginosa; identical to SEQ ID NO: 44461

SEQ ID NO: 46487 - DNA, 3306 bp, Pseudomonas aeruginosa; identical to SEQ ID NO: 43743

SEQ ID NO: 46488 - DNA, 1182 bp, Pseudomonas aeruginosa; identical to SEQ ID NO: 44163

SEQ ID NO: 46489 - DNA, 1353 bp, Pseudomonas aeruginosa; identical to SEQ ID NO: 43741

SEQ ID NO: 46490 - DNA, 750 bp, Pseudomonas aeruginosa; identical to SEQ ID NO: 44461

SEQ ID NO: 46491 - DNA, 3306 bp, Pseudomonas aeruginosa; identical to SEQ ID NO: 43743

SEQ ID NO: 46492 - DNA, 1353 bp, Pseudomonas aeruginosa; identical to SEQ ID NO: 43741

SEQ ID NO: 46493 - DNA, 750 bp, Pseudomonas aeruginosa; identical to SEQ ID NO: 44461

SEQ ID NO: 46494 - DNA, 3306 bp, Pseudomonas aeruginosa; identical to SEQ ID NO: 43743

SEQ ID NO: 46495 - DNA, 1182 bp, Pseudomonas aeruginosa; identical to SEQ ID NO: 44163

SEQ ID NO: 46496 - DNA, 714 bp, Pseudomonas aeruginosa; identical to SEQ ID NO: 46477

SEQ ID NO: 46497 - DNA, 750 bp, Pseudomonas aeruginosa; identical to SEQ ID NO: 44461

SEQ ID NO: 46498 - DNA, 3306 bp, Pseudomonas aeruginosa; identical to SEQ ID NO: 43743

SEQ ID NO: 46499 - DNA, 1182 bp, Pseudomonas aeruginosa; identical to SEQ ID NO: 44163

SEQ ID NO: 46500 - DNA, 1353 bp, Pseudomonas aeruginosa; identical to SEQ ID NO: 43741

SEQ ID NO: 46501 - DNA, 750 bp, Pseudomonas aeruginosa; identical to SEQ ID NO: 44461

SEQ ID NO: 46502 - DNA, 1182 bp, Pseudomonas aeruginosa; identical to SEQ ID NO: 44163

SEQ ID NO: 46503 - DNA, 1353 bp, Pseudomonas aeruginosa; identical to SEQ ID NO: 43741

SEQ ID NO: 46504 - DNA, 750 bp, Pseudomonas aeruginosa; identical to SEQ ID NO: 44461

SEQ ID NO: 46505 - DNA, 3306 bp, Pseudomonas aeruginosa; identical to SEQ ID NO: 43743

SEQ ID NO: 46506 - DNA, 1182 bp, Pseudomonas aeruginosa; identical to SEQ ID NO: 44163

SEQ ID NO: 46507 - DNA, 1353 bp, Pseudomonas aeruginosa; identical to SEQ ID NO: 43741

SEQ ID NO: 46508 - DNA, 750 bp, Pseudomonas aeruginosa; identical to SEQ ID NO: 44461

SEQ ID NO: 46509 - DNA, 3306 bp, Pseudomonas aeruginosa; identical to SEQ ID NO: 43743

SEQ ID NO: 46510 - DNA, 1182 bp, Pseudomonas aeruginosa; identical to SEQ ID NO: 44163

SEQ ID NO: 46511 - DNA, 1353 bp, Pseudomonas aeruginosa; identical to SEQ ID NO: 43741

SEQ ID NO: 46512 - DNA, 750 bp, Pseudomonas aeruginosa; identical to SEQ ID NO: 44461

SEQ ID NO: 46513 - DNA, 3306 bp, Pseudomonas aeruginosa; identical to SEQ ID NO: 43743

SEQ ID NO: 46514 - DNA, 1182 bp, Pseudomonas aeruginosa; identical to SEQ ID NO: 44163

SEQ ID NO: 46515 - DNA, 1353 bp, Pseudomonas aeruginosa; identical to SEQ ID NO: 43741

SEQ ID NO: 46516 - DNA, 750 bp, Pseudomonas aeruginosa; identical to SEQ ID NO: 44461

SEQ ID NO: 46517 - DNA, 3306 bp, Pseudomonas aeruginosa; identical to SEQ ID NO: 43743

SEQ ID NO: 46518 - DNA, 1182 bp, Pseudomonas aeruginosa; identical to SEQ ID NO: 44163

SEQ ID NO: 46519 - DNA, 1353 bp, Pseudomonas aeruginosa; identical to SEQ ID NO: 43741

SEQ ID NO: 46520 - DNA, 750 bp, Pseudomonas aeruginosa; identical to SEQ ID NO: 44461

SEQ ID NO: 46521 - DNA, 3306 bp, Pseudomonas aeruginosa; identical to SEQ ID NO: 43743

SEQ ID NO: 46522 - DNA, 1182 bp, Pseudomonas aeruginosa; identical to SEQ ID NO: 44163

SEQ ID NO: 46523 - DNA, 1353 bp, Pseudomonas aeruginosa; identical to SEQ ID NO: 43741

SEQ ID NO: 46524 - DNA, 750 bp, Pseudomonas aeruginosa; identical to SEQ ID NO: 44461

SEQ ID NO: 46525 - DNA, 3306 bp, Pseudomonas aeruginosa; identical to SEQ ID NO: 43743

SEQ ID NO: 46526 - DNA, 1182 bp, Pseudomonas aeruginosa; identical to SEQ ID NO: 44163

SEQ ID NO: 46527 - DNA, 1353 bp, Pseudomonas aeruginosa; identical to SEQ ID NO: 43741

SEQ ID NO: 46528 - DNA, 750 bp, Pseudomonas aeruginosa; identical to SEQ ID NO: 44461

SEQ ID NO: 46529 - DNA, 3306 bp, Pseudomonas aeruginosa; identical to SEQ ID NO: 43743

SEQ ID NO: 46530 - DNA, 1182 bp, Pseudomonas aeruginosa; identical to SEQ ID NO: 44163

SEQ ID NO: 46531 - DNA, 1353 bp, Pseudomonas aeruginosa; identical to SEQ ID NO: 43741

SEQ ID NO: 46532 - DNA, 750 bp, Pseudomonas aeruginosa; identical to SEQ ID NO: 44461

SEQ ID NO: 46533 - DNA, 3306 bp, Pseudomonas aeruginosa; identical to SEQ ID NO: 43743

SEQ ID NO: 46534 - DNA, 1182 bp, Pseudomonas aeruginosa; identical to SEQ ID NO: 44163

SEQ ID NO: 46535 - DNA, 1353 bp, Pseudomonas aeruginosa; identical to SEQ ID NO: 43741

SEQ ID NO: 46536 - DNA, 750 bp, Pseudomonas aeruginosa; identical to SEQ ID NO: 44461

SEQ ID NO: 46537 - DNA, 3306 bp, Pseudomonas aeruginosa; identical to SEQ ID NO: 43743

SEQ ID NO: 46538 - DNA, 1182 bp, Pseudomonas aeruginosa; identical to SEQ ID NO: 44163

SEQ ID NO: 46539 - DNA, 1353 bp, Pseudomonas aeruginosa; identical to SEQ ID NO: 43741

SEQ ID NO: 46540 - DNA, 750 bp, Pseudomonas aeruginosa; identical to SEQ ID NO: 44461

SEQ ID NO: 46541 - DNA, 3306 bp, Pseudomonas aeruginosa; identical to SEQ ID NO: 43743

SEQ ID NO: 46542 - DNA, 1182 bp, Pseudomonas aeruginosa; identical to SEQ ID NO: 44163

SEQ ID NO: 46543 - DNA, 1353 bp, Pseudomonas aeruginosa; identical to SEQ ID NO: 43741

SEQ ID NO: 46544 - DNA, 750 bp, Pseudomonas aeruginosa; identical to SEQ ID NO: 44461

SEQ ID NO: 46545 - DNA, 3306 bp, Pseudomonas aeruginosa; identical to SEQ ID NO: 43743

SEQ ID NO: 46546 - DNA, 1182 bp, Pseudomonas aeruginosa; identical to SEQ ID NO: 44163

SEQ ID NO: 46547 - DNA, 1353 bp, Pseudomonas aeruginosa; identical to SEQ ID NO: 43741

SEQ ID NO: 46548 - DNA, 750 bp, Pseudomonas aeruginosa; identical to SEQ ID NO: 44461

SEQ ID NO: 46549 - DNA, 3306 bp, Pseudomonas aeruginosa; identical to SEQ ID NO: 43743

SEQ ID NO: 46550 - DNA, 1182 bp, Pseudomonas aeruginosa; identical to SEQ ID NO: 44163

SEQ ID NO: 46551 - DNA, 1353 bp, Pseudomonas aeruginosa; identical to SEQ ID NO: 43741

SEQ ID NO: 46552 - DNA, 750 bp, Pseudomonas aeruginosa; identical to SEQ ID NO: 44461

SEQ ID NO: 46553 - DNA, 3306 bp, Pseudomonas aeruginosa; identical to SEQ ID NO: 43743

SEQ ID NO: 46554 - DNA, 1209 bp, Pseudomonas aeruginosa
atgaagtcgcccactgacatcggtcgcagcttggccaggcaatggcagcgttctagtgttcggttggaccgcttactcaattctgctagctggccgcaaagcttcaacatcggcaagccttcggcacgactattctctgacaacatccggacggtgcttcggcatgtggaaaattggcggagcgtgaaagtgggtaaggtcgactgggaacccgtcagctaccgagcagggttggctccaatttccttgccaatgcgctggcacttgcgcagtccctccgaatggattgccgcaaccgacgatccttcggtcagccaggaatacgctcaactcgagtatctggtcgagcaggtagatagttcctttcatgctctgctggtggcgcaacggagcctgtggttgacgaagccctctgaagaagtcatcgctacagcgcagctcgccactcaactatctccgggctgcgctcaaggccgcccattgcgcctgcttgcagagcacggagtggacaccaagtttttcgagcgaaacgctatcttgctgacgaaactcctcgatgagcgcttcgaaggcgcggcgtccgagcaaggtctgacgacttttctggatgcctttgaagaaaccagtcattgggttctagtcgttcctcttcagcctgagctgctgcccttcaagcggatcaggctcacgacttcggaactggccgaaacctcacttcccggttcgatgtgtataagagacagtcccggttcgcgattgctcgtggtggaaaatgagcaatgtgttcacttgctacccgaaacgctgccggacaccctcgctgttctgggcgcagggctcgatttgcagtggttggcgtctgcgcatctggccgggaaacagatcgcttactggggcgacatggatacctggggcttactgatgctggcgcgagcgagacaccatcaacctgcagtcgaagcactgctaatggaccgggagctgtttgaccagcactccttgggaagcgcggtcgtcgagccagctaaagctcaggaattggctcccgaaggattgatgaccgacgaagctgatttctatcggtatctccttgcacaggagcgggggcgccttgagcaggagtatctgccacgcaggcaagtcgaacaggctattagtaaatggtttggagagtcggtagcgccggctcatcctgagcgaacggcttga

SEQ ID NO: 46555 - DNA, 1353 bp, Pseudomonas aeruginosa; identical to SEQ ID NO: 43741

SEQ ID NO: 46556 - DNA, 750 bp, Pseudomonas aeruginosa; identical to SEQ ID NO: 44461

SEQ ID NO: 46557 - DNA, 3306 bp, Pseudomonas aeruginosa; identical to SEQ ID NO: 43743

SEQ ID NO: 46558 - DNA, 1182 bp, Pseudomonas aeruginosa; identical to SEQ ID NO: 44163

SEQ ID NO: 46559 - DNA, 1353 bp, Pseudomonas aeruginosa; identical to SEQ ID NO: 43741

SEQ ID NO: 46560 - DNA, 750 bp, Pseudomonas aeruginosa; identical to SEQ ID NO: 44461

SEQ ID NO: 46561 - DNA, 3306 bp, Pseudomonas aeruginosa; identical to SEQ ID NO: 43743

SEQ ID NO: 46562 - DNA, 1182 bp, Pseudomonas aeruginosa; identical to SEQ ID NO: 44163

SEQ ID NO: 46563 - DNA, 1353 bp, Pseudomonas aeruginosa; identical to SEQ ID NO: 43741

SEQ ID NO: 46564 - DNA, 750 bp, Pseudomonas aeruginosa; identical to SEQ ID NO: 44461

SEQ ID NO: 46565 - DNA, 3306 bp, Pseudomonas aeruginosa; identical to SEQ ID NO: 43743

SEQ ID NO: 46566 - DNA, 1182 bp, Pseudomonas aeruginosa; identical to SEQ ID NO: 44163

SEQ ID NO: 46567 - DNA, 1353 bp, Pseudomonas aeruginosa; identical to SEQ ID NO: 43741

SEQ ID NO: 46568 - DNA, 750 bp, Pseudomonas aeruginosa; identical to SEQ ID NO: 44461

SEQ ID NO: 46569 - DNA, 3306 bp, Pseudomonas aeruginosa; identical to SEQ ID NO: 43743

SEQ ID NO: 46570 - DNA, 1182 bp, Pseudomonas aeruginosa; identical to SEQ ID NO: 44163

SEQ ID NO: 46571 - DNA, 1353 bp, Pseudomonas aeruginosa; identical to SEQ ID NO: 43741

SEQ ID NO: 46572 - DNA, 750 bp, Pseudomonas aeruginosa; identical to SEQ ID NO: 44461

SEQ ID NO: 46573 - DNA, 3306 bp, Pseudomonas aeruginosa; identical to SEQ ID NO: 43743

SEQ ID NO: 46574 - DNA, 1182 bp, Pseudomonas aeruginosa; identical to SEQ ID NO: 44163

SEQ ID NO: 46575 - DNA, 1353 bp, Pseudomonas aeruginosa; identical to SEQ ID NO: 43741

SEQ ID NO: 46576 - DNA, 750 bp, Pseudomonas aeruginosa; identical to SEQ ID NO: 44461

SEQ ID NO: 46577 - DNA, 3306 bp, Pseudomonas aeruginosa; identical to SEQ ID NO: 43743

SEQ ID NO: 46578 - DNA, 1182 bp, Pseudomonas aeruginosa; identical to SEQ ID NO: 44163

SEQ ID NO: 46579 - DNA, 1353 bp, Pseudomonas aeruginosa; identical to SEQ ID NO: 43741

SEQ ID NO: 46580 - DNA, 750 bp, Pseudomonas aeruginosa; identical to SEQ ID NO: 44461

SEQ ID NO: 46581 - DNA, 3306 bp, Pseudomonas aeruginosa; identical to SEQ ID NO: 43743

SEQ ID NO: 46582 - DNA, 1182 bp, Pseudomonas aeruginosa; identical to SEQ ID NO: 44163

SEQ ID NO: 46583 - DNA, 1353 bp, Pseudomonas aeruginosa; identical to SEQ ID NO: 43741

SEQ ID NO: 46584 - DNA, 750 bp, Pseudomonas aeruginosa; identical to SEQ ID NO: 44461

SEQ ID NO: 46585 - DNA, 3306 bp, Pseudomonas aeruginosa; identical to SEQ ID NO: 43743

SEQ ID NO: 46586 - DNA, 1182 bp, Pseudomonas aeruginosa; identical to SEQ ID NO: 44163

SEQ ID NO: 46587 - DNA, 1353 bp, Pseudomonas aeruginosa; identical to SEQ ID NO: 43741

SEQ ID NO: 46588 - DNA, 750 bp, Pseudomonas aeruginosa; identical to SEQ ID NO: 44461

SEQ ID NO: 46589 - DNA, 1182 bp, Pseudomonas aeruginosa; identical to SEQ ID NO: 44163

SEQ ID NO: 46590 - DNA, 1353 bp, Pseudomonas aeruginosa; identical to SEQ ID NO: 43741

SEQ ID NO: 46591 - DNA, 750 bp, Pseudomonas aeruginosa; identical to SEQ ID NO: 44461

SEQ ID NO: 46592 - DNA, 3306 bp, Pseudomonas aeruginosa; identical to SEQ ID NO: 43743

SEQ ID NO: 46593 - DNA, 1182 bp, Pseudomonas aeruginosa; identical to SEQ ID NO: 44163

SEQ ID NO: 46594 - DNA, 1353 bp, Pseudomonas aeruginosa; identical to SEQ ID NO: 43741

SEQ ID NO: 46595 - DNA, 750 bp, Pseudomonas aeruginosa; identical to SEQ ID NO: 44461

SEQ ID NO: 46596 - DNA, 3306 bp, Pseudomonas aeruginosa; identical to SEQ ID NO: 43743

SEQ ID NO: 46597 - DNA, 1182 bp, Pseudomonas aeruginosa; identical to SEQ ID NO: 44163

SEQ ID NO: 46598 - DNA, 1353 bp, Pseudomonas aeruginosa; identical to SEQ ID NO: 43741

SEQ ID NO: 46599 - DNA, 750 bp, Pseudomonas aeruginosa; identical to SEQ ID NO: 44461

SEQ ID NO: 46600 - DNA, 3306 bp, Pseudomonas aeruginosa; identical to SEQ ID NO: 43743

SEQ ID NO: 46601 - DNA, 1182 bp, Pseudomonas aeruginosa; identical to SEQ ID NO: 44163

SEQ ID NO: 46602 - DNA, 1353 bp, Pseudomonas aeruginosa; identical to SEQ ID NO: 43741

SEQ ID NO: 46603 - DNA, 750 bp, Pseudomonas aeruginosa; identical to SEQ ID NO: 44461

SEQ ID NO: 46604 - DNA, 3306 bp, Pseudomonas aeruginosa; identical to SEQ ID NO: 43743

SEQ ID NO: 46605 - DNA, 1182 bp, Pseudomonas aeruginosa; identical to SEQ ID NO: 44163

SEQ ID NO: 46606 - DNA, 1353 bp, Pseudomonas aeruginosa; identical to SEQ ID NO: 43741

SEQ ID NO: 46607 - DNA, 750 bp, Pseudomonas aeruginosa; identical to SEQ ID NO: 44461

SEQ ID NO: 46608 - DNA, 3306 bp, Pseudomonas aeruginosa; identical to SEQ ID NO: 43743

SEQ ID NO: 46609 - DNA, 1182 bp, Pseudomonas aeruginosa; identical to SEQ ID NO: 44163

SEQ ID NO: 46610 - DNA, 1353 bp, Pseudomonas aeruginosa; identical to SEQ ID NO: 43741

SEQ ID NO: 46611 - DNA, 750 bp, Pseudomonas aeruginosa; identical to SEQ ID NO: 44461

SEQ ID NO: 46612 - DNA, 3306 bp, Pseudomonas aeruginosa; identical to SEQ ID NO: 43743

SEQ ID NO: 46613 - DNA, 1182 bp, Pseudomonas aeruginosa; identical to SEQ ID NO: 44163

SEQ ID NO: 46614 - DNA, 1353 bp, Pseudomonas aeruginosa; identical to SEQ ID NO: 43741

SEQ ID NO: 46615 - DNA, 750 bp, Pseudomonas aeruginosa; identical to SEQ ID NO: 44461

SEQ ID NO: 46616 - DNA, 3306 bp, Pseudomonas aeruginosa; identical to SEQ ID NO: 43743

SEQ ID NO: 46617 - DNA, 1182 bp, Pseudomonas aeruginosa; identical to SEQ ID NO: 44163

SEQ ID NO: 46618 - DNA, 1353 bp, Pseudomonas aeruginosa; identical to SEQ ID NO: 43741

SEQ ID NO: 46619 - DNA, 750 bp, Pseudomonas aeruginosa; identical to SEQ ID NO: 44461

SEQ ID NO: 46620 - DNA, 3306 bp, Pseudomonas aeruginosa; identical to SEQ ID NO: 43743

SEQ ID NO: 46621 - DNA, 1182 bp, Pseudomonas aeruginosa; identical to SEQ ID NO: 44163

SEQ ID NO: 46622 - DNA, 1353 bp, Pseudomonas aeruginosa; identical to SEQ ID NO: 43741

SEQ ID NO: 46623 - DNA, 750 bp, Pseudomonas aeruginosa; identical to SEQ ID NO: 44461

SEQ ID NO: 46624 - DNA, 3306 bp, Pseudomonas aeruginosa; identical to SEQ ID NO: 43743

SEQ ID NO: 46625 - DNA, 1182 bp, Pseudomonas aeruginosa; identical to SEQ ID NO: 44163

SEQ ID NO: 46626 - DNA, 1353 bp, Pseudomonas aeruginosa; identical to SEQ ID NO: 43741

SEQ ID NO: 46627 - DNA, 750 bp, Pseudomonas aeruginosa; identical to SEQ ID NO: 44461

SEQ ID NO: 46628 - DNA, 3306 bp, Pseudomonas aeruginosa; identical to SEQ ID NO: 43743

SEQ ID NO: 46629 - DNA, 1182 bp, Pseudomonas aeruginosa; identical to SEQ ID NO: 44163

SEQ ID NO: 46630 - DNA, 1353 bp, Pseudomonas aeruginosa; identical to SEQ ID NO: 43741

SEQ ID NO: 46631 - DNA, 750 bp, Pseudomonas aeruginosa; identical to SEQ ID NO: 44461

SEQ ID NO: 46632 - DNA, 3306 bp, Pseudomonas aeruginosa; identical to SEQ ID NO: 43743

SEQ ID NO: 46633 - DNA, 1182 bp, Pseudomonas aeruginosa; identical to SEQ ID NO: 44163

SEQ ID NO: 46634 - DNA, 750 bp, Pseudomonas aeruginosa; identical to SEQ ID NO: 44461

SEQ ID NO: 46635 - DNA, 3306 bp, Pseudomonas aeruginosa; identical to SEQ ID NO: 43743

SEQ ID NO: 46636 - DNA, 1182 bp, Pseudomonas aeruginosa; identical to SEQ ID NO: 44163

SEQ ID NO: 46637 - DNA, 1353 bp, Pseudomonas aeruginosa; identical to SEQ ID NO: 43741

SEQ ID NO: 46638 - DNA, 750 bp, Pseudomonas aeruginosa; identical to SEQ ID NO: 44461

SEQ ID NO: 46639 - DNA, 3306 bp, Pseudomonas aeruginosa; identical to SEQ ID NO: 43743

SEQ ID NO: 46640 - DNA, 1182 bp, Pseudomonas aeruginosa; identical to SEQ ID NO: 44163

SEQ ID NO: 46641 - DNA, 1353 bp, Pseudomonas aeruginosa; identical to SEQ ID NO: 43741

SEQ ID NO: 46642 - DNA, 750 bp, Pseudomonas aeruginosa; identical to SEQ ID NO: 44461

SEQ ID NO: 46643 - DNA, 3306 bp, Pseudomonas aeruginosa; identical to SEQ ID NO: 43743

SEQ ID NO: 46644 - DNA, 1182 bp, Pseudomonas aeruginosa; identical to SEQ ID NO: 44163

SEQ ID NO: 46645 - DNA, 1353 bp, Pseudomonas aeruginosa; identical to SEQ ID NO: 43741

SEQ ID NO: 46646 - DNA, 750 bp, Pseudomonas aeruginosa; identical to SEQ ID NO: 44461

SEQ ID NO: 46647 - DNA, 3306 bp, Pseudomonas aeruginosa; identical to SEQ ID NO: 43743

SEQ ID NO: 46648 - DNA, 1182 bp, Pseudomonas aeruginosa; identical to SEQ ID NO: 44163

SEQ ID NO: 46649 - DNA, 1353 bp, Pseudomonas aeruginosa; identical to SEQ ID NO: 43741

SEQ ID NO: 46650 - DNA, 750 bp, Pseudomonas aeruginosa; identical to SEQ ID NO: 44461

SEQ ID NO: 46651 - DNA, 3306 bp, Pseudomonas aeruginosa; identical to SEQ ID NO: 43743

SEQ ID NO: 46652 - DNA, 1182 bp, Pseudomonas aeruginosa; identical to SEQ ID NO: 44163

SEQ ID NO: 46653 - DNA, 1353 bp, Pseudomonas aeruginosa; identical to SEQ ID NO: 43741

SEQ ID NO: 46654 - DNA, 750 bp, Pseudomonas aeruginosa; identical to SEQ ID NO: 44461

SEQ ID NO: 46655 - DNA, 3306 bp, Pseudomonas aeruginosa; identical to SEQ ID NO: 43743

SEQ ID NO: 46656 - DNA, 1182 bp, Pseudomonas aeruginosa; identical to SEQ ID NO: 44163

SEQ ID NO: 46657 - DNA, 1353 bp, Pseudomonas aeruginosa; identical to SEQ ID NO: 43741

SEQ ID NO: 46658 - DNA, 750 bp, Pseudomonas aeruginosa; identical to SEQ ID NO: 44461

SEQ ID NO: 46659 - DNA, 3306 bp, Pseudomonas aeruginosa; identical to SEQ ID NO: 43743

SEQ ID NO: 46660 - DNA, 1182 bp, Pseudomonas aeruginosa; identical to SEQ ID NO: 44163

SEQ ID NO: 46661 - DNA, 1353 bp, Pseudomonas aeruginosa; identical to SEQ ID NO: 43741

SEQ ID NO: 46662 - DNA, 750 bp, Pseudomonas aeruginosa; identical to SEQ ID NO: 44461

SEQ ID NO: 46663 - DNA, 3306 bp, Pseudomonas aeruginosa; identical to SEQ ID NO: 43743

SEQ ID NO: 46664 - DNA, 1182 bp, Pseudomonas aeruginosa; identical to SEQ ID NO: 44163

SEQ ID NO: 46665 - DNA, 714 bp, Pseudomonas aeruginosa; identical to SEQ ID NO: 46477

SEQ ID NO: 46666 - DNA, 750 bp, Pseudomonas aeruginosa; identical to SEQ ID NO: 44461

SEQ ID NO: 46667 - DNA, 3306 bp, Pseudomonas aeruginosa; identical to SEQ ID NO: 43743

SEQ ID NO: 46668 - DNA, 1182 bp, Pseudomonas aeruginosa; identical to SEQ ID NO: 44163

SEQ ID NO: 46669 - DNA, 1353 bp, Pseudomonas aeruginosa; identical to SEQ ID NO: 43741

SEQ ID NO: 46670 - DNA, 750 bp, Pseudomonas aeruginosa; identical to SEQ ID NO: 44461

SEQ ID NO: 46671 - DNA, 3306 bp, Pseudomonas aeruginosa; identical to SEQ ID NO: 43743

SEQ ID NO: 46672 - DNA, 1182 bp, Pseudomonas aeruginosa; identical to SEQ ID NO: 44163

SEQ ID NO: 46673 - DNA, 1353 bp, Pseudomonas aeruginosa; identical to SEQ ID NO: 43741

SEQ ID NO: 46674 - DNA, 750 bp, Pseudomonas aeruginosa; identical to SEQ ID NO: 44461

SEQ ID NO: 46675 - DNA, 3306 bp, Pseudomonas aeruginosa; identical to SEQ ID NO: 43743

SEQ ID NO: 46676 - DNA, 1182 bp, Pseudomonas aeruginosa; identical to SEQ ID NO: 44163

SEQ ID NO: 46677 - DNA, 1353 bp, Pseudomonas aeruginosa; identical to SEQ ID NO: 43741

SEQ ID NO: 46678 - DNA, 750 bp, Pseudomonas aeruginosa; identical to SEQ ID NO: 44461

SEQ ID NO: 46679 - DNA, 3306 bp, Pseudomonas aeruginosa; identical to SEQ ID NO: 43743

SEQ ID NO: 46680 - DNA, 1182 bp, Pseudomonas aeruginosa; identical to SEQ ID NO: 44163

SEQ ID NO: 46681 - DNA, 1353 bp, Pseudomonas aeruginosa; identical to SEQ ID NO: 43741

SEQ ID NO: 46682 - DNA, 750 bp, Pseudomonas aeruginosa; identical to SEQ ID NO: 44461

SEQ ID NO: 46683 - DNA, 3306 bp, Pseudomonas aeruginosa; identical to SEQ ID NO: 43743

SEQ ID NO: 46684 - DNA, 1182 bp, Pseudomonas aeruginosa; identical to SEQ ID NO: 44163

SEQ ID NO: 46685 - DNA, 1470 bp, Pseudomonas aeruginosa
atgaagcaccgcgaacgcatctcccgttaccgccatctgcgcgaacagccccagtggaagctgcttgctgccgaccacgccccggaaatcatcggcctgctgcaggggctgctgatggacggcgagcgcacgctgccgtcgtcggtgctcaacgagcgcctgcagcgtgcgctggatcagctcaacggcgacgaactgtcgcgcgagctgccgcgtaccgcgcaggcctacatcgcgcactggctggcccagggctggctggaacgccgcctgcccgacggtgtcgaccaggagcagtacgagctgtcgaccgcggcactgcaggcgatccgattcgccgacggcctcgagcaggcccgtgtggccgccaccgaaagccgcctggcgctggtcatcgaacagctctcgcagctggccgcgcagaccgaatccgatccggacgcccgcctgtcggcgctgcgcgacgagcgcgaccggatcgacgccgagattgcccgtgtcggcgccggccgtgtgatcgcgctggacggcaagcgcgcgctggaacgtgcgcgccagatcatcggcctggccgacgagctgaccgaggacttccgccgcgtgcgcgacgacttcgagcagctcaaccgcgagttccgcgaacgcatcatcgacgacgagggcgagcgcggcgatgtgctgtcgcagctgttcgaaggcgtggacgtgattggcgaaagtgatgccgggcgtagcttccaggccttctggcgcctgctcaacgacgccgagcagagcgcccagctcgatgccgcgctggaagcggtgctggcgcgtggcttcgcccgccgcctggaccgcaacgaacgcaacttcctgcgcggcttcaccagcaccatgctcgagcgcggtggccaggtgcacgatgtgctgcagaacttcgcgcgcagcctgcgcggcttcgtgcagagccgtggctatctggaacagcgtcgcctcaaccagctgctcaagcaggcgcagtccgaagcgctcgctctgcgcgacgagttccccgcacaacgcggcatcggccgcgacctgcagctgaccaccagccgcctgcgctcgtggtcgcaatggaaactgcacgatccgcgcagcgcccaggtcgatggcaacgtcgaatacaacgacgcagccgcgatcagcctggaaagcgttggcgatctggtcgcttcgtccgaaatcgacttccgtaccctgcgccgcgacctgcacgaccttctcgatgcgcagccgcggctcagcatcgcccaggccctttcgcagcgcgaagcgccgcaaggtcttggcagcgtcatcggctacctgtcgctgggcacgcgcttcggcaacgtgatcgccggcgagcaggagcttgcgcaatggcgtggtggcgacggccagatccgtcgcgcccgcatcccgctggtttggttcacccaggagagacgccatgagctggcatga

SEQ ID NO: 46686 - DNA, 702 bp, Pseudomonas aeruginosa
atgagctggcatgaagatcccatcgacgcaccgcaggccgacgtggcggaagacgcctacgaggccgagccggtggcggccgtggcgcagccccgccgtggcaacgacgtgtactacctcggcgataccgggcgcctgccgctggatgcgcgccgtgcgctgtgccagctgctgatcggccccagcatcgaccagctgcgccacgccaagctgtggccggcgctgatccgcagcgaggcggccatccgctcgtcgctggccgacctgttcctggaactggtgctcgaccgcgacagtggcgtggcgttcacccgccaggccgataccgaagacgtcgatgcgccggtgctgctgcgcacctcgccgctgaccttcatcgactcggtgctgctgctgtacctgcgccagcagctggccgaggccgattcgcgcggcaaccgcgcagtggtcgccgacgccgagatggccgaagcgctggccatctacgaaaagaacctgtccaccgaccgcgccggcttcaaccgtcgcgtcgcatcggcggtccagaagatgaaggacaaccacatcctgacccgcctcagcggccaggaagaccgccacgaagtctcgccggcgctgaagctgctgttctccgccgaagacgtgtcccagctttcggcggtctaccgccagctgcgtgaaaccccggccgccgaggcctga

SEQ ID NO: 46687 - DNA, 3381 bp, Pseudomonas aeruginosa
atggctatctccaagcacactcccgccctgttcaacgaaggcctgccggacccgcgcctgcagcagttccgcatgcgccgcctgcaggtgcacaactggggcaccttcaacggcctgaccgaagtaccgatcgccgagcgcggcttcctgttcgtcggccgctccggctcgggcaagtcgaccctgctcgatgccatgtccgcgctgctgacgccaccggccatcgtcgacttcaacgccgctgcgcgtgaagccgagcgcagtggccgcgaccgcaacctggtgtcctacgtgcgcggcgcgtgggccgaccagcaggacagcggcaccggcgaaatcgccactcagtacctgcgcaagggcgcgacctggaccgcgctggtgctggaataccgcgccggcgatggccgcgtggtcagcctggtgcgcctgctgtggatctccggcaatggcacctcggccggtgacgtgcgcaagcactacatgatcgccgagcgcccgttcgacatcgccaaggacctcggcggtttcgacctggacctgcgcaagctgaagcagaagctgcccgacctgcaccacttcgacacgttctccggttacgccgagcgcttccgcgacctgctcggcatcgacaacgagatggcactgcgcctgctgcacaagacgcagtcggcgaagaacctgggcgacctcaacgtcttcctgcgtgacttcatgctcgacacgccgaagaccttcgacgccgccgagcgcctggtcagcgacttcgccgagcttgatggcgcgcaccaggcggtggtcactgcccgccgtcaggtggaaaccctgttgccggcgcgcgcctactacaacgatctgaaggaaatgcaccgccgtcgtggcgacgacgaagcgctgaagctcggtgttgacagcttccgcgaaagccggcgccaagcgctgatcgaggcgcgcctgcgcgagatggacgtacgtgaccgcggcctgcttggcgaagaagcccagcgccgtgccgcactggacaatcacaccgagcgcctggccgaactggagctgcagcgccgccagcagggcggtgagcgcatcgaggaactggaacgcgagcagggtcgtgccgaagctgagcgcgaccgccgtcaggccaagcgcgagcaggcacgccaggcggcgcagcagctgggggccgaactgccggacgacgcccatggcttcgccgaactggtcgagcgcgcacagaacgagctgcaggaccgccagcgtgcctcctcggcactggacgacgcgatcagtgaccgcctgggcggcaagcgcgatgacgagcgccgcttcggcgaggtccgtgccgaacttgaagcgatgcagcgcacgccctccaacatcccggcgccgatgcagaagctgcgcgcgcgcctggccgaggaaaccggcatcgccgaggcggcactgcccttcgtcggcgaactgatccaggtccgctcggaagagcagggctggcagggtgccatcgagcgcgtgctgggtggcttcgcgctgtcgctgctggtcgacgacaagcattacaacgacgtcgccgaatgggtgaaccgtacccaccttggcatgcgcttcacctactaccgcgtgcgccgcaacgatgatgcattcgcccgtgagccgtcggcgaagtcgctgctgcacaagcttgaactgcgcgagcatgtattcgaaagctggctgcgccgcgagctgggcaagcgcttcgactacgaatgcgtggatgccaagcagctgcgcaacgtcgaccgcggcatcacccgcgaaggccaggtcaagcatcccggcgaccgtttcgagaaggacgaccgcagtgcggtgggcgaccgccgtcgctggatcctcggcttcaacaaccacgacaaggtgggcgccttcgagcgcgaagcacaggaactggccaagcgcatcgccagctgcgagaccgacatcgcgcgcctgcgcgggcagcgtgaccgcgacaacgaacgccgcctggcctgccacgagctggtcagcatcagctggaacgagatcgacatcgccgctccgcagcagcgcctgagcgatatcgaagccaccctgcgcgacctgcgcgaaggcaacgccgatctcgccaagctggccaagcagatcgacgccgtgcgcgccgacatcgagcagtcccgccgcacctatgaagacgtccgcgttgagcgcggccagctggtcaaggaacgtgatcgcctggaccgcgcacgccagcagagccgtgcactggtgctgccgagcctggcccaggagcaggaagccggcctcgccgagcgcctgcaggaacagggtccgctcagcctggaaacgctcgaagcgcacatgcgccaggtcagcaacgcgctgaacgagcagttgtcgtcctcgcagcaggacctcaaccgcatcgagaaccagctgatcggctgcttccgtcgcttcatccagcagtggccggaggagtcgggcgacttcaccgtgtcggtggcctcggccgaggacttcctcgcacgcctcgaacggctggaacgcgacggcctgccacagcacgaagagcgcttcttcgacctgctgcagaaccagagcaagaacaacctgctggccctgcagcgccacagcgcagaggcccgcaagtcgatcggccagcgcctggacgaggtgaacgccagcctggagcaggtgccgttcaaccgtggcacgctgctgaccatcgaactgagcgaccgccgcctgccggaggtcgctgagttccacctgcagctgcgcgaggtgctgtcgcagcagcagaccgagcagcgcgagctggccgaatcgcagttcaccgtgctgcgccagctggtcaaccgcctcggctcgcaggaaggcgaggacaagcgctggcgcgagctggtgctggacgtgcgcatgcacgtggagttcatcggcgtcgagctggatgcggaaacgcgccagcaggtcgagatctaccgcagcggcgccggcaagtccggtggccagcgccagaagctggccaccacctgcctggcagcagcgctgcgctaccagctcggcggcgctgacagccagctgcccagttacgcggcggtcgtgctcgacgaggccttcgacaaggccgacaacgagttcaccgcgctggcgatgaacatcttcgacaacttcggcttccagatggtggtcgccaccccgctgaagtcggtgatgacgctggagccgttcatcggtggcgcctgcttcgtcgaaatcagcggccgccacgactccggcgtactgctgatcgagtacgacgaagagggcaagcgcctgaagctgccggagcgcagccgccagcaggccaacgaaccggaagaagccgaggcctga

SEQ ID NO: 46688 - DNA, 1353 bp, Pseudomonas aeruginosa; identical to SEQ ID NO: 43741

SEQ ID NO: 46689 - DNA, 750 bp, Pseudomonas aeruginosa; identical to SEQ ID NO: 44461

SEQ ID NO: 46690 - DNA, 3306 bp, Pseudomonas aeruginosa; identical to SEQ ID NO: 43743

SEQ ID NO: 46691 - DNA, 1182 bp, Pseudomonas aeruginosa; identical to SEQ ID NO: 44163

SEQ ID NO: 46692 - DNA, 1353 bp, Pseudomonas aeruginosa; identical to SEQ ID NO: 43741

SEQ ID NO: 46693 - DNA, 750 bp, Pseudomonas aeruginosa; identical to SEQ ID NO: 44461

SEQ ID NO: 46694 - DNA, 3306 bp, Pseudomonas aeruginosa; identical to SEQ ID NO: 43743

SEQ ID NO: 46695 - DNA, 1182 bp, Pseudomonas aeruginosa; identical to SEQ ID NO: 44163

SEQ ID NO: 46696 - DNA, 1353 bp, Pseudomonas aeruginosa; identical to SEQ ID NO: 43741

SEQ ID NO: 46697 - DNA, 3306 bp, Pseudomonas aeruginosa; identical to SEQ ID NO: 43743

SEQ ID NO: 46698 - DNA, 1182 bp, Pseudomonas aeruginosa; identical to SEQ ID NO: 44163

SEQ ID NO: 46699 - DNA, 1467 bp, Nocardia farcinica
atggatttcgacgagatcgacttcctgcgtcgcagcgatcccgcatggcggctgttgcgggctgaccacgcgcccctggtcctcagtttcttgcggaaggtcttcgtcgtggacaacgtccgggcgatttcggccaccgagctggccggccgtctcgacgatgagctctacgcactcaacgaacagcatggcgaggcaacgtatcccaaggctgcgaaggcatacctcgacgattgggcggcgcccgcgaacggttggcttcggaagtactaccccgcgggctcagacgaggcgcacttcgatgcgactcctgccgtggaaaaggcgctgacctggctcgagtctctccgcgttcgttcgttcgttggtaccgagtcccgcttgaacaccgtattcgagctgctgcgccagatggcttacggtgcggaaaccgatcccgatgtccggctggccgagttgtaccggcggcggagtgcgatcgacgcggagatcacccaggtcgcggccggccgcttcgctgtgctcgatgattcggctcagcgcgaccgctatcagcagttcgccgcgaccgcgcgagagctgttggccgacttccgtgaggtcgaggccaacttccggggactggatcggtcgcttcgtgcacgcatcgccgggtgggctggaagcagggggcagctgctcgatgaggtggttggcaatcgcgccgctatcaccgactcggatcaagggcgcagcttccaagcgttctacgacttccttctttcgcatgagcggcaaaccgaactcaccgaactactcgagaaagtccagtcgctggacgcggtgggcgagacggacccgcgaatgcgccacatccactacgactggctcgacgcggccgaacgcactcaggcgactgtgcggttgttgtcggagcagctgcgccggttcctggacgaccaggtgtggctggagaaccgtcgggtgatggacattctgcacagcatcgagtcgtccgctctcgcgctccgcgagcggcccattccggcgctcacctgcgaactcgacggcaccgcgccggtaatcggactgccgatggaacggcctctctacaccccgaaggagaaggtttcgttggacagtgcgggtatcgctgaggcggacgagaacgtcgatgcgtcggcgctgttcgagcaggtgtttgtggaccgtgagctgttgtgtggcgtggtgcgcggtgagctgcgcgaacgtgcccaggtcggactgcgtgaggtattggggcgtcgtccattggagcagggcatggccgagctgatcgcctacctctcgctcgacgaccccgctttccagatcgttttcgacgaggcgacgcgggagcaggtgcgctggatagacgacggcggcgcggagcgggtggcgacgataccgcgggtgacattcattcggccctcgcacggcgaccgtgctgtcagtggacatctttag

SEQ ID NO: 46700 - DNA, 603 bp, Nocardia farcinica
gtgtccacttctctgcgtcgcgacgagctcgacctgccgttggtcatcacgcacctgatgaagggggtggtctacgcggacagtcacgagaaggtttggcggaatctgttgccgttgcagcctcaggtgcgcgactacgtgggggtgatgggcctgaccgtcgttgtcgacgagaccgaggggtatgccttcctgcggtcgaagccggaggccgacgacgacgggaagctgccccgcctgattccgcggcgtgctctgtcgtttcacgtgagtctgatgctggccctgctgcggaagaagctcgcggagttcgacgcctccggtgccgacacccggctgatcctcacccgggatcagctcgtggagatggtgcggatgttcctgcccgagagcagcaatgaagcacggctggtcgatcagatcgacacattgctcggcaaggtcatcgatctcggcttcttgcggcggatcgccggtcaggacgccgcctacgaggtgcggcgcatcctcaaggcgttcgtggacgggcagtggctggccgaattcgaccagcggctcggcgagtacatcgagcaactcgatgacgtggagggggcgcactga

SEQ ID NO: 46701 - DNA, 3393 bp, Nocardia farcinica
atgaacggtctgttcagcgcggtcggtctcgactccgaggagtccggcctcgccgggtaccggctggagcggttggaggtctacaactgggggactttcgaccaacgggtgtggcatttccgtcctgaggggcgcaactgcctgctgaccggcgatatcggctccggaaagtcgaccattgtcgatgcgatcacgacattgctgctacccgcgcaccgtatttcctacaacaaggcagcgggggccgacgcgaaggagcgggatctccgctcgtatgtactcggctactacaagtcggagcggaacgaggcgaccggagcgtcccggcctgtcgggttgcgagatcgccggtcgtttacggttgtcctcgcaaccttcaccaacgtcggctacgactcgacggtgacgctggcccaggtgttctggttccgtgacacctctgtcggtcagccggaccggttctatgtgacagcggatcggagcttgacgatcgcggaggatttcgccgagttcggtggggacatcggcacacttaagcgtcggctgcgtaagcaggaggctcgcgtccacgaccattttccgtcctatagcaaggacttctgccgacggctcggaatcgagtccgagcaggcaatggagttgttccatcagacggtgtcgatgaaatcggtgggcaacctgaacgacttcgtccgttcccacatgctggagccgttcgacgccgcggactggaccggtcggctcgtccaccatttcgaagacctgaccaaggcacatgaagcggtgctcaaagcacgcacacagctcaccatgctcgaacccctgctcgccgagtgcgacagctacgacgagctcgacgcgcggatcgccgcaggcaaggccgaacgggaagcactccggttctactgtgccgatcgcaaggtgacgcttctcgtcaaccggctttcgagcctcgatgtcgagctcggtcagcaggaggcggccggcgccgacgcggaggccgagctgaaacggctgcgccgaaaggaacggaatctggaactcgagcgagcgggctgcgggggtgatcgaatcagacagctcgaagccgagatcgtctccgaggaggccgaacgcgcccggcgacggaaacgacacgaccactatcagtcgctgctggtggccgccgagctgcccgcagtcgtggacgcggcacagttcgccgcccggcgtcacgctgtctgcgaaaggcagagcggactcgaccaggaaaaggccgagctgcagaaccgactcaccgatcttgctgtcacgcgtcgcacgctcgacgacgaagccagggagatcaacactgaactgctgagcttgcagcagcggcgcagcaacattcctaagagcagcctggacatgcgcgaacaactttgtgctgcaacgggagtggattccgccgcgctgccgttcgccggcgagctcatccggattcgtgcggacagcgccgaatgggaaggggcagctgagcggctgctgcgcagcttcgggctgtcgatgctcgtctcgagcgagcactatgacgtcgtctccgagtggatcaacgaacggcatctcggcatcaagctcgtctactaccgagtgccggaacggctgagccggactccgtctccagcactgtcggaagggtcgctattcaggagattggagatcaaggactcgccgttctcggagtggctggaacgtgaactggcacaccgcgcagactacgagtgcgtccacaccatggcggagttccggcgcgtcgccaaggctgtcaccaggaccgggcagatcaaaggcgctcgcggcaggcacgaaaaagacgacatacgccggatcgacgaccgccgccactacgtcctgggctgggacaatcaagccaagattgacgccctgctcggccaggcgagcagattgcacgatcaaacgcgtgacaacgacgtgcgaagacaaaaggtcgacgacgagctgaccgcgaaagttaggctcggcaccacactgtccttgctcgagcaggtcgacgagttcgacgaaatcgactggcaggcgtcggtcaaccgaatcgccgaactcgccgacgagaagacgcagctggaacagcagtctgacgagttgcaacgactgacctccgagctggcgaccatcgctacccggatcaaggaggtcgaagctgtccagaagcaggcgcagacggagttcggaaatctcgatggccagcgcagaaccacggctgggcaactccgcgacacgaaggccacgctggatgaaccagcagccgcatccgccaaggcatggtttgctgctgtggacacgcgtgtcggggacaggaacctcgtcaccccggacgactgcgatacctgccgcatcgaggtgaacgacgcgatcaccaccgaaatcgatcggctcaccggccagcagaacaaggctgcggcgcgcgcggtcgcaaggatgggagacttccgtagggagtacccgttggaaaccgttgagttcgacaattcggtgcagtcggcaggtgaataccggttgttgcacaaacggatatcatcggacgacctgcctcgattcgagtccgagttcaagacctatttgaacaccaacactattcgcgacatcgcgggtttccattctcagctgacgaagcaggcagagctgatcaagcggcggatcgaaaccatcaacgactcgctggtcgacatcgactacaaccccggacggttcatccggctcgagccacatccgacggtgaatgtcgaggtccgtgacttccgcaaagcactccgggagtgcaccagtggatcgttgagcggcgacgattccaaccagtactccgaacagaagttcctccaggtaaaggcactgatcgaacggttcaaggggcgggaggggcacaccgaatccgaccggcagtggacccgccgggtcaccgacgtgcgaaattggttcgctttctccgcttccgaacggtggcgcgccgatgacaccgagcacgagaactacaccgactccggcggcaaatccggtggccagaaggagaaactcgcctacacgattctcgcggcgtcgctggcctaccagttcaagctcgattggggggtgagcaggtcgaagaccttccgattcgtggttatcgacgaggctttcggccgcggttccgacgagtcgacccggtttgcgctcgatctcttccggcggttgggtctgcaactcttgatcgtgaccccattgcagaagatccatgtcatcgaaccctatgtgtcggcggtcggattcgtggacaacaagacgggtgacggctcgcggttgcagaccttgacgatcgaggagtatcagcagcgccaactcgctcacgctatcgccaccgcttcggaccagggtggctga

SEQ ID NO: 46702 - DNA, 1164 bp, Nocardia farcinica
gtgacctcgaccagttggaccgtgcccgacgatgtgctgggcaaactgcggcggcgatggactcgtggcgagttcctgtcccagttcgccaccggaatgccctggcagccgatggcgatcggaatacgggggccgagcgtgcaggacatcgtcaccgatctggacagcgcccgtgcctgggtcgaacagtggcgccgtgtgcgcaagcttcgcgtcgagatgagaccggtcggtggtcgagttgtcggctcgaacacgattccccgccgcgtctgggtcgactcctacgagcagctgtggagcgtcctcggtgtgcagtcggcagtggaatcgttcacgatcctgctcgacgcgacccggcgcagggctcccgccatcgccgagtggatgtccgacaaaccgatggaagtactcgagtatctggacgagtggcctcggctggtcgacaccgccctgtggatagatgcgcacgcgcgtcctggcatgtacgttcggcagatcgatgtgcccggagtcgacaccaagttcgtggaacgcttccgcccggtgctgggagcgttgctggaccgtctgctcccggaggagcgtatcgaccgcagcaagtccccgtccgatttcatcggccggtacggtttccgcccgaagccttcctacatccggtaccggcgcttgtccgatggacctggattcagcgaactcgccgtccgagtatcagagctggccgacatgccgctggcggagcgcacagtgttcgtggtggagaacgagatcacctacctcgcgttcccgcaggtcgaggacgctgtcgtatttttcggcgagggctacgcagcatctcggttacgtactctgacgtggctggatcagcggaacctcgtctattggggagatatcgacacccacggatttgcgatcctgaacagcctgcgccgctcattcgcgggtgcacggtccatgctgatggaccgcgccatcctccttgcccacgagattcactggatcaccgaaccggatcccaccagcgagcacctcgaggcgctcacgccagaggaatcgagcctctacaccgacctcgtggagggggtcatcggcaggtccgtgcggctcgagcaagaacgcatctcctacgccgtaatcgaagatgccatccggcagttccgctga

SEQ ID NO: 46703 - DNA, 714 bp, Pseudomonas aeruginosa; identical to SEQ ID NO: 46477

SEQ ID NO: 46704 - DNA, 750 bp, Pseudomonas aeruginosa; identical to SEQ ID NO: 44461

SEQ ID NO: 46705 - DNA, 3306 bp, Pseudomonas aeruginosa; identical to SEQ ID NO: 43743

SEQ ID NO: 46706 - DNA, 1182 bp, Pseudomonas aeruginosa; identical to SEQ ID NO: 44163

SEQ ID NO: 46707 - DNA, 1359 bp, Pseudomonas putida; identical to SEQ ID NO: 46321

SEQ ID NO: 46708 - DNA, 642 bp, Pseudomonas putida; identical to SEQ ID NO: 46322

SEQ ID NO: 46709 - DNA, 1152 bp, Pseudomonas putida; identical to SEQ ID NO: 46323

SEQ ID NO: 46710 - DNA, 660 bp, Methylophilus sp. TWE2
atgagtcactactgggataatctttccgcccgcaccaatgggcaacatacgtcggaggagttcgagtctgcagcttaccgacttgtcgtagaacaggtcatttattatgcggaccgtcatagccgcgccacttattggctgatcgagggcttcgaacgtgacttcagggaagccctcgccccactgggcatcacactagatgtcaaccgacagttgcgctatgtctatgccaagccccagtacgcaaaggctggcacggcatccgtggctcagactttgctcgccctcgtgctgcgagcactctatgatgaaggcgcacggcttggccaatttaccgatgatggcgaggtcgtctgtgacttagtagagcttgaagagaaatatcgtttaatgactgggcgcgaactgccaggcaaaggcgaattttccgagctgatgcgaactatgaagcgatggggaattgccaaaaagtccgacgaaagcttggtacagaggggggattccgatcagacactgccttacgccgtcatcatccgaccagcaatcgctgacatcctcggagaaatggcattacttcgcctcgcccaatggaaggagttagatcatatgcctcgaattgaggatactgagtcggaagacgatcatgaggtgactgaatga

SEQ ID NO: 46711 - DNA, 1098 bp, Methylophilus sp. TWE2
atgttcgacgataagctgccggaaagggtgacacattgcgataagcagcgggaacgtgccaaagaccgtatgaatgactccatcgttcgtggcatgaaggagttcggcgcattccttacgaactacaaggaacagaccctgacggacaccagtgaatggcgggatgcacacaaatggcttgccgaactgcttcagcgtcttgagaagacagagcttgccggttacagcaaagaaatggatgcagcataccgtacctcgcaggagacattccgaaatgacgttgcgattgcgctgaatgacaaccttgaatggctcggagacactatgagtcgcttgaatgaagtcctgagcaaatgtccatcattctcgaatggcgagcgttaccgcttccgtcgcgtggtaaaaccacacttagcgtctttgctcaagtttatcaaggatgtggcggcctatggcccgacgcaagacctgctgggcggtgcgggagatttgccgcaagaattcaaggaattactaaatgaaaaggctgctccaggtgcggcaggcattaagagtccgttggatgactatcgagagttctatgacttcgatattgagattctgcgcgaagatactatcacaaaagaaaacaaggtcgtgggtcacctcagcaaacgtctgggccctggatctggcggcgaacatcgctctcccttgtatgtgatcgccggtgccgcacttgcctcggcgtacaggctggatcgtggaaatcatgacgggctgcgcctgatgctgctagacgaagcctttaacaagatggatattactaacattgttgctaccatgcgctacttggagcaattaggcctgcaggtatttatggccagcccaggagaaaatcttggaattcttactgcgttcctgcggcgatattatgacatattgcgcgatcctgaaaataacacggtcaggtttgaagggcacaacgtttctgaagaaatccgcatccaattcaaggaagacttaccggaattcaaccctaatctcgtcgagcaggaaatagaagtcatgcgagcagaggctattgcaatggcgaggcaaagggagttggctgagtaa

SEQ ID NO: 46712 - DNA, 1170 bp, Methylophilus sp. TWE2
atggatacactagctcactccctgttaagcaaactactctctgccgctgagatgtgtaatgcgggtcgaagatcacgccaggcggcattgactgaatcaaccctggctgaatatcgcggcttttcctcactaccaaaaaaggaatctttcgaggaaacaatgcgggctgcgcgggccgagggagccgttgaacttgtctgggatggaaagaagtccggtgaaggttttatcaagcgaattaaccttgtcgacagacgaaatctagcagcctttctgggaatccgtctttccgacgacaaggtcgatgaggcaagggagcatttgcagccattcgttgccgactacccagtgttagaggaagttattgatcgttggaaaaagctacgtaaggtgagaagccttgggccggaaaaatatcaggattggatggatgccattcgcacgatagtggcatgccaaaacgccccatctacccaaacaatgtccttgcctgtgcgaaaattcagcagccaattgtttaaagacagcaagcgtatagagaagctgattgctccattggatgttttgctcgttggagggttagatggtgatattcgaccagagtccggcgtcttgcaggaacttgggcttttccgggaggagcatcccgccagacttgctgggaatgtgattatagagcgtgaacgcgtcacagcttgcctggatcaaccatacagtggattaccggcgcaaacggtccttcgattagccagcactccaagtatggtgatgaccatcgagaaccttactacctttcatagcgaggcacgccagcgatgcgatgaaaatgtgctgctgatctacactgccgggatgccatcccctgcttggcgagcaatgtaccgtagattgcttggaagcctttcaaatgatgtacccctgtatcattggggagatgtggatgaaggtggattcagaattgccgccaccttggccagcgatgctaactcagctggatacaaactgttaccatggaagatgcaccctgatgacgttcctaaaaatgtgaggcgaaaagctactcagcatacattggcacaaatcagacacttttctgcagtagccggatggtcggaactaggagatgcaattagtgaagctgagttcgttgttgagcaggaaagtctataa

SEQ ID NO: 46713 - DNA, 1509 bp, Gordonia jacobaea
atggtgaactctgccgtggatgggactctgacgctgaccgacacgttcgaggcaaaccgctcgatccagcgctctgccgccgtccgactgttcgcggcctcgaactcggccctgtacgtcacgctgatggaacgccatctcgacttcggaactcgccacaccgagtcggagctcgctattcgcctagaccgcgacatcgccgcactcggcacgtcagaccagcccgccgggctcgatctcatcaagtcgtgggccaagcaggggtggctacaccgtgtgaccgacgccgcgtcgccgtcggcacccaacgtgtgcttcctgagcaccgaggcgcgctcggtgatcgcatacatgcgtcgattgcggcgcgaggacagcgtcgcgaccggcgggtcgatcatgggcgtggccgccggtctgcaccgggttgccacgcaggtgaccgacgatcccgaacgaatccgcgaggacatcgagaaccagatcgacgaactcgacgccgaactcgtcgaactcaatgagggccgccgtcgaccattcgacctgcggggagccgaggacgaggctcgggcgatcgcgtatcaaatggaacagatcatcaccgacatcggccaatacggcgcgatgctcgatcggatcaccacagcgctgctcgacgacccgcacgactccgacctcgcctaccgggatcggcagcgtcagatgttcgacgactatgagtcgctcctcgagtcgtcgcagagcgcgtcgtatcacgccttcacgcagatgattcaggatccgatgcagcgcgcacgcctcatctccgacatcgagctcgtcgtcgacaggctgccgagcatcgataccggtctgcgggcagtgatggagaatttcttcccgttggtcagtgagcagatggccgaggtcgggcggatcaggcagcgctgtgcgcgtcgaatccgacggttcgtcgcgtcggggacgctcgagcagagccgtggcgtcgcccgacagctcaacgacgcgctggcgacagccaatgagcttctcaaggattcgctcgccgaccgtcgtctcggctacgagttgcctgtcgcgacgccgcaggtgacgtcgatcggtcggctcgcgttcgaaatccgcaatccggcaccgccggagcaggcacgtcccgcagacggacgaaccaacctggcatcgttcgcgtcgctcgcggggcaggtcgacacggtggaactcgccgacgtcgtgaacgacaagctgacatcgggaccgctgtcgttgagcgacgcgatcgccgcgctcgacgagccgtacctcgcgcacgtcatcgtgttgtggtcgtgggccctgcgccagcctcgggaaatgccgcgccagcatggggcggggtcgtcgttcgtgcggttccggtcgctggagggcgaggatcgcgcgatcgaagtgccgacgttgttgttcagcgagcctattccttcccagcacagcgataccgattcgattctcagcacggaagccgacgcctga

SEQ ID NO: 46714 - DNA, 867 bp, Gordonia jacobaea
atgaccagcaccgacaccacgaacactgacaccaccgacccgaacacgcccggggcaacgacgaacacctcggccacctccgcgcccgccgacgagttcgccggatacgacgacctgccgaccgcggcgacgcacggaagaatcgacggaccacgcgctcctcgattcgacggcgatgtctcggcgatgcccgatcgcgcatgctgggcattgcagaatctcctcacgcgcaggcacgtcagcggcgaccgcaacccgcaactgtgggcgtgggtcaccgagtatcaggatctgctccgtagtcggctgtcagagctcgaccttcgactgcgcctcgtcgacgagctccaggtcgcgttcgtcgagcaggctggatacgagtcacgttggggtagaaagattctcaaacgcgagaccatccagacctacgacgcgattctcgcgttgcacctcgccaagttcttgcgctcgtcgcgtgaggagacagcgatcatcacccgtgaggagatccacgagatgttcgcaggcgtgaccaatacgatcgaccgtgatctcgcgttgttcgacaagcggatcgaacgtgcgatagacaagctcgaggaactcgacttcttgcgccgacaccgcgacgatccagacacgttcaccgtcagcccggtgatcaccgctgtcatgaccgcctcggtgatcaccgacctgcagcatcagttcgagcagttcatcggcgccggcgacacgggcgacgatctcgcggtcgacgccgattcggtaggcgcagaaggcagctcggcgccgaccggccagtcggactccaccgacgaatactccactggcgaatactccgacgacgaaggagaccagtggtga

SEQ ID NO: 46715 - DNA, 3318 bp, Gordonia jacobaea
ctgtcgcggttgcagctcatcaactggggcgtcttcgacggctatcactccatcgggttcagcccgggcggcgcgctcatcacgggttcgtcgggaagtggcaaatcgtcactgctggacgcgatctcgctggccttcctgcccgatcaccgccgcaacttcaatgcctcgggcgataccaccgcggccggctcgtccggcggtcgacgtaccgtcggcaagtacgtgcgcggcgcgtggggcgagcgtcgcgacgcaacgggagcgcaccgcgagatcatgtatctccgcgggagcggccccgcgtgggcggcgatcgcggtcacctacacctcgacgtcgggcacggctatcaccgggcttgttctgaaatggcttggcgcgggcaaactcaccgatgcgcacagcgcttacttcatccacgacggtgacgtcgacatcgtggacgcctgcaacgagtgggccgccaatggctacagcgctgcccggttccgcgatcgcggttggcagggcggtccgggagagggcaagtacctgtcgacgctgtattcgttgatcggcatccgcggctccgatgccgcacagcagttgctcggaaaggccaagtcgctcaagagcgtcggcggactcgcgcagttcgtccgggagttcatgctcgacgaacccacgagtatcgcgggcatctccgacgctctcgagcagatcgatccactggtcgaggcgcgtgagctcctcgacgtatcccggcgcaagcgcaccattctcgacaacgtcgaggcgatgcaggagcgctatgcggcggagtcggcgacgttcacggtgctcgacaccatcgagccagaagtcgtccgctcgtacgtcaccaacctgcggctgcacaacgccgaacccgagatcgccgacctcgacgatcagatcgcccggctcgattccgacctcgccgcactcaactcgcagcacgatcaactccgccaggatcacagccacctactcggtcggatcgcgacgtcgacgggcgatctcgcgccgctgcaagaacaactctcgacggcacagaaggcaagcaacgaggcatcgatccggcgcgccacgtacgaacacaagatctccgcgctcggattcgacattcctgaagacggcgaagcgttctgggagctgcgtgagcacctgatggaggaggccacccgactcgacggccaactcgaggccggcaagccacatttcgccgagacgctcgccaccgaggtggcagcgcgatcccaacgcgacgctgcccgtgacgaactcgagcgtgtacgccacgccggttccgcgctgccccgcgccgagcacgagatgcgtcgaatcatcgccagcgcactccaactcgacgagtccgaactgcggtatgtcgccgaactcgtcgagctcgaaccgtctgccgagaggtggcgactggccgtcgagaaggtcctacgtaacgccgggctgcgactcctggtgccggacaagcactttgcggccgcgctcaaattcgtcaacgagcacgacatgcgcggacggattcaactccaccacgcggagacgcgtcccgcgccgatggtggagccgggcacgctcggggcaacgctacgggcggccgagcccgaccacccgtgcaccaacgaggcgctcacgatcctcgccaaactcggcaattacgtgtgcgtcgattcaactgccgacttcgtcgagcacaccaaggccgtcaccgaccggggtctccgcaaggattcggcgaaactcgccatcaaggacgaccgtcagcagttgcgtccgtcccaatacatcttcgtcggaaacgtgagcgcgaaaatcactgcgctgcaagaagaactcgaactcgaaaacgagctgtacgaacaggcgcgagctcgcagcgccgaactcgatcgggagcgcaccgccaaggaacagcgacgcgacgcgtaccgacgagtctgtgagcagttcgccgggtggaacgagatcgacctcgacaccgcggacgatcgcgtcgacgcgctcaccgaacagtacgagctgctcatggaggagaatcccgacaccgaggcactgcaacgcaaggccgaggacatctgggagcaggtccgcgccgccatctcacaggcggcacttgtgcgtgacaaaatcgccactcacgacaagcgtcgtactcagctactcgatctggtcgaccggttgaagatcgaacccgtgtcggcccacgcagaggcgacactcgatcgcttccgtgaggagtccgcggcggtgctcgacgtactcgcaccggatccgttccgccaggatctactcaaagccgttgggcgcgagcgtgatcggatgcgtgcagacactcgccgctcgcgcgacgagttggggcgaatcctcgacgcctacgacaaggagtttcccgacgcgatccccaacgacagcgacgatttcgacgagcgtgtccacgactacgtcgcgctgtgtcgccgcatcgacgaacgcgagttgcctgccgcctacgaacggatgcgacgactcatcaccgagcaggcaccgggcgcgatcctgagcctgcacatggcggccgaagccgaggagcgccgcatcgtcgaacagatcgagcgagtcaactccggactcggctcggtcgccttcaaccgcgggacccgcctgcggctctgcccgggccgcaaaacgctcgcagcggttgccgaactgaccgacaaggcgcggcagatctcgtcgcgtaccgccgccgtcggattcggcgacgaggaggcgatcctcgagcagtacgccgacatcctgcttctccgtgaacgactcgccggtgcaacgcccgaggaccgtcaatggacgcgagatgcactcgacgtgcgtaaccgattcgacttctactgcgaggaacgcgacgccgagaccggcgagaccatccgcacatacagcaacgcgggagacaactccggtggtgagcaggaaaagttgatggcgttctgtctcgccggggcgttgagcttcaacctggcgagtccgcacggcaagggaaaccgtcccatcttcgcgcagttgatgctcgacgaggcgttctcgaagtcggatccccagttcgcgcagcaggctcttgcggcattccgcaagttcggcttccagttgatcatcgttgcgacggtgcagaacaccagcaccatccagccctatatcgacaacgtcgtcatggtgtcgaagaccgaggacgtcaacagccgtcccatcgccaccgcgatttcgacgtcgattcagacgttctcggatctgcgccgaaccagttcgagccgcctgccggtgtga

SEQ ID NO: 46716 - DNA, 1470 bp, Xanthomonas campestris pv. campestris
atgaagcatcaggcacggattgccggctaccgccacttgcgcgaccagccggcgtggaaattgctcgccgccgatcacgcaccggagctgatcggcctgctgcagaccctgttgatggacggcgaacgccggctgccatcggcggtgctgcatgcgcgcctgcagcgccagctggatgccttgcgcggcgacgaactttcccgcgagctgccgcgcaccgcgcaggcctacctggcgcactggctggcgcagggctggctggaacgccggctgcccgaaggcgcagccgaagaagaatacgaactctcgcgtgccgccacccaagccatccgtttcatcgccggcctgcgcgagagtggcagcagcgccactgaaagccggctgtcgctggtgatccagcagctggtgcaactggccggccagaccgaagccgacccgggcgcgcgcctggctgcactgcgcgcagaacgcgagcgcatcgatgccgagatcgagcgggtggccgccggccgcgtcggtgcgctggacggcaagcgcgcgctggaacgcacccgcgacctgatccatctgtccgatgaactggccgaagatttccatcgcgttcgcgatgacttcgaacaactcaaccggcaatttcgcgaacgcatcatcgacgacgaaggcgcgcgcggcgatgtgctggagcagttgttcaacggcgtggacgtgattgccgacagcgaggccggacgcaccttcgaggcattctggagcctgctcaacgacacccagcagagcagccagctggaccaggcgctggacgcactgctggcgcgcggcttcgcacgcaagctcgaccgccgcgaacgcgccttcctgcgcgggctcaccggtaccttgctggagcgcggcggcgaggtgcacacggtgatgcagcacttcgcgcgcagcctgcgcgggttcgtgcagagccgcgggtatctggaacagcgccggctcaaccaattgctcaagcaggcacagggcgaagccttgcacctgcgcgagagcctgcatgccaccgccgccaccggctacacgcaggcattgagcggcagccgcctgcgctcgttgtcgcagtggcgcctgcacgacccgcggctcacccaggtcgatggccgcgtgtacgcagccgacgcggcagagatctcgctggacagcgtgggcgatttggtcgcgcaatcggagatcgacgtgcgcagcctgcgccgcgatctgcacgcgctgctgggcgagcacccgcggctcaccatcggcgatgcgttgcagcagcggccggcggtgcaggggctgggcagcgtgatcggctatctgtcgctgggcacgcgccacggcctggtgatcgatggccacatggaaacggtgcaatgggaaggcggcgacggcacgttgcggcgcgcgcgcattcccttggtgtggtttacccgggagaaacgcaatgaactggtctga

SEQ ID NO: 46717 - DNA, 708 bp, Xanthomonas campestris pv. campestris
atgaactggtctgagcaggcagcgctggacacgcacgacgacgatgacgccgacgcacacgccagcgcgctgaggctgccggccagcgatgccgccagcgtcgcgcagggcggcgcgttgttcctcggcgacaccggtacgctgccattcgatgcgcgccgcgcgctgtgccagctgttggccggccccagcatcgacgcgcagcggcacggcggtttgtggcctgcgctgctacgcaacgaggtggcagtgcgccaggtgctgtgcgaactgtttctggagctggtgctggaccgcgaaggcggagtggcgttcacccgccaggccgacaccgccgagctggaatcgcccaccttgctgcgcagcgcgccgctgaccttcatcgagtcggtgctgctgctgttcctgcgtcagcaactggccgaagccgatacgcgcggcgagcgcgcggtggtggacgaggcgcagttggtggaggcgttgtcggtgtacgaaaagaacgtgtccaccgacagggccgggtttacgcggcgggtgatgacggccatcggcaagatgcgcgagaaccagttgctgtcgcggttgcgcggcagcgaggagcgttacgaggtgtcgccggtgttgaagttgttgttctcggccgaggatgtgcaggcgttggtggtggcgtatcgggagttgcgcgagggggaggttgctgcggattga

SEQ ID NO: 46718 - DNA, 4014 bp, Xanthomonas campestris pv. campestris
atgaattcccagtccaacctgtcgccggcgtcgccgggtgcttccttgtttgccgagacgctggctgagcagcgtgcgcagcagtttcgtatgcggcgtttgcaggtacacaactggggcacgttcaacgggttgaccgaggtgccgatcgcggagaagggcttcctgttcgtggggcggtccgggtctggcaagtcgacgttgctggatgcgatgtcggcattgctgacgccaccgagcatcgtggacttcaacgcagccgcgcgcgaggccgagcgcagtgggcgcgaccgtagcctggtgtcgtatgtgcgcggtgcctgggccgatcagcaggacagcgcgtccggtgagatcgccacgcagtacctgcgcaagggcgcgacctggacggcgttggtattggagtaccgcaacgcgcaaggcgaggcggtgagcctggtgcggctgttctggatcgccggcagcggcaatgccgcggcggatgtgcggcggcattacatggtggtgccgcgcgcgttcgatgtggccagcgagctggagggtttcgatctggatctgcgcaagctcaaggcgcggctgggcgaggacgtggcgcatttcgacggtttcgccggctatgcagagcgcttccggcatgcgttgggcatcggcaacgacatggcactgcggctgctgcacaagacccagtcagcgaagaacctcggcgatctcaacgccttcctgcgtggcttcatgctcgatgagccgcgcaccttcgaagcggcagaccggctggtcgaagacttcgccgagctcgatggtgcgcaccatgcagtggtcaccgcgcgacggcaggtggaaacgctcagcccggcgcgcgagcaccatgccgcgctgatggccttgcgccgcagcgttggcgaattgcgtgaattgcagctgggcgtggacagctaccgcgagcaacaacggctggccttgctggaggcgcgcctgcaggaggtcgacagccaggaccgcggcctggccggcgaagaaggccagcgccgtgagtcgttggacaaccacgaacagaaactggccgggctggagcgcgaacagcgcgccgccggcggtgagcagatcgaagaactcgaacgcgagcgcgtgcgggtggaacgcgagcgcgatgagcgcctgcgtcgccgtgcgcagatcgagcaggcctgccgccagctcggcaccgccttggcggccggcgccagtgggttcgccgcccaggtggcgcatgcgcagggagtgctcgatggcggcaagcagcacgccagcacactggacgaggccatcgccgagcgcatgggtgaacgccgcgacgatgagcgccgctttgccgagatccgtgcagaactggacgcgctaaagaaagcgccgtcgagcatgcccgcaccgatgcaggcgctgcgcgcgcggctgtgcgacgacaccggcattgccgaatccgcgctgccttttgtcggcgagctgttgcaggtgcgcgaggaccaggtggcctggcgtggcgcgatcgagcgcgtgctgcacggctttgcgcagtcgctgttggtggacgagcggcattacgcgcaggtcagcgaatgggtcaaccgcacctacatcggcacgcggctggtgtacttccgcgtgcgccgcaatgacgagctgcattcgcgccgtgtcgatcccaacgcactgcccggcaagctgcaactgcgcgagcatgccttcaccgagtggctgcgcaacgagctcacccgtcgcttcgattacgcctgcgtggacaacgccgcagcgctgcgcaatgccgaccgcgccatcacccgcgaagggcaggtcaagcatcccggcgaccgctacgaaaaggacgaccgccacgccgtcaacgaccgcaagcgctggctgctcggtcacgacaaccgcgacaagctcaaggtcttcgagcgcgaagcgcaggcgctggcccagcgcattgccagctgcgatgccgacgtggctgcgctgcgcaagcaacgcgagcaggaccaggaaaaacggctggccgcgcacaccctggtggagcgcgactgggacgagatcgacgtcggccccaagctgcaacgcctgagcgatatcgatgaacaactgcagcaactgcgcgaaggcgatagcggcctgcgcgcactgggccaggcgatcgacaccgcgcgcacgctgcgcgatcaggccaagcgcacgtatgaagacgtgcggcttgagcgcgcgcagctggcacgcgagcgcgtgcgactggaacagcagcaggccgcctgcgccggccgtgccggcaccgctgcgctcacacccacgcagttgcagggcctgcaggagcgcctggccgcgttggcgccgctgtcgctggacactctggaagcgcatttccgtgtggtcgaacgtgggctggccgagcaactggccgaaagccagggccgcgacagccggctcagcgcgcagctgctcgaatgcttccgccggtattgccagcaatggccagaagacagcggcgacttcaccgtgagcctggccagcgccgacgatttcctcgcgcggctggaccggctggaaagcgatggcttgccgcgtcacgagcaccgcttcttcgacctgctgcagacccagagcaagaacaatctgctcgccttgcagcgccacaccgccgaagcccacaagggcatcaagcagcgcatggacgaggtcaacgccagcctggagcaggtgccgttcaaccgcgacaccatcctgaccatcgaggtcagcgaccgccgtctggccgaggtgcaggaattccagcagcagctacgcgccgtgttgtcgcatcagcagaccgaagaccgcgcgctggccgaagcgcagttcgccaccttgcgcacgctggtggcgcggcttggcgcgcaggagccggaggcgcggcgctggcgcgagcaggtgctggatgtgcgcctgcatgtggaattcatcggcgtggagctggatgcacagacccgcgcgcaggtggagatctaccgcagtggcgccggcaagtccggcggccagcgccagaagctggccaccacctgcctggcggccgcgctgcggtatcagctgggtggcgaagacggcgaattgccgcgctattgcgccgtggtgctggacgaagccttcgacaaggccgacaacgaattcaccgcgctggcgatgaacatcttcgagaatttcggcttccagatggtggtggccacgccgctgaagtcggtgatgacgctggagcctttcatcggcggtgcgtgtttcgtggaaatcagcggccgccacaattccggcgtgttgttgatcgagtacgacgaacaggcgcagcgcttgaaactgccggagcgctcgcgtggggaagacgcggcggtgccggccgaacagggtggcgctgttgcaccaggcgagcgcgcagaacgtgctccggtgatcgctgtggagtctggtcacccggcaagcgtgcacctagcggagagcacggcagtgcctgcgcagggcgatgcagtcacggacgggcagtcgcgcggcagcaagcgcacacgcgcggcggccaccgcgtcgacggcggcgccagtgcctgcgcccgctggcaagcgcagcacgtctgcagctgcaacatcagcgacggccgcgccagccacgcgcacggcggacgcgtcgaacgcacggcgcaaacaggctgcaacccctgacacgccaccgaagccaaccaagccggcgagcacgcgaactgggtcctccggcaagcccgctgccaagcgcacaaccaccgcgaaagccgcggccgtgccgaaggcctccaacgccacgccggccgtcgcggccaagcgcacgggcaaagcgccgaaagacgttagcaagccagcatcagctcagaaggtggccaagccggtatcgagatccaagcccacggccaagcccgcgacggcggcttccgccacgagccgcgctgcgtccacacgcggctctgctcccaaggcgcgcagcaaacgctga

SEQ ID NO: 46719 - DNA, 1470 bp, Xanthomonas campestris pv. campestris
atgaagcatcaggcacggattgccggctaccgccacttgcgcgaccagccggcgtggaaattgctcgccgccgatcacgcaccggagctgatcggcctgctgcagaccctgttgatggacggcgaacgccggctgccatcggcggtgctgcatgcgcgcctgcagcgccagctggatgccttgcgcggcgacgaactttcccgcgagctgccgcgcaccgcgcaggcctacctggcgcactggctggcgcagggctggctggaacgccggctgcccgaaggcgcagccgaagaagaataccaactctcgcgtgccgccacccaggccatccgtttcatcgccggcctgcgcgagagcggcagcagcgccaccgaaagccggctgtcgctggtgatccagcagctggtgcaactggccggccagaccgaagccgaccctgacgcgcgcctggcagcactacgcgcagagcgcgagcgcatcgatgccgagatcgagcgggtggccgccggccgcgtcggtgcgctggacggcaagcgcgcgctggaacgcacccgcgacctgatccatctctccgatgaactggccgaagatttccatcgcgtgcgcgatgacttcgaacaactcaaccggcaatttcgcgaacgcatcatcgacgacgaaggcgcgcgcggcgatgtgctggagcagttgttcaacggcgtggacgtgattgccgacagcgaggccggacgcaccttcgaggcgttctggagcctgctcaacgacacccagcagagcagccagctcgatcaggcactggatgcgctgctggcacgcggtttcgcccgcaagctcgaccgccgcgaacgcgccttcctgcgcgggttgaccggcacgctgctggagcgcggcggcgaagtgcacacggtgatgcagcacttcgcacgtagcctgcgcgggttcgtgcagagccgcgggtatctggaacagcgccggctcaaccaattgctcaagcaggcacagggcgaagccttgcacctgcgcgagagcctgcacgccaccaccgccaccggctacacgcaggcattgagcggcagccgcctgcgctcgttgtcgcagtggcgcctgcacgacccgcgcctcacccaggtcgatggccgcgtgtacgcggccgacgcggcagagatctcgctggacagcgtgggcgatttggtcgcgcaatcggagatcgacgtgcgcagcctgcgccgcgatctgcacgcgctgctcggcgagcgcccgcggctcaccatcggcgatgcgttgcagcagcggccggcggtgcaggggctgggcagtgtgatcggctatctgtcgctgggcacgcgccacggcctggtgatcgatggccacatggaaacggtgcaatgggaaggcggcgacggcacgttgcggcgcgcacgcattcctttggtgtggtttacccgggagaaacgcaatgaactggtctga

SEQ ID NO: 46720 - DNA, 708 bp, Xanthomonas campestris pv. campestris
atgaactggtctgagcaggcagcgctggatgcgcacgacgacgatgacgccgaggcacacgccagcgcgctgaggctgccggccagcgatgccgccagcgccgcgcagggcggcgcgttgttcctcggcgacaccggtacgctgccattcgatgcgcgccgcgcgctgtgccagctgttggccggccccagcatcgacgcgcagcggcacggcggtttgtggcctgcgctgctacgcaacgaggtggcagtacgccaggtgctgtgcgaactgttcctggagctggtactggaccgcgaaggcggagtggcgttcacccgccaggccgacaccgccgagctggaatcgcccaccttgctgcgcagcgcgccgctgaccttcatcgagtcggtgctgctgctgttcctgcgtcagcaactggccgaagccgatacgcgcggcgagcgcgcggtggtggacgaggcgcagttggtggaggcgttgtcggtgtacgaaaagaacgtgtccaccgacagggccgggtttacgcggcgggtgatgacggccatcggcaagatgcgcgagaaccagttgctgtcgcggttgcgcggcagcgaggagcgttacgaggtgtcgccggtgttgaagttgttgttctcggccgaggatgtgcaggcgttggtggtggcgtatcgggagttgcgcgagggggaggttgctgcggattga

SEQ ID NO: 46721 - DNA, 4017 bp, Xanthomonas campestris pv. campestris; identical to SEQ ID NO: 41637

SEQ ID NO: 46722 - DNA, 1467 bp, Mycobacterium goodii
atgaccgacgctgatgtcagtcgtccgtcgttgccgcggctctacgagctcaaccgggaggtggccgagtcgcggtcggtgcggctgctcgtggccaacaacctggccggatacctcacgctgatggaacgtcacctcgatcgcggcgccaagctcaccgagccggaactcgtcgcccggctcgagcgggatctggccgacctgggcgccgacggcgagcagtcgggactggcgctcatcaagtactgggccggccagggctggctgcaccgcatcaccgaacaggccggcgacggtgagcgcaacgtctgctacctgacctatgaggcccgtgcggtgctcgactttgcccgccggatgcgccgcgaggacaccatcgccaccggcggctcgatcgcgggcatcgcggcgggcctgcgccggatggccggccaggtcagcaacgaccccgagcgcatccgcgccgacatcgaagccgagatcgagcggctgcgcgccgaactcgacgcgctcgacgagggccgccgcccggaaccggatccgctcgacgtcgaggacgaggcgcgggcgatcgcgctgcagatggagcagatcatctccgacatcgggcagtacggcgccatgctcaaccgcatcaccacgcgcctgctcgacgcgtccgccgacagcgacgtgggttaccgggaacgccagcggcagctgttcgacgactacgaatcgctgttcgcgtcgcgcgagagcgcgtcgtacaccgcgttcacccggatgatccaggatccagaacagcgggccgcgctggtggccgacatcgagctggtgaccagcaggctgccccagctcgacccgagcctgcgcgaggtgatgtccgggttcttcacgctggtggcggcccagaccgccgaggtgggccgcacccgccagcgctgcgcccgccgcatcaaacgcttcgtggcgtcgggcacgttcgaggagagccgcggcgtcacccgccagctcaacgacgcgctcgcggccgccaacgacctgctgagcgtctccctggccgacagccgcgtcgggttcgaggtgccgttggcccgcgccgacttcaactcgatcggtgcggtggcgttcaagatccgcgacgcggtgccgcccacacccgcccagccgtccgagggtgaggtgaacctgtcggcgttcggtgcgctggccgcgcaggtcgacgccaccgaactcgccgaactcgtcaacgacaccgtcgcgtcgcggccgctgccgctcgacgaggcgatcggcatgctcgactcggcctacctggggcacgtcatcgtgctgtggtcctgggcgctcaagcagccggccaccggcaacggcgagccggtgcgggtgcggttccgttcgctgcaggggcccgaccgcgaaatcgaagtgccgaaactggttttcaccgaaccgatcccgatcgtcagcgagagtttgttatga

SEQ ID NO: 46723 - DNA, 723 bp, Mycobacterium goodii
atgagcgacacctccatcgacttcgacgcgctaccgagcatcgacgcggtcgaacgttccgcgccggaacgccgtgccccccgcttcgacggtgacgtctcggagctgcccgaccgggcctgctgggccctgcagcacctgctgtcgcggcgttacatcagcaagcacaaccaggccgaactgtggtcatgggtcacccggtaccgcaccgagctcacggttcggctgtccgaactcgatctgcggctcgtcgtgtccgacgaccacgagatcgcctacgtcgagcaggccgagtacgaatcacactggcgccgtaagctgttgcgtcgcgagacgctcaacacctacgactcgatcctggcgctgcacctcgcgaagctgatgcgcagcgcgagccgcgacgagaatgtgctgatcacccgcgaggacatccacgagttgttcgccgcggtgaacaacgacaccgaccgtgacgtcgcatcgttcgaccggcgcatcgacaacgcgatcgagcggttgaccgacatcgagatcctggtccgcaaccgcgaggacgagaacagcttcaccatcagcccggtgatcaacgcgatcatgaccgcctcgacgatcaccgaactgacccagcagttcgaacaactcagacgcgccgcgagtggcgaccccgaccccgagcccgacaccgccgcagccaaggatgaagtggacgccgatggcatctga

SEQ ID NO: 46724 - DNA, 3357 bp, Mycobacterium goodii
atggcatctgaaccgaccaaccagttctatctgtcccgcctgcaggtcatcaactggggcgtgttcgacggataccactcgatcccgttcagcccggcgggcacgctgatcaccggctcctcgggaagcggcaaatcctcactgctggacgcgatctcgctggcattcctgccgtcacaccggcgcaacttcaacgcctcgggtgacaccaccgcggcgggttcgggcaccggcaagcgcacggtcgacaagtatgtgcgcggcgcgtggggtgaacgcagggacggcaccagccgccagatcatgtacctgcgcggcaccgggcctgcctggtcggccgtggcggtcacctactccgaccgcgccgggcgtgccgtcaccggcctggtgctcaaatggcttgccgccgagaagacctcggatcccggcagccgctactacctcatcgacgacgaccgcgacatcttcgacctgtgcaaccggtgggcggcgggcgggtacgacgccgcggtgttccgcgaggcgggctggaacggcggccgcagcgagagccagtacctggcgcagctgtactcgatcatcggtatccgggcctccgaggccgcgcagcagctgctcggaaaggccaagtcgctcaagagcgtcggcggcctcgagcagttcgtccgggagttcatgctcgacgagccggccagcctcgccggcgtcgaggaggccctcgagcagatcaacccgctcgtcgaggcgcggggcatgctcgacgtggcgcggcgcaaacgcaacacgctgggcaacatcgaggcggtgcaggcgcgctacgccgacgaggccgccaagttcggtgtgatcgacacgatcgacaacgccatggtgcgcgactacgtcgaccggctgcggctgcagcaggccggtccggagatcgacaacctcgacgaccagatcaaccagctcggtgcgcagcgcgacgacttcggcgcacaacagcgccagctcaagaacgagcacaacgcgctgatggcgcagatcaattcggcctcggtcgatctggtgccgctgcagcagcggctcagcgaggcggagaagctcagcgacgaggtggcccgcaggcgcggggcctacgaggacaaggtcaccgcactgcagctcacgccgcccgacaccgccgaggagttctggtcgctgcgcgagacgctcatggaggaggccgaccggctgcaccgcgagctgttcaccggcaaccaggcctatgtcgaggcctcggcgaaagaggtgcgggcccgcgaggcccgcgacgccgtcgaggctgagctggaacgtgtgcggcgcctcggttcgtcgctacccaagaccgagtacgagatgcgggcccgcatcgcgcgcgcaatcggcatccccgaacgcgatctggtgtacgtcgccgagctcatggagctcaagcccgacgagggccggtggcgcatggccgtcgagaaggtgttgcgcggcgccggtttacggctgctcgtgcccgaggcgcacctggatgcggccctgcggttcgtcaacgagaacgacatgcgcggacggatccagctgcagcacgtcaagcacgatgcgcagctgcgcgcgcccgccgaggcaacgctggcggccaagttgcaggtggtcgaccccacccacgacagcgccgtcgaggcgctcaacgtcatcgcgtcggtcggcgactacctgtgcgtggacagccccgacgagttcaccacgcactcgcgcgcggtcaccgatcaggggctgcgcaaggacagcggtcggctgtcgatcaaggacgaccggtccaggttgcgtccgtcggactacatcttcgtcgggggtacggaggccaaggtggccgcgctgcaggcggatctgaccgcggcagaagatgtctacgcggccgcccgcaaggcgcgtgagcggctcgaccagcaccgcgcggcgctgcaggcgcgggagcgggcctgccgggcgctgtgcgaccagtacatgcagtggaccgacatcgacaccgattccgccgacgaggcgctgacccgactgcaggacgagctcgatctgctggtgtccgacaatcccgacgtcgagaagctgcagcagcgcgccgacgaatgctgggagcgggtcgagaaggtcatccagcagatcggctcgctcaacgaacgcgagaccctgctcgacaaccggcgcaccgcactgctcgagctgaccgaacggctcaagcccggcgagatctcccagcatgcccgcgacaccctcgacagctacgcggccgacatcgcgctgccgctcgacctgctcgactccgagccgttccgcaatgaactggtgcgcgtcatcagccgtgaacgcgaccggttgcgtgccgaccgcaaccgcagccacgacgagctcgcgggcatcatggcggcctacgacagctcgttccccgacgcgatccccaacgacagcgacgatttcgacgagcgcgtgcacgattacgtggcgctgtgccggcgcatcgacgagcgtgaactgcccgacgcctacgagcgtatgcagcggctcatcaccgagcaggcgcccggcgcgatcctgaacctgcacatgatcgccgacaacgaggcgcggcggatcaccgagcagatcgcgcgcgtgaacaccgggctcggcgcggtggagttcaaccgcggcaccaggctcacgctgcacgcgggcacgcgtcacctgcccgccgtcgacgagctcaacgagatggcccagcgcatctcggcgcgggtgtcactggtgagcttcggtgacgagacggcgatgttcgagcagtacaccgacattctgcagctgcggaaactgttggcgggcaacacacccgaggatcggcagtggacacgcgacgccctcgacgtgcgcaaccggttcgtgctgtactgcgaggagcgcgacgccgagaccggcgaggtgatccgcacctacagcaactccggggacaattcgggcggtgagcaggagaagctcatggccttctgcctggcgggcgcgctgagcttcaacctggccagcccgggcagcaccgacaccaggccgatgttcgcgcagttgatgctcgacgaggcgttctcgaaatccgatccgcagttcgcccagcaggcgctgtcggcgttccgcaagttcgggttccagctcgtgatcgtggcgaccgtgcagaacaccaccaccatccagccgtacatcgacagcgtggtgatggtgtcgaagtccgacgcctcggcgcccaacgccaggccggtggcctcggtgaccgcggcgtcgatcgcggagttcggcgagatccgccgcggggccgaacccgaggccgtcccgaccgcatga

SEQ ID NO: 46725 - DNA, 1461 bp, Mycobacterium abscessus; identical to SEQ ID NO: 41997

SEQ ID NO: 46726 - DNA, 750 bp, Mycobacterium abscessus; identical to SEQ ID NO: 41998

SEQ ID NO: 46727 - DNA, 3348 bp, Mycobacterium abscessus; identical to SEQ ID NO: 41999

SEQ ID NO: 46728 - DNA, 1512 bp, Olsenella sp. oral taxon 807
atgagtgaggtggtggcacagttcgattcccttgacgccgtctttgcggacggcgccatgcgcctgctgcgcagcgactatgcgcaggcctccgtcgcgctgctccgcaccttgttcggcgacgggacgtcgcgcatggagtccgagatcctctacgcgcaggttgacgccctgctcgacgagctcgatcacgcgggtcgcaaggtatggcgccatgaggacggcagcaggctagacgcgcgcgaggtcgtgaacgacaagtggatgcgtgagtttcgccttctggccaagcgcatcctgccgtcgggcatgtcggagcactcgctcaggcccgaggccctcgccgtgctcgctgcggcacgtgacgtaggcgatgacgagatcatcctctccagcccacgcatcgagaccatcattgaggcgctgacgcagctctcaaccgtggtaaaccccgacaagcaggcgcgtcgcgcggatttggtctccaaggtggagagggcccagcgggcgcttgacgccttcgacgcgtcgggaggggaggcagacgtcgacgcgaacccagttgcaatgtttcgaaacgcccttgacctcatgtcccagatccctgccgacatgagccgcatcgaggggaggatgtatgaggagcgcaacaggctcatcgactcctttcacaaggacgagcgcccgggaggcgagcttgttgcggactatctgcggcgcagcgacgagctgttcgacggcacggatatgggacaggtgtacaacggtgccatcaccatgttgtccaacagcaagctcaatgcggacatctcctcgcgcgtgcgtatgatcacgcgctccgacgcgcttgcgagtctcgacgcgagggagcgtgcctcgctcgagcgctcctggaaggggttggtcagtggcatgacgggcgtgctgaagctacgcaaggcctgctcccagacggtctcaaacgccattacgcagtatgaccatgagacataccgcgagtatacgtcgttgctgaagaagctctacgacgtcgtgctggcgcgtgggctcgaggggggaccgcttgcgagaagccccatgcacgactcgcttgacacgacacagctggagtcgttggtgtttcgtctctcggcaaggtccgaccgcgaggcgcctcctccgctctatgccgcagatacagacacgataccgaggatcgacatcgagcgcctgcgctattttggcggtgcgcggaccgaggcgctcctcgccgccttggagcgacagattccgtcgggaggctccatggcgctctcgcacgcattcaacgccctcgatccggacatccgccgtgaggtggagctttgtggcctcatgacgtttgcgctgggcttgggcgtcgccgtggagcaggcgccccatgctgtatacgagtgttacgacttcatcggagacctgcgtccgtggtcggccccggaagtgatgctcgtgagggaggacgtgtcgcacgggagggaggccaaagatggctga

SEQ ID NO: 46729 - DNA, 675 bp, Olsenella sp. oral taxon 807
atggctgatgacatggtgggacaggatggctcaggcacagagggcgcgcccgtaggggtgtcgcccaagggtgagccgctgtttcctgaggacacggggacctgtcctcttgtggtgcgtcacgcgatcacggccctcgtgaagaagcgctacatcttcgccgagaccgaccgagtggcatgggacggtctcatgagtgcgcccgagctcgtgaggagccgccttgccgacatgctacttgggctgagggtcgatgacgtcgcgggcattgcctattcctaccaggtgcagctggagggtggcacggtccccaacaaggtgaagtccatcagttacttcaacaacctgcagtccttgctcatgacacagctggtcacgaagtacttcagcgcgacggcggcgggcgagaccctcgtctgggtcgagggggacgagcttcgcgaggccatggagcgcatgttcgaggacatgcccgacgtcgccctcgcggacagccacatggagcaggccatcggcgccatggtgcgcaacggctatctgcgcgaggttgtcgatgggcgctaccaggtcatgcccatcgtgggcgttgtctacggcatcgacgagatcaagggcgtgctgtcgcgctatggcatcgccgatggcgacgacgctcaggccgacgtgaggcagtga

SEQ ID NO: 46730 - DNA, 3387 bp, Olsenella sp. oral taxon 807
atgccagccgaccaattgcagatggatcctctcgtcgagcggcagtggcagctcgagtccatgcaactcgtgaactttggcccgttcgacgggtatcacaggctcgagttcaagacagggttcgcgcaggttccgaccacggtgatatcgggagacagcggtacggggaagtcgaccatcgaggatgcgttctttgaggtcatgacccgcaacggcagctacaactcggccagcaacgagggaggacggggtggcagcctcacatccgagaagcgctcgctcatcgggtacgtgcgcggcaaactggaggatgtcgaggacgaggagggccgtcgccaggtgcagatgctgcgtgacgggcactgcaaccgatggagcgccatcgtgctggggtatcgctcggacgtgaaaaccacgttctctgtggccaagctgttctggatcgctgccggctataccgccaactcggacatcaagcagctgcgcatgacgatgtttcgtgactttgacccacgctcgctcgagtcgatcgccgacgccaacttcaccgccgagcgcgtccgtcgtgtcattggcagtgacttcaggtcgttctcgcaggttgatgagtttttgacctacgtccaccgcgtcttgaaagtggacgagcagggaagcggcaaggaggtcatggacctgcttggccggatcaggtcaggctcgagcttccgatcgatcgacgagctgttccgggagcaggtgcttgacagacccgcgacgttcgaggcagcgtcggcggccgtggcgagctatcgcgagcaccacagcgcctacgagcgcatgcgcgagaaacaggagaaggtcagcctgctcactgaggtgcgcgagttctctcacgagcgcgacgaggcgctcgaggcgctcgacacgggcagggcggcgcttgcgccggcgctcttcgacacgtggaggcgcagggtgaccctagacctgctcaagacgagggtgggcgagctgacagagaggaaggcccagctggagcgtgaatgcgaggcgaggcgtgacgaacgctctcggagggacgcccggctcgccgagctcaacgcagagttggccgcaagcggctataccgagaggctctctcaacttgacagcatgatccttcgggcgcaggagcgcttgtcaagcgtacgcgccgcatctgagaacctcgatcgtgaggtgactccccactttgggcacctacctacctcagaggcggacttctgcgcgctgcaggagcgtgtctcggccttcgtcgagggctacccgcaggctcacgaggagtgtagtgcgaaacacagctcctgtgtcgctcaacgggtgcgacttgagctgcaagccgacgagctccgtagcgacctggagtactttcaggggcaccagagccgcatcccccgaggtctgggtgaggcccgcgagcgtctggccaaggcatcaggtatccctgcgaagagcctgccctttgtcggcgagctcatggaggtcgtcgacgaggcttggcgtctggccatcgagtcggtgcacggcggcctcgcccgtacgttgctcgtcgatgcacgcgacttcgagcgcttcagctcctccatcgacgagctcaggctccgcagtcgcgtcacctttcgtcgcgtggacgtcgagcgcagctatgatgcctgcgcgagagagggctacctctccgagaagctcacattcgcgagcgactccccgttcggtccctgggtgcgcagcgtcgtgtgcgacgagcaccatgacgcgctctgcgtcggctccccgcgtgagctgggtggggagggtcggcgtgttaccatcaacggtcagacgagggatggctcgcgcggggcgcacgggcgtgacaggtcctcggagggcatcatcggctttgacaacagtgctcaggtcgagcgactgacagcggagctcgtcaaggtcagcgaagagcatcaggcggcgaaggctgccgaggacgccgcatccaaggcactgagcgagctggtcgttcgccaggcgtctgccgagcgcatcgcacgttacgacttcagggaggtcgacgttgccagcgcccacgacgagctcgtgcacgcgcagcaccagaaggatgagtttgtgaggagcagcgggcgacttgagcggcttgccgcacaggtaaaggatgcccgcctgcagcttgaggaggcgataaagagcctgggtggcagcgagcgcgagctccagctcgtgtgcgatgagctcacgggcgtcctgggacagagagacgagctggtggccatcgagggtgcaggcgagcggattgaggggacacctcctgccttcgagctgttggggcgtctcggcggcaagatgcttgccaaccatagcgcacaggataacctcaagagtctcggtccgatagtcgagcaggtgaggcgccaggtcatggagctgatctcgcgtgacgtcgagcgtgagaggggccttagggcgcgtatagagcgcaggctccaggagtaccaggaaagatggcccgataaccgattgggcacggaggcctcttcggcacccgactacctggtcgtcctctcccagctggaggaggagggcttccacctgcagaaggatgcctggttcgagcacatgctcgcatgggtcaaggaggacctgatcccgcttgacgtggcgtttagggatgcgcgcgagagcatcgacgacaggcttgagcccatcaacgacatcctgcgtaccctgcccttcggccgggagggaggtcgtctcgagatcgtgtgccgcgacagcgagaaggccgaggtacgcgagttcaggctgctcatgcgggagctgctcgattacgagagccacagcgacaaggccgagcgcgacgcctactaccgaaaggccgagcagctcattgccctcatcgaccccgaggacacgcgtgtcgaggcgaggcgcaggcgcaacgatgtccttgataggcgccgtcacgtccggctcacggcgcgtgtcatcgccccggagcaccccgataagcccaaggcggtctacaatatgctcgccagcaagtcaggcggcgaggtggccgagatagtagccttcatcttgggtgcggccctgctgtaccgcctgggccaggagggaggctcccttccaggctttgccccggtcttgctcgacgaggggttcatcaaggccgactcgcgcttcacgacacgcgccctctcggcgtggcagggctttggcttccagatcatcatcgcggtacctgaggagaagttccagtccgtcgtcgcgaaggctcagcgcgtgcttcacgtcgtggctgacccgtcacgcaggtccttcgtggcgcagctggacaaggtcggccccgatctcaaggagagggcgggctga

SEQ ID NO: 46731 - DNA, 501 bp, Olsenella sp. oral taxon 807
gtggcgtgcacgggcgtcgacgaggtaaaagataggctcgcccgacactaccgcagggtctgggccgcagagctctccggaagcgcggcaggtacgggtgcctggccgtttcgcgtctttttggggaggccctcccgcgcggacctcgagagaggctttgcggacatagacggcgagctctctgaggtcgagcggtgggccctgggccatgggctccactgcgagcgcgagaggcgcctggtagggtcggtcgcccacagcctgccgacgcacgtctgcgcagcgtcactcgacgagctcgcccaggcgacgggcatgcaagggcacctcgcgcaggcaaagcggcggctgggaaggcttatgcgtgactttccgaaggtcggtgccgacacgctgctctcggtgctcaaggcctgcgatcctaaggggatggaagagacggacttcgatctgctctgccgcgcggccctgtggttttcttttcatgacgctcggggatga

SEQ ID NO: 46732 - DNA, 1419 bp, Selenomonas sp. oral taxon 478
atggagttattcgatgtcttaccggagcgcttcttcgggcttctcgcggggaaatgtcgccgcatctatgcggaagctggactttgtctctatgaacagtaccgtcttgcccagtttggtatcgagcaggagattctacgagacaagtttcaggaactcatcgagagctgggcagaggcgggcgtagcctatgaggacgatgttttttcggaaaaggacaatgccatagaggagtcgcgtgccaaagctaaccacatgattcgccgtatgaaggaattcggttggctggattacgaacagcgcgaaaacttcaaaatctttattttgctcccacactacagcagtcgtttgtgggggctttttgcgaatctgtgcgaaggccgagccgttgaataccaacgctttgccttcactacatatcaggtgctttcaggtgatggagcaaaggtacagccaagcatggcagtactcgaagcggagcgcttggcagaggagtttgttgaagagttgcgcatcctgctgaacaacattaaaagcaaaatggagcaggtatcttcccaaacgagtctacaggatgtactctcccatcattttgtcgaatatcgggcggatattgtcgatcgaagttatcaccgccttaagacctcagatcacgtttcccgctaccgtatccatatcctgcaggaggtgcaggacatacggcagaataaggagcgttttcgctcgctttgcgatgatgctgttcgacgtcagcttgccgaatcgatggatgcggcagaatatcgtatgaaagcgtcgcttcaggcaatcgaggaaatctatcgaggacttgatgatatgtttgcgcagatcgaccgacgacacaatcaatatgttcgtgcctcctatgaacgtgcactctatttgcagcaggagggaagcgctcgcacggtgagtatgatcgcggggattctcatggcagtcgctgaggcacacgatcagagacgggatattgatgagcttccgtgtatttttcgtctgcaaacaacgaatatgcttcttccgtcatcacgttacgtaccgcgcaaaaaacgcgtcctgcgcccaaatacggacacacccgtacgcagtgtcgatgaaacactgcgtgagcgggtacgccgcgaaagtgcagagcgcgtcgcacgcagtatatcacggcagaaaattgaaacgtggattttgaatgttcttgggcaacggagttccatggagattggcgaattgctcgcgctgctgagggaaactgaatctccggatctcctacaactgctctacgtttatctctatggatatgatgattgggcaaagtaccggctaggcaaaaataaggagatcgaggagcaagatacggtacgatacagcaatcgcaccgtcaggcgcaaggggaaaataaaatga

SEQ ID NO: 46733 - DNA, 600 bp, Selenomonas sp. oral taxon 478
atgaaacttgagctgctgaacgaggaagaacgtactcgtattcggagtgtcatacaggcattgttatcgtgcaattttttgacacgcgaacacgatgctgcactttatattgcggcacgtcgctatcgggaagagattgcggagtactttcaggtcatcggctgggagtttcgtgtagacgaacgttatgagatcgtatggcttctctccacgggcatggcacacagacgggctctgaccatggaggaaagtatatggctgcttgtactgcgcctcatctacgaggaaaagcggacaagtctaaacctgagcgcgtttccaatgacgacgctcgcagagatccgcgccaaatatttagcacttcacctgcccgatctcaagaaaacggcgatacagcgcctgatccagctcacgaagcaatatcgcctcgcagatgtgttggatcgggatctctccgaagagtcacgcattcgacttttccatacactcgcccttgctgtagacggggaagaactttcagccctatatagcagacttgacgtctatcgacagaggaaggaggaggaccatgaagacgctgcggaaaatgaaggtgattaa

SEQ ID NO: 46734 - DNA, 3321 bp, Selenomonas sp. oral taxon 478
atgaagacgctgcggaaaatgaaggtgattaactggcattattttgatgaggaagagatcgccttcggcgcggcaacaatgctgtcaggacacagcggtgcaggtaagtccacactgctggatgcgctgcagtatctctttatcggaagtcagacacagacgcgcttcaacgctgcagcgacgcaggaggcacggaggactctgctgcactacctgcgaggcaaaatcaaggcagagggcgtacagtatctgcgtgcggacgaattcacctcctatattgcacttgagttttatgatgatgtaaagagaaactccttcattgtcggatatgtggtcgatgtctttcatgatgacaggatgcaggaggaattctttctcatcgatcagcatacgctctcggatcttgactttcgcaatacggacggcacactctatacgcaggagacattccatcgcaggtatgcgcacggcagcagtgtgtttgagacggggaagaaacaatggcagaaacgcttgatgaaccgtctggggcaactgtcctcgcgttttttgccggcgttctctcgtgcgattgccttccgccccatcgaccaggtgcgcgattttatctatgaatatgtccttcttccccgcgatttgaagctagatgttctgcgcgaggtgttctattcctatcagaaattcgagcgtgatctgcaggatctgcgtgctcgaaagcatgaactggagatgctgaaagagcactacgatacctactgtaaattgcgggatacggcgtatgagcaggaattcgtattgctgtcttttcggcataagaacgccgaggagaaactggatgtgggacaccagcagagacagacctgtcgtgatcgattggacgatttacagacgaaactgcatgcacaggaacgcctctcaaaacgcagaaaccaggaacagcaggaggcgtatgctgcctggcagggaaatgacgaaaagcgcagacgggatgagctgctggagacacaaaaggaacgggtggaaaaataccgttcgctcacagacgcacgacagctcatgcgtaaggaactcatgtgtgagttcgaggaagtatccgcactcggcgcatatcccgcaggagagttttttcgtctgccagagggaatgccacaggcgttggaggaactcgcgcggactctcaagtatgcggcagaagataccatccagacaacacaaatcgaacagatccaggagcagctgaaggcgggcggcgaaatacttgctgctgtcagcgatctatggcagcgcggcaatcttctcttggagcaggcacagagtgaagctgtccagcggtgggaggaactttgctcggagattgaaggtctgaaacggaggcaacgcagatatcgtccggagatgatgcgtcttaaggctttgcttgaagagcgacttgcgggtcgctctaaggtctatgtgctctgtgaggagattgagattttggacgaagaatggcgtgatacgttggaggggtatctgaatacccggcgattcgacctcctcgtggaacgagaattttttcgcgaagcactgcacatctatgaaacagaaaaaagagaacgcaacatagagggcgttggtcttgtgaatacggaggcggaaaaaaagtatctcggccaacaggaaaacaaatccatcgccgcactcctgctgacgcagaatccgctcgcacaggcgtgtattgatcacctgcttggaaacgtgatgcaggcggacaatgagcaggatatgctcaggtatagaagcgcggcgacaaaaagctgtatgtcctacaagggcttggttgcgcgtcagataccacgacgcttctatgagattccatacatcggtgcaggtgctatagaccgccagcttgaaattcgtgagcgagaacttgcagaagtaaggcggcgcctagtcatgcttgctgaagaggcggaccacatgaagcggatctcctccgttcttcatgagccgctgcatcgatacgcaaacgctgcgaagagaatgaatgttcttgccgaacttgacgcctgtaaagcagaccttgagcgcatttctggagaattgaatgccatggatctcagtgaggcagtacgcctgaaatctgtctatgaggaatccaaacgacgcgccgaagaggcagcgcatgattgtgcagagacgatgcgggcacaggcacatgctgaatccgagctagatcaagcagaacggtctataccaatcctagaacgtacggcagctgctgcggcagaggccgtcgagtcatggcgggagacttatcctgatctctgtactggcgcagaagcacgtcttacctcgctcatgcaggaggcgcgtggaggacggagcatggaggaacgtctgcaaagctatgagatcagccgacgagggaatgagacccggcgcgacaacatgtggcaaaaacttctcgttgcgcgagagcattatgggctcgcgcacggagatacgggacatgtctatgatccagatcacagttattacaaagagatcctagagcgactctctgggacggatataccttcctttgaggagaaggcacgtgaggctctcgctcagtcggagatggagtttaaggctcatttcatcttcagtatgcgcgaggcgattgaaagtgcacgttatgaatttcgtgaattgaactatgccttgaatcagtttcagttccacaaggataaatacagttttcttgttacgccaagtgcgaagtacaagccgttctatgatgcagtgatgatggcggattgggaaacggcgggcgggctctttgccgatgcagacacagcggcaaacgaacaggcaatggagctgtttgacaagctagtcaaaggaacacctgaggagcaggaagagttttcagattatcggcggtatctggactatgacatccgtatcacagatacggcaggtcagaattatctttactctagagtcctccggcaaacgtcgggcggagagacgcaaactcctttttacattgcaattctcgccgcttttcaacagatttacaatgataaaacaatacgcctgactgtctttgatgaagcattcaacaagatggatgaagagcgtattaaatcatgcatcgaactgataaaacggatgaaaatgcagctgattgttgctgttcccgatgagaagttggcagcaatcgccccgctgatggatcagtcaattattgtcaccaatgtgggaaatcattgctttactgacgaattgggggatgttgcaacgtgggagaaagggctgaatcatggagctgatgcctctgcagatgcactatga

SEQ ID NO: 46735 - DNA, 1260 bp, Selenomonas sp. oral taxon 478
atggagctgatgcctctgcagatgcactatgaggatattattctaacgatcttattggaaaagtacgaaaatagtaaagcagcagttggggagcgggggcgtcgtccacagtttcgtatcctgaaatccgcactttctgctgactataccgacgaaatggatgtcgataagcgggaagcgattcatgcagcagcgtgtgaacttgagcgtcaaagactgattgtcgtcgtctgggaacgccacgggacaggacggatagagcgtatccttctttctgcaaatgtatctactctgtatcaacggatggggaaagtcatgcctttgatacgggtgaaagaatatcagacaaagcttttagctcttgcaaatgcacgtacgccgtgggtgcagaatttttatgccacgatgatggaatcacttgcagataacgtgattcccgcgatcttacccaaagaacagattctttacgcgaatttgatacgcgctatccttgctcttccagccgaaggcgagagcgccatcccaagacgtgtatttagccagcgtattttccgcaacagcaagtattttgaacaacacatagagtttccgctgctccgtctcttacgtcgatttgtcgatgaaccatgtgagtcggacgcagagtatttggatgcagctgggattgccgtgacacaaggaaaggtgtggatcgcaggaaatctaacttttctgcttggtgatcgacgatatttcctcgcagattttccgggtggattgatgcttacctacgatacaatcactgccatgaaaatagatgtgcttccccctgaaattctgaccattgagaatctgacaaatgcagaaactctgacacgaacggtagataccaatcacctcctcatctatacggcaggattcccaaaccgtacggtacaagctcttcttttaaaaattgcacccctccatcggactttccatatacgccactggggagacatcgattacggaggtatccgtatctttgaattcctgcgaggacggtactttccgacactcggccaatatcgtatggacgtagatacatttcgtgcatatttaccatttgcgcagagcctcacccctgcgcagagaaaacgtctttcggggttactcgagcagaaagatttttcaacgtggcatagcctcattcgtgtgatgctggccgaggggaagtgggttgaacaggaagtcatgttatggcaggattcgtctgagatggattccctgaacgaagagtaa

SEQ ID NO: 46736 - DNA, 1470 bp, Luteipulveratus mongoliensis
atgctcgacgaccatgccgccgtcagcatgttgcagaagggcaacgccggcatcctcatcactgtcctggccaacacgttctccaccgagcgcgattcgattccaaccgacgtattcgagaccgaggtcgagtccctccttcgcaccctgaacgcgaacgacctcgagaccccgaaggtgcgcgaggtacacggcagcggccgcaagctctccgacctctgccgggactgggtaaaggcggactggctctggcgcaccgatgacgaaaacggcacaccgtgctttacacgcacggcagaggcccacgaggcggtcgcctttgtccagagactcggggactcacgccgtggtacggccgctgccgctgtaggcgagatggtggcgagcttcgggcgcatgtcggcccgactcagcggggacatcgaacggcagatccagcagatcgacgacgagatcgaagccctcacgatccggaagggcctcctcgaatctggtgaggctggcggcgttggcctcgacgagttcgagcgctggtacgacgacaccctcaacacccagcagcgaatctcgctcgcgctgcgctggatggcgcaggaactcccccgcacacgtcgctcgctcctggagaaggtgcgtgaggacgaggtcgacgggatcactcacatcaacgcgtacgccgaagcatgggatgaggtgaccgacactccacagggtcgcgcgactaaggaggcgctcgcggttctgtcagatccctcgcagcgtcagtcgctaacccgcaacgtcgccgccatctccgagagcgagctcggcggcctcctcaacgaccgggagaagcgcgcgttggccgacacctcggttgggctctacacccagatcaagccgctcatcgatatcttcaacgcaagcctcgaggacgtcacgtacgcgttcaagaagcgcgccgtaacctcgacggaccgtacagcgtggatggccgcgctccgcgaggccgcagcggctctgcgcgcaacgacgcaacgaaaggtgccggcgggggtgatcccgttccccgtccgcgtcgagatcaaccatgcgcctccctcgtatagggtccgcgaggcgcctgctgctccccagactctggacgaactcgagatgtccacagccacgcacactgatccagcactgcttgcccgctggtccggtccgcacactaacgacgtcgccacacacatcgccacgacgctcgatgctctcgagcctgggcagtccatgtcgacggccgagatctgggacctgtcgcccgaaagcctccgccgcgccgtggaacttgttccgtacttcgagcgtgcccacaaggtcgccgaggtcggcgaatcaagccattacagcgatgcgctagaagtgatcgagacgcttgcacccaacgggtcgatcgtccgctatgagatcacccgcatcgtttatcgaaagccgaccgaggggaactga

SEQ ID NO: 46737 - DNA, 642 bp, Luteipulveratus mongoliensis
atggaaccacccctcttcgacggagacctcggcaccgaaccgtccgacatccgcgaactgttgaccgtcctcttcaaggatcacctgctcgacggcaaccagcgcgttcgcctgtggaacgttctcattgagcatgagggccacgtgcgatcccgcctccacgacttctatctagagttggtcgtcgcccccggccatcggatcgcctaccagaagcaggtcgacgccgaccaggactaccggatcctgacgccccagcgagcgatgagccgcgagctggcaatggccgtgcttgtcctcgtcgaccgatatcaacgcgctgccgtcgccaacgccccaaccgttagcgttgcgcgccgagagttcgccgacgcctgggaacagatgtggggcgagcgggaaaaggaccgcgttgcccgtgacaagaatgccgaggctgccttaaagcgactcttcgagaccggcttgatcatgggccggtctcccgccaacggtggcgagagctggaagatctcccccgcggtgcccgtcttctacgggccggatgtcttgcagaccattaccgtctctttgctcggcgaagagcaggacaacgaccgagaagatgaaggtcgagctgatggcctggatggtgacaagtga

SEQ ID NO: 46738 - DNA, 3339 bp, Luteipulveratus mongoliensis
gtgaacgacgcgacgctccttcctgcccagtggtacctcgcctcggctcaggtattcaattggggtccgttcacgggctaccaccgcatggaccctgccggcgtcggcgaggctacgctcatctcaggcagtaccggcacgggaaagtcgtcctacctcgacgccacgtcggccttgttacaccccggcagaatgttcaacaaggcatccgcgggcggcggcaaggcgcgctccattgctacatacgtccgcggtgtctacgacaaggaagagtcgctcgcgggcactcgcgtgttcgctctccgtgacaagcgggccacctggtcggccatcgcccacacctgggcgaaccttgacggtgaatccttaaccgtcttctccgcctacttcatgaacacggacgatgagaagccgtcccatgaagcacacggacgaatcgagggcttctttgacgtacgccagctggacgcctacacgcgcccaccgcacgttccactgcacggcaagagcctccgggctgcctttccggacatggtgcccgcgaagacgaagaccgcgaatcttacgtggctggccgacgagctcggcctctcgagcaacttcaccaacctgatggacatcctgtaccggatccaggcgagtcaggagatccccggcgtggactggctgttcacgaacctcgttctggacgagccagcagacttactggcctcggtacgtgaggcacgagagttctgggataaggttcgcgaggcccgcaaggagctatacgaccggcagcgcaaggccgagattcttaaggatctgctgacttatcggcagtcattcgagacgaatgccaacgccgacgccttcttccaagacctcggctacggcgatggtcgccttcaggcagacaccccgttctggcgttgggtgcgagagcgtgagttcagcatcctcgatgacttggagcctcggctggcgcaggaggcacgcgacgcgaccgctgcagtgtcgaactttcagatcgagaaggacaccgcggacgcggcagccctcaacgcccagattcgttacctcaaagcgggtggggccgaagcagcctcgctcgaaaccgacatccgctctgcggagagccgcgctaatgaagtccggacggcgcgggcgtacatgtccgagcgcgtcggaacccatctggcgcctccattgactctggacgatctaaccgctcagcgcgccgagaccacggccttcctgggcacggtgtctcgccacctggcctacatcgccgaccccctacgcaaggccaacggcgccgagtgggatgcgcagtcgcgtctcacgacgctacgcaaggagcgcgcgtactacgcgaatcgcaaggatctcattccccagaacatggctgcccgccgcgacgagtgggcgaggctgaccggcatccccgcggctgacttgaagtttgtcggcgagttgatggacgtggaaccggagttcgaggagtggcgtgacgccctcgaaggcgcggtcggcggttgggcgctgacgctgttggtgcccgaggagaccatcaaggagttccggcgcaaggtcaaccacgtcaagacgccaccgatcatccactcccaggctgtcccgagcggcacgtacaacctcgtgacaggccccgagcatcaaatcgcgggccgcgtgttctacgcggaacaccggtacgccggctggttgtcgcacgaggttgctcgccgcttcgcccacaaatgcgtcgaagacggcgagggtctcaaccagctcaccgacggcacgtggggtgtgtccaagagcgggcaggtccgcggtccgaagggcaccggcaagcacggcggtgccggtcgccggaacatcggcttctcgccccagcgattgctggaggaactcgacatcaagatggccgagaccgactcggaggccgtgaaagcgaacgaggaggcgcaggcactcaagcaagcgcatcttgacctcactcaggcgcaggcggcgcacgaatggttccaggaagccacccgcgagtggcatcgatacgacctggtcgcagctgaagagcatttggactcgctgcgcaggcagcgagccgcgctatccagcgacgacgagctcgatgagctggagaaggcggccaagggccgaagggccgaggctgacaccgccggccgccgcttctttgaagcgcaggatgctgccgagaaggccgtactcctccgcgacaaggtcatagacgacaaggaaggcgcagagcggtcgcgcgacatgctccgcggacgtggcgtcgaagaacctgacatgaagcgtctcgacgacgaagcgcgcagcgcattcaacgtcgacgaactcattcacgagaacctgcagccgggctcattgggcagactcgctcagcacctccgcaaggcacagtccggtgcagctggtcagaagggtgtggcgctcaagaacatccgtgacgtgatggtggcgttcaaccgggaatacaccaccgtcgttccgatcggtgtctcagttgagaatccacaccccgagaccgactacgtcgagtacgcccgcatccgcagccagcagacaacttacggactggcacttgcccaggagcagttcgcacagcaagtcctcgacttcaccaacgtgaacgtcggcggcatcgcggacagctatgagtcccagcgtcgcattatccgagaccgcatcaacgccatcaatgagctgctcgcacctgaaccgttcggtggcgacagcaccctgtcgatccagatcctgcgcgacgagaagcctgccgacaccaaggatttccttgcccagctgggctcgcttggctccggtgccacgaagggcatcacctacgaggccgctctcgaacgcttccccgcctttgacgcagcgatggacatggtcgcgaccgagaagcaggtctccgacctgttcgacgtacgacgacacatgaccatccaggcgcgcgcagagcacaaggacggcaccgccacgacctacaaccacttcagcggcgagaagtccggtggtgagacccaagagctgaccgcgttcgtcctggcggccgctgttcgctatcacgtcggaaccgagggagttagccgaccgaagttcgccaccgtcttcttagacgaggcgctcatcaaggccgacgaccagttcaccgagcgcgccatcaacgtctggctgcggttcggcttccagccgatcatcgccgcgcctgtcggaaagtttgaggctgcgaccagcgccacctcgctgatctacgcggtggcgaaggacgaccagcaccgttcgcgtctggacttcatgcgcaaggtcgttgggacgaagccgtga

SEQ ID NO: 46739 - DNA, 1383 bp, Streptococcus pneumoniae
atgaaaaaattatttgaatacattccggaaaattattttaatttgtttactgggaaaaatcgggagttttatgctgaagttgcttttttactatatgaacaattccacatcaatcgagctggtattttatatagcttgatgaaagatgaaattcaagaattgatagaaacgaaagaggagctaggagaatgtattgatgtagaagatgaaatggaagaaagagtgcaagacagtgctgagagagcgaatgtggtacttcgacgtttaaagaaacttaaatggattgatgtggaaatacgtgatcaatttgaagagtttatagtacttccagtgtattctagccgtattttggctgtgctaaaggaaatttgtgaaaatagaacaattgaatatcaaagatattgttttacgacatatcagttgttaataggagtggaggcggaggggcgcccagcttcagctatttgggagtctgaaaaatatagtgatcaactttatgatgaattaacaattttactgcacaatatgaaaaatcatatggaaacaattgcagctaaagatgatatacaacaagtgttagagcatcattttggagaatataaaaaagacataattgataaaagttatcatcgtttaaggacatcggaccatgtgtcgagatatcgaaataaaatattagagcgtatacagacttggtttttagatgatgaattcatgaaacgtgctgccaaagatgctgtagaaagtggatattctactagtcaagaagaggcgatggatgtactaagtaagaaaatgtataaggttgaagaaatttatagtaatttagatgaaatttataatcaaattgacgcacgtcattatcaatatttacgagcggtcttagatcgttctcgatatttaagtacttataatgacagtactgattacaaaatatcttatattttggaacatatcaggcaaacggacgagaatatactcgattcttccccgtttcgcttagtacagtttaggcaacttcaagaagcatcactgttatccccacgtaagaaaaaagatgtatatgaaccagaacagcatgaggttaccgaaattagtgaagagatgcgagaggagctaaaagctgaaaatgtaagacgtattgaaaaggttattaatagaaagaaaatccgaagatttgtgttggaagcaatgaaggggcgtcaagagatagagatgagtgagttggatttgcaaaacgaggaggacgctttgtatttaatttacgtttatttgtatggctacagtaggaacgctggatatacgttaagtgaagagtcacctgaatttattacacaaaggggctatacattttctaatcgcacgataaaacgagaaaattag

SEQ ID NO: 46740 - DNA, 594 bp, Streptococcus pneumoniae
atgcaaaatatattggatagagaaagagaagagatggaagttgttattaattatttgttttctcataattttttattgaaagaatttgaacgtgagaagtatcaattggcagtacgaaataaagagattattaagcgatatttacaggtaattggttgggattttattgtggatgaaaagcatgggtgtattgttattgcttcgccacattacgagcatcggttgaaattgaagaaagacgaaacgatttggttgttagtattaagacttatctatgaggaaaaacgcagttcgctatctattagtcaatatccatttaccacccttcaagaaatcaaggggaaatatgagacgtttcgattaacatttgtatcaaaaacgaagttacgtgaacttgtgcagatggggaagcaaaatcaacttttgagaccaattgataatgatatagagttggatgattgtcgttttcagcttttccattcatgcattcatgtgctgcaacaaggggatttaaatgtattgtatgaaaaaataaaatcttatagtgaaggtggggatcaaattgaaatggatgaagaagctacgattaattaa

SEQ ID NO: 46741 - DNA, 3324 bp, Streptococcus pneumoniae
ttgaaatggatgaagaagctacgattaattaattggcattattacaatgatgaaacaattatatttggaaaacaaacggttatatctggtcatacaggagcagggaagtccactatcattgatgctttacaagttctctttatttcggatgagcggaagattaaatttaattcagcagcatatgaagaagctaagcgttctttaattaattatttgcgggggaaaatagggacagaagaaaagccttttgtacgagaagggtattttacaacgtatattgttgcggagttttatgatgagaaggtaggagaaagttttgtaattggtatttcaattgatgtatttaaaaacgatgagaaaataaaagagtattttattatacctaaatctgaaattaatatgatttcgttttttaatacaaaaaatgcgaaacgttacgtagaaacacaagccgatttttccaaaaaattaagagcgcaatttccaaaggctataattgaaaaaagttcaattcaataccaaaaagctttattacaccgctttggcggactacatgaaaggtttattaaaacctttgcgaaagcattatcatttaaaccaatcgataacatgagggattttgtatataaaaatatactggatgaaaaagaacttaaaatcgatgttatgaggagcatttttaaaacacatgaagaattgcaaagagaattaaaagaattaaaagaaagaaaagaagagctggaacgaatagataatatttatatggaatgtgtaaagttagaagcggatatttccatacaagagtatgttcttcgagggctagattatttattagtagaagaagaaaagagcatatgtcaaaaaagtattgaacagagggaaaaggaattgagaaaatatgaattagatcaagaaaagacagcagaacaaaaagattatgctagaaaaaaagagattgagtatgaaattaaaattaaggatagtgcggaacaaaaaagacaaaaacaattacaagaacaaatagatcaagcgaaaaaagaatgtgatgatttagagcgtgccaaaaatgtatatgttcatagtttagaaagagaagaaaaggatgtttctagtctttttaattatcaaggtaatgaatatttcactttaagcaaggacgagaagcatgcattggaaataggaagagattgtctagcattcttgtcacgtaatgatggtactggagggaatagggaagagcaaacattaaataaacttggagagaatttaaaacgaattagtgggcgtttttataagagtacagcagaattagaacacagatctgttgaattgaaaacagaagagcaaaaattactttctgatatagagaatttaaaaagaaagaaacgctcttatcctatgtctgttgaaaagttgaggggattactagaaaaacatttagaggatcaatcgaaagtatgggttctttgtgaagagttagaaataaaaaatgataaatggcgaaatgccctagaagggtatttgaatactcaaagatttgatattttggtagaaccacatatgtttgcgactgcactatctatctatgaaagggaaaagtggaatcttggtcttgaaggtgttggacttgttgatactgaaaaggaacaaacatatttagggaaggttgagaagggttctttagctgaagagatagtaggtggtaaccaaatagtacaggctcgaatccatcatttattaggcagggtaataaaggcggacaatgaacaagaattacgaaagcataaaacagctgttactgcgacgtgtatgagttatcaacgtcttgtagcacgtcaaattcctaaaagagtatatgaaactccatatataggtgcacatgctattcaaaggcaattagaaattaaagaagaaaacttaaagggaattcaaaaagaactgcaaatggtagggtactatattaaagaatttaagaaatggattgaaattttagaaggtaagcaatcccattataaaaactatatgttaaatttttcattgaatgataggattttgggatttaatagagatatagataaatggcatagcgaactgaatactcttgatttgtcaccattagaaaggttacaccaaaagttagaagagtggaaggggaaatataatcaatttaatagagaagaaggtagattgtttgaacaaattgggaaagtgaagaaagaacttcaaggtgtgaaaggtgagttgtggaaaaaagaaaaggacgtaacggagcgtttagagaatttggaaaaatggaaatttgaatatgaagttgaattattacaagaggccgagcaaaggtacgagcaagctattttcacaaataaagcttatggtgctataagaaataaatacgaaaataataaaaaagaaaatcaaaataaatacgaagaaaaatggagttttctagaaagtgaacgtaagtcttataatgaagcgcgaactttccaaggaattatacaggctaaagataataagcagtacgaagaggcactccgaaaaattgcaaatctcgacatcccaaagtttgaacaagagatcaaggaaacgttgcaacaagctgaagaggaatttcagtctcattttatttacaagatgcgggaggctattcaagcggcgcgtagagaatttaatcaattgaaccatgcgttaggaagatttaaattccgaaatgacacgtatcgatttgtaataaagccaagtgaacaatataaaaaattttatgatgtaattatggatgaaagggtacagccggagatatctctatttgattttggtgatgaagatagggcagagattttaaaggacttatttggtagattagtggtgggcgagtatggtgaaaatgaagagtttgtggactatcgtaattatctcgattttgatttaagtattaataatgaaaatggaacaagatttatgtctaatttattacgtgagcaatctggtggagagacgcaaacacctttttatattgccatcctagcatcatttcaacacctttatcgaaataaaaataccattcgtttagtcgtatttgatgaggcctttaataaaatggatgaagagcggattcaaattagtttacgtcttataaaacagttggacttgcaattaattgcagctgttccggatgagaaaatggctcatatggcagctgaggcagatacagccattataattaaccgagtagggcatgtatgttttgctgacatgttatcttatccaagggaggacgaggcaattggattacaagagcaagattctttcagtcttattgaataa

SEQ ID NO: 46742 - DNA, 1221 bp, Streptococcus pneumoniae
ttggattacaagagcaagattctttcagtcttattgaataaatttgaaaatagtaaaactgttcatacaggcgagagaagtgctcagcgccctcaattttcatttcggcaaaagcatgaactttctaaagcatataatgatgaaatggattatacaaaccgtttagaaattaatactgcattaaaagacttacttagtaaaggaattattgaagtgaagtgggaaaagtgggaagagaatcggattgctgaaaaagtttatttacagtatgattttattccactagcttatagcgaagctggtatagagccgaaatttgaaaaaatgaatcggattttaaaagtgttagaaccacttgctattcattcatggagttgggttcgacaatggtataaagaagttcaacagtcgtttcaaaataaaaaaacggcaagagttgatttaaatgatgttaaaggttatgaactacttgtaaaagcactttctagattagaaggtttagaagatagtatacccaaaaggacctttagccaattagtattcggagatacaaaactttttgaaactacgatacaaaaccgattattaataatatataaaaggtatggagatatagaatatgaaagtgataaagaatatttagagagtattgggattttagagaatatccaacctgtctatgtaaaaggaaatgttgatatttgtgttagaggagagaagattgctctcggttcccttcctggtgggcttggtttaatggatgaaacaataaaagaattagaaattcagtatgtacacgatgaaagtataatgcttattgagaacatgaccacatactatgaacaaattaaaaaaaataataatattttatttatctatacaggtgggtttccaaaaaagaatgtacagcaattgttaaaaaagttgaatatatatttgaaaaaccattcaattcaagtgtatcactatggagatttagactatggaggaatccaaatatttgagtacattaagcgtgcgttttttaaggagcttgagccttatatgatggatgtatctacctataggcaatatgtaaaatatggtatggaatttagtgaagggtatgaaggaaaattaatgaagatgttagagaatgagcgttattctttgtggtatgagttaattaaggaaatgcttaaagagggacggcgtgtcgagcaagaagtgattgttaggtga

SEQ ID NO: 46743 - DNA, 1461 bp, Mycobacterium abscessus; identical to SEQ ID NO: 44403

SEQ ID NO: 46744 - DNA, 750 bp, Mycobacterium abscessus; identical to SEQ ID NO: 41998

SEQ ID NO: 46745 - DNA, 3348 bp, Mycobacterium abscessus; identical to SEQ ID NO: 44436

SEQ ID NO: 46746 - DNA, 1461 bp, Mycobacterium abscessus; identical to SEQ ID NO: 42721

SEQ ID NO: 46747 - DNA, 750 bp, Mycobacterium abscessus; identical to SEQ ID NO: 42722

SEQ ID NO: 46748 - DNA, 3348 bp, Mycobacterium abscessus; identical to SEQ ID NO: 42723

SEQ ID NO: 46749 - DNA, 1461 bp, Mycobacterium abscessus; identical to SEQ ID NO: 41997

SEQ ID NO: 46750 - DNA, 750 bp, Mycobacterium abscessus; identical to SEQ ID NO: 41998

SEQ ID NO: 46751 - DNA, 3348 bp, Mycobacterium abscessus; identical to SEQ ID NO: 41999

SEQ ID NO: 46752 - DNA, 1461 bp, Mycobacterium abscessus; identical to SEQ ID NO: 44403

SEQ ID NO: 46753 - DNA, 750 bp, Mycobacterium abscessus; identical to SEQ ID NO: 41998

SEQ ID NO: 46754 - DNA, 3348 bp, Mycobacterium abscessus; identical to SEQ ID NO: 44436

SEQ ID NO: 46755 - DNA, 1461 bp, Mycobacterium abscessus; identical to SEQ ID NO: 44403

SEQ ID NO: 46756 - DNA, 750 bp, Mycobacterium abscessus; identical to SEQ ID NO: 41998

SEQ ID NO: 46757 - DNA, 3348 bp, Mycobacterium abscessus; identical to SEQ ID NO: 44436

SEQ ID NO: 46758 - DNA, 1461 bp, Mycobacterium abscessus
atgaatgatctgaccgtcgaagagctgttcgcgcacaacgatgacgtgcagaaatcccgtgcggtccgcctgttggccgccaagaatctggcgccctacatcacgctcatggaacgccacctggaccgcagcgccaaagtctccgaacctcagctggtagccaagctggaccgggacctgagcgccgtcgggctgggagaacagtccgggctggctctcatcaagagctgggcgagcgacgggtggctgcaccgagcgtcggacggcaccggccccgatgccgagaacgtctgctcgctgaccgaggacgcgcgcagcgcgctggcctttgtgcgccgcctgcgccgcgctgacacggtggccacgggtgggtccatcgccggtatcgcggcaggcctcaaacgggtggccacccagctggacggcgacccgtcacgcctgcgcgccgacatcgaagcccagatcgcagaactgcagacccagctgcatgccatcgacgacggataccgtccggaaccggatatcgtcgatcttgaggacgagacccgggccatcgcctatcagatggaacaggtgatcaccgacatcgtccgctacggcagcatgcagaatgagatcaccgccggactcatcgacgccgccgaggactccgactccggcttccgcgaccgcgcccgcagaatgttcgcggactacgacgccctcttcgattcccgcgaacgcgcctcatattcggccttcacgcggaccatccaggatcctgatcagcgagccgcgctacggagcgatatcgcctgtgtcgcagagggtttgcccgatctcgaccccggactgcgcgaggtcatgaagaacttcttcaagctcgtttctcagcagatcacggaggtctcccgcatcgaacagcgctgcgcacagcgcatccggcggttcttcgccgcaggcaccacggagcaggctcgtggccgtgcgcgacagctcaacgacgctctggcagccgggcacgctctactcaaggtgtcgacggcggactctccgatcgacgccgagctaccgattgggcgttccgctgcagcggccatcggcgcgctgtctttcaccatcaaggacaccgcgccgccggtgctcgcgcaggacgccccgtcggggccgctggatttgagcggattctcggcgctggccacccaggtggacatggcggcattggccgatacggtcaacagtgctgttgccggtggaccagtttccttgcccgacatgatctctcatgtcgaggccccctacctgggtgatgtgatcgtgttgtggtcactggccctcaagcaggacaacactgccgaccgcgaatcggtaaaggtgaagttccggtcccttgacggacaggaccgggtgatggaggtacctcagttgatgttccgtgaaccggtgctggccaccctcgaagaggagggatcgacactatga

SEQ ID NO: 46759 - DNA, 750 bp, Mycobacterium abscessus
atgaccacacaggtttcaggaacctccctggggaacatcaattttgacgacctgccgggtgtcgaacccgatgcctcggcaccgcgaacggccaaggggccgcgattcgacggcgacaccagtgagcttccggacaaggcctgctgggcgctgcagaacctggtggcccggcgctacctgagtaaggatggccagcccgaactgtgggcgtcgatgatggagcatcgcaaggtgctggccgcgcgcctgtccgaattggacctgcggctgcgggtgttcgacgatctcgaggttgcctacgccgaaccagccccgttggagaaccccagcgtgtacggcgccagggtgttgcgccgggaaccgttgggcacctacgcgtcgatcgtggcactgcacctggccaagatcgcgaggaccgcgcacgacgaacatgtattggtcagccgcgacgatattcacgaacttttcgccaacgtctcccacgatgtcgaccgcgacgaggcgatgctgcgcgatcgcgttgacgaggcgatcaagcggctgtccaaggctgagattctgcagcgcacccgcgatgacgagcacagctacaccatcagcccagtcatcaacgcgctgatgtcggcgcagatgatcgaggcactgcagcgtcagtacgagcagttgcagcgcggcggtgccgcccccgaagacgccgacggcgcagaccccaccgacgaagaagatggcgagaccgatgacgacgagtga

SEQ ID NO: 46760 - DNA, 3348 bp, Mycobacterium abscessus
atgacgacgagtgacgcagcgacacaacagttctggttgtcccggctgcaggtcatcaactggggcgtcttcgacggctatcacagcatcgagttcagccgtcgcggtacgctgatcaccggctcctccggtagcggtaaatcatctctgctggatgcgatctcgttggcatttttgtcttcgaatcgccgtaacttcaacgcctcgagcgacaccaccgccgcgggttccagcatgggcaagcgcaccgtcgacaagtatgtgcggggcttgtggggagagctgaagaacccgggggagcgccccaagcagatgttcctgcgcggcaagggtggggcctggtcggctatcgccgtcacctattccggcaccgacggtcgggtgatcaccggcctggtactcaagtggcttgccccgggctcggatacggactcgtccagccgctactacctgatcgatgccgacgccgacatccgtgatctctgcaatgcatgggccagcaaaggatacgccggctcggtgttcgagggcgcgggttggcgcggccacaagagcgaacgctggtacctggaacagctatacgccgccgtcggtattcagggttcctctgccgcgcagcagctgctgggcaaggccaagtcgctcaagagtgtcggcggtctggagcagttcgtacgcgagtacatgctcgatgaaccggagtcgatggcagcgatatccgaagcgctagggcagatcacgccattggtcgacgcccgtgccgccttggcgatcgcgcagcgccagcggcagacgctgggcgatatcgaacagatccaacagacgtacgccagcgatgcggcgcagctggccaccgtggacgtcgtggaccatcacaccgtgcgcgactacgtggatcagcagcgcctggcgctggcgggcccggagatcgatctgctcgataccgagatcacccggctgggcggtgagtgtgacgaaatccagtcgcgccaggacattctcacgggagagcgggacaaattgctcggccggatcgccgccgccgacagcaatctggcgccactcaaaagcgagctggctcatgctcgtgcccgcgcagaagaggtgtcgcgccggcgcacggcctacgacagtgcattgtgggacctggggcatgaagacgatatcgaatctgccgaggaattcgaggccatgcgggtggagagcctgcgggcagtcacccggatcaacgctgagctcgaagccggccacgatgcatatgtcatggccgcgggtgcgctctcgacggcacgtgaccagctgcgtgccgcatccgccgaattcaagcgggtcgagcacctgggtaccccggtgccgccggatgaggaccgcatgcgcggggagatcgccgcggcgcttgggcttacggccaaggacctgccctatgtatgcgagctgatggatctgcgcccggggcaggaacggtggcgcagatctgtggagaaggtgttgcgctccaccgggctctgcctgctggtgcccgatcagcaccatcgtcaggtgctgcgttacgtcaacgagaacccgatgcgcggctacctgcagatagagcgggtgattccctccggtaccccgcggcgcgccgagccgggcacgctcgccgactgtttgcgcctgaccaaccccaaccacgaatgcgccagtgccgccatgaatctggtggccggtgtcggcgactacgtgttggtggacagccccgacgaattcagcaagcaccgccgggcggtcaccgatcagggactgcgcaaggacggtgaccggcgcgcggtcaaggacgatcggcgtgaattgcgggcctcccagtacatctatcagggcaacgccggtgacaagcgcgccgcgctttccgacgatgtggtcgaagcgcagcaggcggtcagtgatgccgaaaagttcatcggcgaaatggacaccaagcgcgaagagctgcgctcggaggtggtgcggtggtccaagttgcacagccagtacgagtattggagccagatcgatacggactcggccgaggcggccgtggcgcgtctacaggaccagtacgacgcgatgctggaagccaaccccgacctgaccggattgcagcagcaggccgactcctacctcgacgagatcaagaagctctccgaacgcatcggagcattgcgcaagcaagaatccgagcatgattcgcgccggacccggctgctggatctgctggacaacctgaacccgcgtgaggtgggcgggcacacccgatcgggaatcgaggcctacgtgccccaactctcgtccagcctggatgtgttggaacccgacgcctaccgacttgagctgtggcggcagatcgagaaggatcagtcggtgctgcgtgagagcgtcacccgctcacgcaacgagctgaaccggattctcaacgcgtacgaccgggatttccccgactctatccccaacgacagtgagaacttcgacgagaagatccacgactatgtcgcactctgccgccggatcgatgaacgcgacctgcccgctgcctacgaacggatgctgcgactgatcaccgagcaggcgcccactgccgtgttgcggctgcaccagctcgccgaggaggaggcacaccgcatcacggaccagatcgaccgtgtcaatagcggtttgggttcggtcgagttcaaccggggtacccggctgaccctgcgtgccgagccgaaggcgctcgaagcggtgggcgagctcaacgagcgtgcccggcggatatccgggcgtgccgtcgccgtttcgatgggggacgagaaggccatccacgaccagtaccaggacatcctgcaactgcgtaacctgttggccgccgagacacctgaggcgcgccagtggacgcgcgacgcgttggatgtgcgtaaccgcttcgtgttgtactgcgaggagcgcgatgccgggaccggcgaaccgatccgcacctacagcaacgcgggtgcgaattccggtggagaacaagagaagttgatggcgttctgcctcgccggcgcgctgagcttcaacctggccaacccggagacgggtgacaaccggccggtcttcgcgcagcttatgctcgacgaggcgttctcgaaatcggatccgcagttcgcccagcaggcgctgtctgcgttccgcaagttcgggttccagctggtgatcgtggccaccgtgcagaacaccaccaccatccagccctatatcgacagcgtggtgatggtgtccaagccggacggcccgggggtgcgtccggttgcctcgacgcgcacggtgccgatcggtgagctcggtgatgtacgcaaggccgtgagcgcccgctag

SEQ ID NO: 46761 - DNA, 1461 bp, Mycobacterium abscessus; identical to SEQ ID NO: 42721

SEQ ID NO: 46762 - DNA, 750 bp, Mycobacterium abscessus; identical to SEQ ID NO: 42722

SEQ ID NO: 46763 - DNA, 3348 bp, Mycobacterium abscessus; identical to SEQ ID NO: 42723

SEQ ID NO: 46764 - DNA, 1461 bp, Mycobacterium abscessus; identical to SEQ ID NO: 42721

SEQ ID NO: 46765 - DNA, 750 bp, Mycobacterium abscessus; identical to SEQ ID NO: 42722

SEQ ID NO: 46766 - DNA, 3348 bp, Mycobacterium abscessus; identical to SEQ ID NO: 42723

SEQ ID NO: 46767 - DNA, 1461 bp, Mycobacterium abscessus
atgaatgatctgacagtcgaagagctgttcgcgcacaacgatgacgtgcagaaatcccgtgcggtccgcctgttggccgccaagaatctggccccctacatcacgctcatggaacgccacctggaccgcagcgccaaagtctccgaacctcagctggtggccaagctggaccgggacctgagcgccgtcgggctgggagaacagtccgggctggccctcatcaagagctgggcgagcgacgggtggctgcaccgagcgtcggacggcaccggccccgatgccgagaacgtctgctcgctgaccgaggacgcgcgcagcgcgctggcctttgtgcgccgcctgcgccgtgctgacacggtggccacgggcgggtccattgccggtatcgcggcaggcctcaaacgggtggccacccagctggacggcgacccgtcacgcctgcgcgccgacatcgaagcccagatcgcagaactgcagacccagctgcatgccatcgacgacggataccgtccggaaccggatatcgtcgatcttgaggacgagacccgggccatcgcgtatcagatggaacaagtgatcaccgacatcgtccgctacggcagcatgcagaacgagatcaccgccggactcatcgacgccgccgaggactccgactccggcttccgcgaccgcgcccgcagaatgttcgcggactacgacgccctcttcgattcccgcgagcgtgcctcttattcggccttcacgcggaccatccaagatccggatcagcgagccgcgctacggagtgatattgcctgtgtcgcagagggtttgcctgatctcgaccccgggctgcgtgaggtcatgcggaacttcttcaagctcgtttctcagcagatcgcggaggtctcccgcatcgaacagcgctgcgcacagcgcatccggcggttcttcgccgccggcaccacggagcaggctcgtggccgtgcgcgacagctcaatgacgcgctggcggccgggcacgctctactcaaggtgtcgacggcggactctccgatcgacgccgagctaccgatcgggcgttccgccgcagcggcgatcggcgcgctgtctttcaccatcaaggacactgcgccgccggtgctcgcacaggacgccccgtcggggccgctggatttgagcgggttctcggcgctggccacccaggtggatatggccgcattggccgatacggtcaacagtgccattgccggtggcccagtttccttgcccgacatgatctctcatgtcgaggcgccctaccttggtgatgtgatcgtgttgtggtcgctggccctcaagcaggacaacactgccgaccgcgaatcggtaaaggtgaagttccggtccctcgacggacaggaccgggtgatggaggtacctcagttgatgttccgtgaaccggtgctggccaccctcgaagaggagggatcgacactgtga

SEQ ID NO: 46768 - DNA, 750 bp, Mycobacterium abscessus; identical to SEQ ID NO: 42934

SEQ ID NO: 46769 - DNA, 3348 bp, Mycobacterium abscessus; identical to SEQ ID NO: 42935

SEQ ID NO: 46770 - DNA, 1461 bp, Mycobacterium abscessus; identical to SEQ ID NO: 44403

SEQ ID NO: 46771 - DNA, 750 bp, Mycobacterium abscessus; identical to SEQ ID NO: 41998

SEQ ID NO: 46772 - DNA, 3348 bp, Mycobacterium abscessus; identical to SEQ ID NO: 44436

SEQ ID NO: 46773 - DNA, 1461 bp, Mycobacterium abscessus
atgaatgatctgacagtcgaagagctgttcgcgcacaacgatgacgtgcagaaatcccgtgcggtccgcctgttggccgccaagaatctggcgccctacatcacgcttatggaacgccacctggaccgcagcgccaaagtctccgaacctcagctggtggccaagctggaccgggacctgagcgccgtcgggctgggagaacagtccgggctggcccttatcaagagctgggcgagcgacgggtggctgcaccgagcgtcggacggcaccggccccgatgccgagaacgtctgctcgctgaccgaggacgcgcgcagcgcgctggcctttgtgcgccgcctgcgccgtgctgacacggtggccacgggcgggtcgatcgccggtatcgcggcaggcctcaaacgggtggccacccagctggacggcgacccgtcacgcctgcgcgccgacatcgaggcccagatcgcagaactgcagacccagctgcacgccatcgacgacggataccgtccggaaccggatatcgtcgatcttgaggacgagacccgggccatcgcctatcagatggaacaggtgatcaccgacatcgtccgctacggcagcatgcagaacgagatcaccgccggactcatcgacgccgccgaggactccgactccggcttccgcgatcgcgcccgcagaatgttcgcggactatgacgcccttttcgattcccgcgaacgtgcctcttattcggccttcacgcggaccatccaagatccggatcagcgagccgcgctacggagcgatatcgcctgtgtcgcagatggtttgcccgatctcgaccccgggctgcgcgaggtcatgagaaacttcttcaagctcgtgtctcagcagatcgcggaggtctcccgcatcgaacagcgctgcgcacagcgcatccggcgattcttcgccgccggcaccacggagcaggctcgtggccgtgcgcgacagctcaatgacgcgctggcggccgggcacgctctactcaagatgtcgacggcggactctccgatcgacgccgagctaccgatcgggcgttccgccgcagcggcgatcggcgcgctgtctttcaccatcaaggacaccgcgccgccggtgctcgcacaggacgccccgtcggggccgctggatttgagcgggttctcggcgctggccacccaggtggatatggccgcattggccgatacggtcaacagtgctattgccggtggcccagtttccttgcccgacatgatctctcatgtcgaggccccctaccttggtgatgtgatcgtgttgtggtcactggccctcaagcaggacaacactgccgaccgcgaatcggtaaaggtgaagttccggtccctcgacggacaagaccgggtgatggaggtacctcagttgatgttccgtgaaccggtgctggccaccctcgaagaggagggatcgacactgtga

SEQ ID NO: 46774 - DNA, 750 bp, Mycobacterium abscessus
gtgacgacacaggcttcagggaccgccctggggaacatcaatttcgacgacctgccgggtgtcgaacccgatgcctcggcaccgcgaacggccaaggggccgcgattcgacggcgacaccagcgagcttccggacaaggcctgctgggcgctgcagaacctggtggcccggcgttacctgagtaaggacggtcagcccgaactgtgggcgtcgatgatcgagcatcgcaaggtgctggccgcgcgcctgtccgaattggacctgcggctgcgggtgttcgacgatctcgaggttgcctacgccgaaccagctccgttggagaaccccagcgtgtacggcgccagggtgttgcgccgggaaccgttgggcacctacgcgtcgattgtggcactgcatctggccaagatcgcgaggaccgcgcacgacgaacatgtattggtcagccgcgacgatattcacgaacttttcgccaacgtctcccacgacatcgaccgcgacgaggcgatgctgcgtgatcgcgttgacgaggcgatcaagcggctgtccaaggctgagattctgcagcgcacccgcgatgacgagcacagctacaccatcagcccagtcatcaacgcgctgatgtcggcgcagatgatcgaggcactgcagcgtcagtacgagcagttgcagcgcggcggcgccgcccccgaagacgccgacggcgcagaccccaccgacgaagaagatggcgagaccgatgatgacgagtga

SEQ ID NO: 46775 - DNA, 3348 bp, Mycobacterium abscessus
atgatgacgagtgatgcagcgacacaacagttctggttgtcccggctgcaggtcatcaactggggcgtcttcgacggctatcacagcatcgagttcagccgtcgcggtacgctgatcaccggctcctccggtagcggtaaatcatctctgctggacgcgatctcgctggcattcttgtcttcgaaccgccgtaacttcaacgcctcgagcgacaccaccgccgcgggttccagcatgggcaagcgcaccgtcgacaagtacgtgcggggcctgtggggagagctgaagaacccgggggagcgccccaagcagatgttcctgcgcggcaagggcggtgcttggtcggctatcgccgtcacctactccggcaccgacggtcgggtgatcaccggcctggtactcaagtggcttgccccgggctcggattcggactcgtccagccgctactacctgatcgatgcggacgccgacatccgtgatctctgcaatgcatgggccagcaagggatacgccggctcggtgttcgagggcgcgggttggcgcggccacaagagcgaacgctggtacctggaacagctatacgccgccgtcggtattcagggttcctctgccgcgcagcagctgctgggcaaggccaagtcgctcaagagtgtcggcggcctggagcagttcgtacgcgagtacatgctcgatgaaccggagtcgatggcagcgatatccgaagcgctagggcagatcacgccattggtcgacgcccgtgccgccttggcgatcgcgcagcgccagcggcagaccctgggcgatatcgaacagatccaacagacgtacgccagcgacgcggcgcagttggccaccgtggacgtcgtggaccatcacaccgtgcgcgactacgtggatcagcagcgcctggcgctggcgggcccggagatcgatctgctcgataccgagatcacccggctgggtggtgagtgtgacgaaatccagtcgcgccaagacattctcacgggagagcgggacaaattgctcggccggatcgctgccgccgacagcaatctggcgccactcaaaagcgagctggctcatgctcgtgcccgcgcagaagaggtgtcgcgccggcgtacggcctacgacagtgcgttgtgggacctgggtcacgaagacgatatcgaatccgccgaggaattcgaggccatgcgggtggagagcctgcgggcagtcacccggatcaacgctgagctcgaagccggccacgatgcatatgtcatggccgctggtgcgctctctactgcacgtgatcagctgcgtgccgcatccgccgaattcaagcgggtcgagcacctgggtaccccggtgccgccggatgaggaccgcatgcgcggggagatcgccgcggcgcttgggcttaccgccaaggacctgccctatgtgtgcgagctgatggatctgcgcccagggcaggaacggtggcgcaaatctgtggagaaggtgttgcgctccaccgggctctgcctgctggtgcccgatcagcaccaccgccaggtgctgcgttatgtcaacgagaacccgatgcgcggctacctgcagatggagcgggtgattccctccggtaccccgcggcgcgccgagccgggcacgctcgccgactgtttgcgcctgaccaaccccaaccacgaatgcgccagtgccgccatgaatctggtggccggtgtcggcgactacgtgttggtcgacagccccgacgaattcagcaagcaccgccgggcggtcaccgatcagggactgcgcaaggacggtgaccggcgcgcggtcaaggacgatcggcgtgaattgcgggcttcccagtacatctatcagggcaacgctggcgacaagcgcgccgcgctttccgacgatgtggtcgaagcgcagcaggcggtcagtgatgccgaaaagttcatcggcgaaatggacaccaagcgcgaagagctgcgctcggaggtggtgcggtggtccaagctgcacagccaatacgagtattggagccagatcgataccgactcggccgaagctgccgtggcgcgtctacaggaccagtacgacgcgatgctggaagccaaccccgacctgaccggattgcagcagcaggccgactcctacctcgacgagatcaagaggctctccgaacgcatcggagcattgcgcaagcaagaatccgaacatgattcgcgccggacccggttgttggatctgctggacaacctgaacccgcgtgaggtgggcgggcacacccgatcgggtatcgaggcctacgtgccccaactctcgtccagcctggatgtgttggaacccgacgcctaccggctggagctgtggcggcagatcgagaaggatcagtcggtgctgcgtgagagcgtcacccgctcgcgcaacgagctgaaccggattctcaacgcgtacgaccgggacttccccgactctatccccaacgacagtgagaacttcgacgagaagatccacgactatgtcgcactctgccgccggatcgatgaacgcgacctgcccgccgcctacgaacggatgctgcggctgatcaccgagcaggcgcccactgccgtgttgcggctgcaccagctcgccgaggaggaggcacaccgcatcaccgaccagatcgaccgtgtcaatagcggtttgggttcggtcgagttcaaccggggtacccggctgaccctgcgtgccgagccgaaggcgctcgaagcggtgggcgagctcaacgagcgtgcccggcggatatccgggcgtgccgtcgccgtttcgatgggggacgagaaggccatccacgaccagtaccaggacatcctgcaactgcgtaacctgttggccgctgagacacctgaggcgcgccagtggacgcgcgacgcgttggatgtgcgtaaccgcttcgtgttgtactgcgaggagcgcgatgccaggaccggcgaaccgatccgtacctacagcaacgcgggtgcgaattccggtggagaacaagagaagttgatggcgttctgcctcgccggcgcgctgagcttcaacctggccaacccggagacgggggacaaccggccggtcttcgcgcagcttatgctcgacgaggcgttctcgaaatcggatccgcagttcgcccagcaggcgctgtccgcgttccgtaagttcggattccagctggtgatcgtggccaccgtgcagaacaccaccaccatccagccctatatcgacagcgtggtgatggtgtccaagccggacggcccgggggtgcgtccggttgcttcgacgcgcacggtgccgatcggtgaactcggtgacgtacgcaaggccgtgagcgcccgctag

SEQ ID NO: 46776 - DNA, 1461 bp, Mycobacterium abscessus; identical to SEQ ID NO: 42721

SEQ ID NO: 46777 - DNA, 750 bp, Mycobacterium abscessus; identical to SEQ ID NO: 42722

SEQ ID NO: 46778 - DNA, 3348 bp, Mycobacterium abscessus; identical to SEQ ID NO: 42723

SEQ ID NO: 46779 - DNA, 1461 bp, Mycobacterium abscessus; identical to SEQ ID NO: 42792

SEQ ID NO: 46780 - DNA, 750 bp, Mycobacterium abscessus; identical to SEQ ID NO: 42793

SEQ ID NO: 46781 - DNA, 3348 bp, Mycobacterium abscessus; identical to SEQ ID NO: 43029

SEQ ID NO: 46782 - DNA, 1461 bp, Mycobacterium abscessus; identical to SEQ ID NO: 42721

SEQ ID NO: 46783 - DNA, 750 bp, Mycobacterium abscessus; identical to SEQ ID NO: 42722

SEQ ID NO: 46784 - DNA, 3348 bp, Mycobacterium abscessus; identical to SEQ ID NO: 42723

SEQ ID NO: 46785 - DNA, 1461 bp, Mycobacterium abscessus; identical to SEQ ID NO: 42721

SEQ ID NO: 46786 - DNA, 750 bp, Mycobacterium abscessus; identical to SEQ ID NO: 42722

SEQ ID NO: 46787 - DNA, 3348 bp, Mycobacterium abscessus; identical to SEQ ID NO: 42723

SEQ ID NO: 46788 - DNA, 1461 bp, Mycobacterium abscessus; identical to SEQ ID NO: 46767

SEQ ID NO: 46789 - DNA, 750 bp, Mycobacterium abscessus; identical to SEQ ID NO: 42934

SEQ ID NO: 46790 - DNA, 3348 bp, Mycobacterium abscessus; identical to SEQ ID NO: 42935

SEQ ID NO: 46791 - DNA, 1461 bp, Mycobacterium abscessus; identical to SEQ ID NO: 42721

SEQ ID NO: 46792 - DNA, 750 bp, Mycobacterium abscessus; identical to SEQ ID NO: 42722

SEQ ID NO: 46793 - DNA, 3348 bp, Mycobacterium abscessus; identical to SEQ ID NO: 42723

SEQ ID NO: 46794 - DNA, 1461 bp, Mycobacterium abscessus; identical to SEQ ID NO: 41997

SEQ ID NO: 46795 - DNA, 750 bp, Mycobacterium abscessus; identical to SEQ ID NO: 41998

SEQ ID NO: 46796 - DNA, 3348 bp, Mycobacterium abscessus; identical to SEQ ID NO: 41999

SEQ ID NO: 46797 - DNA, 1461 bp, Mycobacterium abscessus; identical to SEQ ID NO: 42933

SEQ ID NO: 46798 - DNA, 750 bp, Mycobacterium abscessus; identical to SEQ ID NO: 42934

SEQ ID NO: 46799 - DNA, 3348 bp, Mycobacterium abscessus; identical to SEQ ID NO: 42935

SEQ ID NO: 46800 - DNA, 1461 bp, Mycobacterium abscessus; identical to SEQ ID NO: 42721

SEQ ID NO: 46801 - DNA, 750 bp, Mycobacterium abscessus; identical to SEQ ID NO: 42722

SEQ ID NO: 46802 - DNA, 3348 bp, Mycobacterium abscessus; identical to SEQ ID NO: 42723

SEQ ID NO: 46803 - DNA, 1461 bp, Mycobacterium abscessus; identical to SEQ ID NO: 44403

SEQ ID NO: 46804 - DNA, 750 bp, Mycobacterium abscessus; identical to SEQ ID NO: 41998

SEQ ID NO: 46805 - DNA, 3348 bp, Mycobacterium abscessus; identical to SEQ ID NO: 44436

SEQ ID NO: 46806 - DNA, 1461 bp, Mycobacterium abscessus; identical to SEQ ID NO: 46758

SEQ ID NO: 46807 - DNA, 750 bp, Mycobacterium abscessus; identical to SEQ ID NO: 46759

SEQ ID NO: 46808 - DNA, 3348 bp, Mycobacterium abscessus; identical to SEQ ID NO: 46760

SEQ ID NO: 46809 - DNA, 1461 bp, Mycobacterium abscessus; identical to SEQ ID NO: 42721

SEQ ID NO: 46810 - DNA, 750 bp, Mycobacterium abscessus; identical to SEQ ID NO: 42722

SEQ ID NO: 46811 - DNA, 3348 bp, Mycobacterium abscessus; identical to SEQ ID NO: 42723

SEQ ID NO: 46812 - DNA, 1461 bp, Mycobacterium abscessus; identical to SEQ ID NO: 42721

SEQ ID NO: 46813 - DNA, 750 bp, Mycobacterium abscessus; identical to SEQ ID NO: 42722

SEQ ID NO: 46814 - DNA, 3348 bp, Mycobacterium abscessus; identical to SEQ ID NO: 42723

SEQ ID NO: 46815 - DNA, 1461 bp, Mycobacterium abscessus; identical to SEQ ID NO: 44403

SEQ ID NO: 46816 - DNA, 750 bp, Mycobacterium abscessus; identical to SEQ ID NO: 41998

SEQ ID NO: 46817 - DNA, 3348 bp, Mycobacterium abscessus; identical to SEQ ID NO: 44436

SEQ ID NO: 46818 - DNA, 1461 bp, Mycobacterium abscessus; identical to SEQ ID NO: 42721

SEQ ID NO: 46819 - DNA, 750 bp, Mycobacterium abscessus; identical to SEQ ID NO: 42722

SEQ ID NO: 46820 - DNA, 3348 bp, Mycobacterium abscessus; identical to SEQ ID NO: 42723

SEQ ID NO: 46821 - DNA, 1461 bp, Mycobacterium abscessus; identical to SEQ ID NO: 42721

SEQ ID NO: 46822 - DNA, 750 bp, Mycobacterium abscessus; identical to SEQ ID NO: 42722

SEQ ID NO: 46823 - DNA, 3348 bp, Mycobacterium abscessus; identical to SEQ ID NO: 42723

SEQ ID NO: 46824 - DNA, 1461 bp, Mycobacterium abscessus; identical to SEQ ID NO: 46758

SEQ ID NO: 46825 - DNA, 750 bp, Mycobacterium abscessus; identical to SEQ ID NO: 46759

SEQ ID NO: 46826 - DNA, 3348 bp, Mycobacterium abscessus; identical to SEQ ID NO: 46760

SEQ ID NO: 46827 - DNA, 1461 bp, Mycobacterium abscessus; identical to SEQ ID NO: 42721

SEQ ID NO: 46828 - DNA, 750 bp, Mycobacterium abscessus; identical to SEQ ID NO: 42722

SEQ ID NO: 46829 - DNA, 3348 bp, Mycobacterium abscessus
atgacgacgagtgatgcagcgacacaacagttctggttgtcccggctgcaggtcatcaactggggcgtcttcgacggctatcacagcatcgagttcagccgtcgcggtacgctgatcaccggctcctccggtagcggtaaatcatctctgctggatgcgatctcgctggcattcttgtcttcgaaccgccgtaacttcaacgcctctagcgacaccaccgccgcgggttccagcatgggcaagcgcaccgtcgacaagtacgtgcggggcctgtggggagagctgaagaacccgggggagcgccccaagcagatgttcctgcgcggcaagggcggtgcctggtcggctatcgccgtcacctactccggcaccgacggtcgggtgatcaccggcctggtactcaagtggcttgccccgggctcggattcggactcgtccagccgctactacctgatcgatgcggacgccgacatccgtgatctctgcaatgcgtgggccagcaagggatacgccggctcggtgttcgagggcgcgggttggcgcggccacaagagcgaacgctggtacctggaacagctatacgccgccgtcggtattcagggttcctctgccgcgcagcagctgctgggcaaggccaagtcgctcaagagtgtcggcggcctggagcagttcgtacgcgagtacatgctcgatgaaccggagtcgatggcagcgatatccgaagcgctagggcagatcacgccattggtcgacgcccgtgccgccttggcgatcgcgcagcgccagcggcagaccctgggcgatatcgaacagatccaacagacgtacgccagcgatgcggcgcagttggccaccgtggacgtcgtggaccatcacaccgtgcgcgactacgtggatcagcagcgcctggcgctggcgggcccggagatcgatctgctcgacaccgagatcacccggctgggtggtgagtgtgacgaaatccagtcgcgccaggacattctcacgggagagcgggacaaattgctcggccggatcgctgccgccgacagcaatctggcgccactcaaaagcgagctggctcatgctcgtgcccgcgcagaagaggtgtcgcgccggcgtacggcctacgacagtgcgttgtgggacctgggtcacgaagacgatatcgaatccgccgaggaattcgaggccatgcgggtggagagcctgcgggcagtcacccggatcaacgctgagctcgaagccggccacgatgcatatgtcatggccgcgggtgcgctctcgacggcacgtgatcagctgcgtgctgcatccgccgaattcaagcgggtcgagcacctgggtacccccgtgccgccggatgaggaccgcatgcgcggggagatcgccgcggcgcttgggcttaccgccaaggacctgccctacgtgtgcgagctgatggatctgcgcccagggcaggaacggtggcgcaaatctgtggagaaggtgttgcgctccaccgggctctgcctgctggtgcccgatcagcaccaccgccaggtgctgcgttatgtcaacgagaacccgatgcgcggctacctgcagatggagcgggtgattccctccggtaccccgcggcgcgccgagccgggcacgctcgccgactgtttgcgcctgaccaaccccaaccacgaatgcgccagtgccgccatgaatctggtggccggtgtcggcgactacgtgttggtcgacagccccgacgaattcagcaagcaccgccgggcggtcaccgatcagggactgcgcaaggacggtgaccggcgcgcggtcaaggacgatcggcgtgaattgcgggcttcccagtacatctatcagggcaacgctggcgacaagcgcgccgcgctttccgacgatgtggtcgaagcgcagcaggcggtcagtgatgccgaaaagttcatcggcgaaatggacaccaagcgcgaagagctgcgctcggaggtggtgcggtggtccaagctgcacagccaatacgagtattggagccagatcgataccgactcggccgaagccgccgtggcgcgtctacaggaccagtacgacgcgatgctggaagccaaccccgacctgaccggattgcagcagcaggccgactcctacctcgacgagatcaagaggctctccgaacgcatcggagcattgcgcaagcaagaatccgaacatgattcgcgccggacccggttgctggatctgctggacaacctgaacccgcgtgaggtgggcgggcacacccgatcgggaatcgaggcctatgtgccccaactctcgtccagcctggatgtgttggaacccgacgcctaccgactggagctgtggcggcagatcgagaaggatcagtcggtgctgcgtgagagcgtcacccgctcgcgcaacgagctgaaccggattctcaacgcgtacgaccgggacttccccgactctatccccaacgacagtgagaacttcgacgagaagatccacgactatgtcgcactctgccgcaggatcgatgaacgcgacctgcccgccgcctacgaacggatgctgcggctgatcaccgagcaggcgcccactgccgtgttgcggctgcaccagctcgccgaggaggaggcacaccgcatcaccgaccagatcgaccgtgtcaatagcggtttgggttcggtcgagttcaaccggggtacccggctgaccctgcgtgccgagccgaaggcgctcgaagcggtgggcgagctcaacgagcgtgcccggcggatatccgggcgtgccgtcgccgtttcgatgggggacgagaaggccatccacgaccagtaccaggacatcctgcaactgcgtaacctgttggccgctgagacacctgaggcgcgccagtggacgcgcgacgcgttggatgtgcgtaaccgcttcgtgttgtactgcgaggagcgcgatgccaggaccggcgaaccgatccgtacctacagcaacgcgggtgcgaattccggtggagaacaagagaagttgatggcgttctgcctcgccggcgcgctgagcttcaacctggccaacccggagacgggggacaaccggccggtcttcgcgcagcttatgctcgacgaggcgttctcgaaatcggatccgcagttcgcccagcaggcgctgtccgcgttccgtaagttcggattccagctggtgatcgtggccaccgtgcagaacaccaccaccatccagccctatatcgacagcgtggtgatggtgtccaagccggacggcccgggggtgcgtccggttgcttcgacgcgcacggtgccgatcggtgaactcggtgacgtacgcaaggccgtgagcgcccgctag

SEQ ID NO: 46830 - DNA, 1461 bp, Mycobacterium abscessus; identical to SEQ ID NO: 44403

SEQ ID NO: 46831 - DNA, 750 bp, Mycobacterium abscessus; identical to SEQ ID NO: 41998

SEQ ID NO: 46832 - DNA, 3348 bp, Mycobacterium abscessus; identical to SEQ ID NO: 44436

SEQ ID NO: 46833 - DNA, 1461 bp, Mycobacterium abscessus; identical to SEQ ID NO: 42721

SEQ ID NO: 46834 - DNA, 750 bp, Mycobacterium abscessus; identical to SEQ ID NO: 42722

SEQ ID NO: 46835 - DNA, 3348 bp, Mycobacterium abscessus; identical to SEQ ID NO: 42723

SEQ ID NO: 46836 - DNA, 1461 bp, Mycobacterium abscessus; identical to SEQ ID NO: 41997

SEQ ID NO: 46837 - DNA, 750 bp, Mycobacterium abscessus; identical to SEQ ID NO: 41998

SEQ ID NO: 46838 - DNA, 3348 bp, Mycobacterium abscessus; identical to SEQ ID NO: 41999

SEQ ID NO: 46839 - DNA, 1461 bp, Mycobacterium abscessus; identical to SEQ ID NO: 42721

SEQ ID NO: 46840 - DNA, 750 bp, Mycobacterium abscessus; identical to SEQ ID NO: 42722

SEQ ID NO: 46841 - DNA, 3348 bp, Mycobacterium abscessus; identical to SEQ ID NO: 42723

SEQ ID NO: 46842 - DNA, 1461 bp, Mycobacterium abscessus; identical to SEQ ID NO: 42933

SEQ ID NO: 46843 - DNA, 750 bp, Mycobacterium abscessus; identical to SEQ ID NO: 42934

SEQ ID NO: 46844 - DNA, 3348 bp, Mycobacterium abscessus; identical to SEQ ID NO: 42935

SEQ ID NO: 46845 - DNA, 1461 bp, Mycobacterium abscessus; identical to SEQ ID NO: 42721

SEQ ID NO: 46846 - DNA, 750 bp, Mycobacterium abscessus; identical to SEQ ID NO: 42722

SEQ ID NO: 46847 - DNA, 3348 bp, Mycobacterium abscessus; identical to SEQ ID NO: 42723

SEQ ID NO: 46848 - DNA, 1461 bp, Mycobacterium abscessus; identical to SEQ ID NO: 46758

SEQ ID NO: 46849 - DNA, 750 bp, Mycobacterium abscessus; identical to SEQ ID NO: 46759

SEQ ID NO: 46850 - DNA, 3348 bp, Mycobacterium abscessus; identical to SEQ ID NO: 46760

SEQ ID NO: 46851 - DNA, 1461 bp, Mycobacterium abscessus; identical to SEQ ID NO: 44403

SEQ ID NO: 46852 - DNA, 750 bp, Mycobacterium abscessus; identical to SEQ ID NO: 41998

SEQ ID NO: 46853 - DNA, 3348 bp, Mycobacterium abscessus; identical to SEQ ID NO: 44436

SEQ ID NO: 46854 - DNA, 1461 bp, Mycobacterium abscessus; identical to SEQ ID NO: 44403

SEQ ID NO: 46855 - DNA, 750 bp, Mycobacterium abscessus; identical to SEQ ID NO: 41998

SEQ ID NO: 46856 - DNA, 3348 bp, Mycobacterium abscessus; identical to SEQ ID NO: 44436

SEQ ID NO: 46857 - DNA, 1461 bp, Mycobacterium abscessus; identical to SEQ ID NO: 44403

SEQ ID NO: 46858 - DNA, 750 bp, Mycobacterium abscessus; identical to SEQ ID NO: 41998

SEQ ID NO: 46859 - DNA, 3348 bp, Mycobacterium abscessus; identical to SEQ ID NO: 44436

SEQ ID NO: 46860 - DNA, 1461 bp, Mycobacterium abscessus; identical to SEQ ID NO: 42933

SEQ ID NO: 46861 - DNA, 750 bp, Mycobacterium abscessus; identical to SEQ ID NO: 42934

SEQ ID NO: 46862 - DNA, 3348 bp, Mycobacterium abscessus; identical to SEQ ID NO: 42935

SEQ ID NO: 46863 - DNA, 1461 bp, Mycobacterium abscessus; identical to SEQ ID NO: 42721

SEQ ID NO: 46864 - DNA, 750 bp, Mycobacterium abscessus; identical to SEQ ID NO: 42722

SEQ ID NO: 46865 - DNA, 3348 bp, Mycobacterium abscessus; identical to SEQ ID NO: 42723

SEQ ID NO: 46866 - DNA, 1461 bp, Mycobacterium abscessus; identical to SEQ ID NO: 44403

SEQ ID NO: 46867 - DNA, 750 bp, Mycobacterium abscessus; identical to SEQ ID NO: 41998

SEQ ID NO: 46868 - DNA, 3348 bp, Mycobacterium abscessus; identical to SEQ ID NO: 44436

SEQ ID NO: 46869 - DNA, 1461 bp, Mycobacterium abscessus; identical to SEQ ID NO: 42721

SEQ ID NO: 46870 - DNA, 750 bp, Mycobacterium abscessus; identical to SEQ ID NO: 42722

SEQ ID NO: 46871 - DNA, 3348 bp, Mycobacterium abscessus; identical to SEQ ID NO: 42723

SEQ ID NO: 46872 - DNA, 1461 bp, Mycobacterium abscessus; identical to SEQ ID NO: 41997

SEQ ID NO: 46873 - DNA, 750 bp, Mycobacterium abscessus; identical to SEQ ID NO: 41998

SEQ ID NO: 46874 - DNA, 3348 bp, Mycobacterium abscessus; identical to SEQ ID NO: 41999

SEQ ID NO: 46875 - DNA, 1461 bp, Mycobacterium abscessus; identical to SEQ ID NO: 46758

SEQ ID NO: 46876 - DNA, 750 bp, Mycobacterium abscessus; identical to SEQ ID NO: 46759

SEQ ID NO: 46877 - DNA, 3348 bp, Mycobacterium abscessus; identical to SEQ ID NO: 46760

SEQ ID NO: 46878 - DNA, 1461 bp, Mycobacterium abscessus; identical to SEQ ID NO: 42721

SEQ ID NO: 46879 - DNA, 750 bp, Mycobacterium abscessus; identical to SEQ ID NO: 42722

SEQ ID NO: 46880 - DNA, 3348 bp, Mycobacterium abscessus; identical to SEQ ID NO: 42723

SEQ ID NO: 46881 - DNA, 1461 bp, Mycobacterium abscessus; identical to SEQ ID NO: 44403

SEQ ID NO: 46882 - DNA, 750 bp, Mycobacterium abscessus; identical to SEQ ID NO: 41998

SEQ ID NO: 46883 - DNA, 3348 bp, Mycobacterium abscessus; identical to SEQ ID NO: 44436

SEQ ID NO: 46884 - DNA, 1461 bp, Mycobacterium abscessus; identical to SEQ ID NO: 42721

SEQ ID NO: 46885 - DNA, 750 bp, Mycobacterium abscessus; identical to SEQ ID NO: 42722

SEQ ID NO: 46886 - DNA, 3348 bp, Mycobacterium abscessus; identical to SEQ ID NO: 42723

SEQ ID NO: 46887 - DNA, 1047 bp, Mycobacterium abscessus
gtggctagacaactcgacaatgaccctgaccggctgctgaacgatctcgatgaacgtatcgctgaactgcaacgccagcgcgaacaggtggcggcgggcaatcggccagagccgaactttctcgacttggaggatgaggccaaggcgatcggtatgcagatggagcacgtggtcgccgatatcggccgttacgcgaccatacagaaccggatcacgacggggcttctcagcgagctcggcgacagcgacgccgaattccgcgaccgtcaccacaagctgtttgatgactatctcgctctcgatcaatcacgtgagcaggcctcctaccaggcgtttacccgcatgattcaggatcctgcggctcagctgcggttgcgtcgcgacatcgacttggtggccgcgggcctgcccgacttggatgcaggggtgaaggatctgctgcgaggattcttgacttcggtgagtcgccagatgagcgaggtcgatcgggtgcggcagcgctgcgcgcagcgcattcggcggtttttcgccgcgggcacggcagagcagagccgcggtttcgcgcgccagctcaacgaggccatcgcggcgggccaggcgctgctgaatgtgtcgttgaccgactcgcaacttgactgtgagatcccgatcgtgacatcggaggcggagacatcgctgggggcgctggggttcaagattgtcgacccgacgccgccgccgttggcgcaggagtcggtcgaaacactcgatatcgcggggtttgcggcgttagcggcgcaggttgacgtggaagcacttgcaggggcggtgaatacggcgctggcggcggggccgatatcgcttccggaagcgcttatgttggttgatgacgcatatctgggggagctactggtgctgtggacttgggcgcaagcccaacctcaagggcagtcccccgtggaggctgaggcgaccgttcagttccggtcaatgggcggcgttgatcgtcaaatgcgggtaccactactgatgttcaccgaacctgtgatcgaaggggacctgctgtga

SEQ ID NO: 46888 - DNA, 723 bp, Mycobacterium abscessus
gtgactgagcaaccgcagtggcaggcaatgaatttcgatgcgctgccgtccgtgcaggatttggtcgtcgacaccgagtcgtcgagggtgcctcgcttcgacggtgatgccagcgagctaccggaccgggcctgctgggccctgcagaacctgctcaagaaccgatacatacgcaaaaactccgaccccgaactgtgggcttggacgatgctgtaccgacccgggatcgaatgccgactctcggagctgaacctgaggcttaaagtcgtcgacggcgtcgatacagcatttaccgaacccgtggatgatcccagccgctggtcacggcgtctcgtgcgtcgagagaccctcggaacctacgacgcgatccttgcgctgcaactcaccaaactgatgcgggtatcgcacgatgaagacgccattttcagccgcgccgatctgcacgaattattcagtggggtagcgcattccacgaataccgatagggccaaattcgaggcccgaatcaacggcgcgatcgggaaacttgtcggcactagcttgctgaacaaggtcggcgacgacgaagacagcttcaccgtgaacccggtgatcaccgccatcatgagcgcctcgttggtcgccgaacttgaccgcaaattcgaggaactcaaactcgcgaaactcgcaaccgtgcccgccgccgaggacggagacatcgatgacgatgacaccaacacctga

SEQ ID NO: 46889 - DNA, 3375 bp, Mycobacterium abscessus
atgacgatgacaccaacacctgaccctccggggagcgtggatcaattcactctcttacggctacaggtcatcaactggggcgtgttcgacggctaccacagcgtcatcttcgcgcctcgcggcacattgatcgctggacgatctggaagtggcaaatcaacactgctggacgcgatctccctgggcttcctgccctccaaacggcgcaacttcaacgcgtccagcgacatcgggcaacgaaccgtcgacaagtacattcgcggccaatggggcgagcaacgcgctggcaccgacgacccgaaactgatgtatctgcgtggtgacggcgccgcctggtccgcggtatcgctcacgtacagcagcggtgccggtaagaacgtcaccggcctggtcctcaaacgccttgctgctgacaagataagtgacccggtcagcgactacttcctgatcgattccgccgccgacatcaaagacgtgtgcaacacgtgggtggagaaaggcttcgcaagtgcggtgctccgggacgccggctggcgcgggggcggtaaaggaaacaacgaaacttggtacctgagccagctgtacgctgcgatcggtatacgagcatccgaagccgctcagcagctgctaggcaaagcgaaatcgctcaaaagcgttggcggcttagaacgattcgttcgcgaatacatgctggacgagccggaaagcatcaaagacattgctggcgccctggcccagatcgatccgctcgtggccgcccggaaagacctggaagtagcccaacagaaacaccacaccctcgacggcatcgaagatgcctacgagaccttcgccgcggagagcgcgcgtctggacagcgtgaccaccattgaccggccgatgattagcgacttcgtcgaccatctccggaaagacaagtgcggtccagaggttgaacgcctcgatcgtgagctgcgcgaagcaggcgacgcattggacgtgctcgacggccgcaaagataccgcgctcaaacgcttgaagcttctcatcagccaggaagctgaaatcggcggcggcctgatctccgtggagcacgcattgcaggcggcccggacccacgcagaaggcgtgtcacgcaacgccagatcctatgagcagttgatcttcgaggtcggctacccgcccgccgacaacgaaacagacttcgccgaactacgccagttgtgctgggagcgtagtgaacagatcaccgctgaactgaaagccagcagcgggaaataccatgcggcgattcagaaggaacgcaacgcccacgaccgagtcgtgttcgccgaggccgagctcgcccgtgtgcaggcgaacggcagccccattccgcccagtgaatcagagatgcgtgcccgcattgttgccgccattggggtgtcggccaagcagctgccgtatgtggcggagctgatggaaatcggtcacgggaaacagcgctggcaggtcgcggcggagaaagcactgcgcagtgccgggcttaatctgctggtgccccaacgctatttccgcgatgtgctctcctttgcccacgccaacaatatgcgcggctacctcaacctccacgaagtggtccccggcgtgggtgcggcagagccccgccgcgacacgctggcgtcgatgttgcaactggccgaccccagccacgaatgcgcggcctcggccctggccgtcatcagcaatgccggcgatttcgtgtgtgtagacgcccctgccgagttcgaccagttcaacagggccatcacagattccgggctcatgaagatcggcgctggccgggcacgcaaagacgatcgtcgcccgccgaaagcttccgagtacatcttccagggcgatatcgagtccaagctggatgccctggccgctgatgttgccgaagctcaggccgatcaggaactcgcccgcgccgaagcgaacgacatcgaggctgaccgtgaacagcagcgcgcacaacatgctacggcgctcgccgtgtacaagaacttcgcggcgttcagtgaaatcgataccgccaccgccgaccgcgaagtggcccaactcgacgagcagtaccaagagatgctgaaggaaaacccggatctggagaagttgcagcagcaggtcgagcagcagcaaaaaagctacgacgacataatgaaagagattgcgctgctgcgccaaaccgaagaaaaaacagacaattatcgcaccgcattgctggacctgagcgatgtgctccagcctgccgcggtatcggaccgggtgcgccgcgagctggaacagtatgccgccagtgtgttctccgtgctagacctcttacaccccaagcaattccgcgacgagctcgcgcagaaagtggaaagcgaacaaaccagtctgcgggaatctctgcgacgttcccggcagcgtgtcgagaggatcattggccagttcgatgagcggttccgtgaatctatccccaacgacagcgacgacatcgacgccaaagccgccgactacgtcgaactgtggcagcggatcgagaaccgtgacctgccagccgcatacgaccggatgctcaaacacatcacccgtgacgctcctactgcactgctgaatctacgtaccaaggcagataacgcggcggcgctcatccaagctcagattgagcgtgtgaacaccggcctgtcgtcggtcgaattcaacaccggcacccgactcaaactgcgtgcccccgaacgtaatctcgccgctgtgcgtgaactcaacgaacgctgcacccgaatctcccagcgagcggcagccgtggcggccggcgataaggacgccattcccgcgcagtacacagagatccttgagctgcggactcttctgggcagcaacgaacctgagcaccgtcaatggacccgcgacgctctcgacgtacggcaccgattcaccatgtactgcgatgaactcgacgccaacgaccccgacacagtgatccgcagccacagcaactccgaagacaattctggcggtgagcaagagaaactcatggccttctgcctggcgggtgcgctgagctacaacctggccgacccggaaagcggcgataaccggcccgtgttcgctcagctgatgctcgatgaagcattctccaaatccgaccctgtgttcgctcgccaagcgctgtcggcgttcggcaggttcggattccaactcgttatcgtggctacgctgcaaaactcgactgtcatcgaaccccacgtgggcggtgttgtgctcgtctccaaaccggacaggccgggcgtgcggccggtggcggcagtgcaagcccagagcattgaggagttcgtgccgttccgacgcggcctcgcccgccaaccaaacaaagccagcgaccacttgtga

SEQ ID NO: 46890 - DNA, 984 bp, Mycobacterium abscessus
atgtacacgctgccacacaaactggtagtgcctgacctcgccgctgcgctggccgtcgccccagcagccgcgcgcagatatcggcgggcgatgacacgtcaccagcaggccatcgccaactcctcggtgcgttggaccgcgctcgatgagatctccggcgactccctgtccagaatcgaggccttggacgaccatgactgggcattagcattggaattggccgagtacctcacgtccacgccggtcaccggcatgatggtccgccaaatcactatcgacggccttcacagcaaatggatcgaacaacacgccgtgctcgtcctggacatgatttgtccgccgaaaatcgaactgcccgacggcagcccgctcacaaagctccggcacatactggggttgcgtgcgaaggatttacggataaacgtcgcgctgcgctgtccgcaacttcgggccgtcgctgctggaatggagcgattctcgacaaccatcagcacactcaacgacagcgcgttggcaccgcagaacctgctgatcattgagaatgatcagccggggtacaccctcaccagggatatcccgaatctggccgtgctacacggcctgggtgactcagttacgagcctgacgccattgcgctggtttcagaccgccagtcaagtcctgtactggggcgacatagaccgtgcaggtctacaggccgttgcctctttacggcgcgcgggaatccctgcgcattcactcctcatggactgcatcaccctcgacacccacgaggatcaggcacacaaggccacaaagactcaggcgacagatcagaatgtcccagatggcctcactgcggatgaaaggctgctctacgagcggttgaacacgcacttccagcagactggcgaggagtggcaactcgaacaagagcacttgccgactcagattgtcgaatcagcgctagtcagtgcgtgccagggtcctggtaataggaaatga

SEQ ID NO: 46891 - DNA, 1461 bp, Mycobacterium abscessus; identical to SEQ ID NO: 44403

SEQ ID NO: 46892 - DNA, 750 bp, Mycobacterium abscessus; identical to SEQ ID NO: 41998

SEQ ID NO: 46893 - DNA, 3348 bp, Mycobacterium abscessus; identical to SEQ ID NO: 44436

SEQ ID NO: 46894 - DNA, 1461 bp, Mycobacterium abscessus; identical to SEQ ID NO: 44403

SEQ ID NO: 46895 - DNA, 750 bp, Mycobacterium abscessus; identical to SEQ ID NO: 41998

SEQ ID NO: 46896 - DNA, 3348 bp, Mycobacterium abscessus; identical to SEQ ID NO: 44436

SEQ ID NO: 46897 - DNA, 1461 bp, Mycobacterium abscessus; identical to SEQ ID NO: 46758

SEQ ID NO: 46898 - DNA, 750 bp, Mycobacterium abscessus; identical to SEQ ID NO: 46759

SEQ ID NO: 46899 - DNA, 3348 bp, Mycobacterium abscessus; identical to SEQ ID NO: 46760

SEQ ID NO: 46900 - DNA, 1461 bp, Mycobacterium abscessus; identical to SEQ ID NO: 42721

SEQ ID NO: 46901 - DNA, 750 bp, Mycobacterium abscessus; identical to SEQ ID NO: 42722

SEQ ID NO: 46902 - DNA, 3348 bp, Mycobacterium abscessus; identical to SEQ ID NO: 42723

SEQ ID NO: 46903 - DNA, 1461 bp, Mycobacterium abscessus; identical to SEQ ID NO: 42721

SEQ ID NO: 46904 - DNA, 750 bp, Mycobacterium abscessus; identical to SEQ ID NO: 42722

SEQ ID NO: 46905 - DNA, 3348 bp, Mycobacterium abscessus; identical to SEQ ID NO: 42723

SEQ ID NO: 46906 - DNA, 1461 bp, Mycobacterium abscessus; identical to SEQ ID NO: 46758

SEQ ID NO: 46907 - DNA, 750 bp, Mycobacterium abscessus; identical to SEQ ID NO: 46759

SEQ ID NO: 46908 - DNA, 3348 bp, Mycobacterium abscessus; identical to SEQ ID NO: 46760

SEQ ID NO: 46909 - DNA, 1461 bp, Mycobacterium abscessus; identical to SEQ ID NO: 46758

SEQ ID NO: 46910 - DNA, 750 bp, Mycobacterium abscessus; identical to SEQ ID NO: 46759

SEQ ID NO: 46911 - DNA, 3348 bp, Mycobacterium abscessus; identical to SEQ ID NO: 46760

SEQ ID NO: 46912 - DNA, 1461 bp, Mycobacterium abscessus; identical to SEQ ID NO: 44403

SEQ ID NO: 46913 - DNA, 750 bp, Mycobacterium abscessus; identical to SEQ ID NO: 41998

SEQ ID NO: 46914 - DNA, 3348 bp, Mycobacterium abscessus; identical to SEQ ID NO: 44436

SEQ ID NO: 46915 - DNA, 1461 bp, Mycobacterium abscessus; identical to SEQ ID NO: 46758

SEQ ID NO: 46916 - DNA, 750 bp, Mycobacterium abscessus; identical to SEQ ID NO: 46759

SEQ ID NO: 46917 - DNA, 3348 bp, Mycobacterium abscessus; identical to SEQ ID NO: 46760

SEQ ID NO: 46918 - DNA, 1461 bp, Mycobacterium abscessus; identical to SEQ ID NO: 42721

SEQ ID NO: 46919 - DNA, 750 bp, Mycobacterium abscessus; identical to SEQ ID NO: 42722

SEQ ID NO: 46920 - DNA, 3348 bp, Mycobacterium abscessus; identical to SEQ ID NO: 42723

SEQ ID NO: 46921 - DNA, 1461 bp, Mycobacterium abscessus; identical to SEQ ID NO: 46773

SEQ ID NO: 46922 - DNA, 750 bp, Mycobacterium abscessus; identical to SEQ ID NO: 46774

SEQ ID NO: 46923 - DNA, 3348 bp, Mycobacterium abscessus; identical to SEQ ID NO: 46775

SEQ ID NO: 46924 - DNA, 1461 bp, Mycobacterium abscessus; identical to SEQ ID NO: 42721

SEQ ID NO: 46925 - DNA, 750 bp, Mycobacterium abscessus; identical to SEQ ID NO: 42722

SEQ ID NO: 46926 - DNA, 3348 bp, Mycobacterium abscessus; identical to SEQ ID NO: 42723

SEQ ID NO: 46927 - DNA, 1461 bp, Mycobacterium abscessus; identical to SEQ ID NO: 44403

SEQ ID NO: 46928 - DNA, 750 bp, Mycobacterium abscessus; identical to SEQ ID NO: 41998

SEQ ID NO: 46929 - DNA, 3348 bp, Mycobacterium abscessus; identical to SEQ ID NO: 44436

SEQ ID NO: 46930 - DNA, 1461 bp, Mycobacterium abscessus; identical to SEQ ID NO: 42721

SEQ ID NO: 46931 - DNA, 750 bp, Mycobacterium abscessus; identical to SEQ ID NO: 42722

SEQ ID NO: 46932 - DNA, 3348 bp, Mycobacterium abscessus; identical to SEQ ID NO: 42723

SEQ ID NO: 46933 - DNA, 1461 bp, Mycobacterium abscessus; identical to SEQ ID NO: 46758

SEQ ID NO: 46934 - DNA, 750 bp, Mycobacterium abscessus; identical to SEQ ID NO: 46759

SEQ ID NO: 46935 - DNA, 3348 bp, Mycobacterium abscessus; identical to SEQ ID NO: 46760

SEQ ID NO: 46936 - DNA, 1461 bp, Mycobacterium abscessus
atgaatgatctgacagtcgaagagctgttcgcgcacaacgatgacgtgcagaaatcccgtgcggtccgcctgttggccgccaagaatctggccccctacatcacgctcatggaacgccacctggaccgcagcgccaaagtctccgaacctcagctggtggccaagctggaccgggacctgagcgccgtcgggctgggagaacagtccgggctggccctcatcaagagctgggcgagcgacgggtggctgcaccgagcgtcggacggcaccggccctgatgccgagaacgtctgctcgctgaccgaggacgcgcgcagcgcgctggcctttgtgcgccgcctgcgccgtgctgacacggtggccacgggcgggtccattgccggtatcgcggcaggtctcaaacgggtggccacccagctggacggcgacccgtcacgcctgcgcgccgacatcgaagcccagatcgcagaactgcagacccagctgcatgccatcgacgacggataccgtccggaaccggatatcgtcgatcttgaggacgagacccgggccatcgcgtatcagatggaacaagtgatcaccgacatcgtccgctacggcagcatgcagaacgagatcaccgccggactcatcgacgccgccgaggactccgactccggcttccgcgaccgcgcccgcagaatgttcgcggactatgacgccctcttcgattcccgcgagcgtgcctcttattcggccttcacgcggaccatccaagatccggatcagcgagccgcgctacggagtgatattgcctgtgtcgcagagggtttgcctgatctcgaccccgggctgcgtgaggtcatgaggaacttcttcaagctcgtgtctcagcagatcgcggaggtctcccgcatcgaacagcgctgcgcacagcgcatccggcggttcttcgccgccggcaccacggagcaggctcgtggccgtgcgcgacagctcaatgacgcgctggcggccgggcacgctctactcaaggtatcgacggcggactctccgatcgacgccgagctaccgatcgggcgttccgccgcagcggcgatcggcgcgctgtctttcaccatcaaggacaccgggccgccggtgctcgcacaggacgccccgtcggggccgctggatttgagcgggttctcggcgctggccacccaggtggatatggccgcattggccgatacggtcaacagtgctattgccggtggcccagtttccttgcccgacatgatctctcatgtcgaggccccctaccttggtgatgtgatcgtgttgtggtcgctggccctcaagcaggacaacactgccgaccgcgaatcggtaaaggtgaagttccggtccctcgacggacaggaccgggtgatggaggtacctcagttgatgttccgtgaaccggtgctggccaccctcgaagaggagggatcgacactgtga

SEQ ID NO: 46937 - DNA, 750 bp, Mycobacterium abscessus; identical to SEQ ID NO: 41998

SEQ ID NO: 46938 - DNA, 3348 bp, Mycobacterium abscessus; identical to SEQ ID NO: 44436

SEQ ID NO: 46939 - DNA, 1461 bp, Mycobacterium abscessus; identical to SEQ ID NO: 42721

SEQ ID NO: 46940 - DNA, 750 bp, Mycobacterium abscessus; identical to SEQ ID NO: 42722

SEQ ID NO: 46941 - DNA, 3348 bp, Mycobacterium abscessus; identical to SEQ ID NO: 42723

SEQ ID NO: 46942 - DNA, 1461 bp, Mycobacterium abscessus; identical to SEQ ID NO: 42721

SEQ ID NO: 46943 - DNA, 750 bp, Mycobacterium abscessus; identical to SEQ ID NO: 42722

SEQ ID NO: 46944 - DNA, 3348 bp, Mycobacterium abscessus; identical to SEQ ID NO: 42723

SEQ ID NO: 46945 - DNA, 1461 bp, Mycobacterium abscessus; identical to SEQ ID NO: 42721

SEQ ID NO: 46946 - DNA, 750 bp, Mycobacterium abscessus; identical to SEQ ID NO: 42722

SEQ ID NO: 46947 - DNA, 3348 bp, Mycobacterium abscessus; identical to SEQ ID NO: 42723

SEQ ID NO: 46948 - DNA, 1461 bp, Mycobacterium abscessus; identical to SEQ ID NO: 42721

SEQ ID NO: 46949 - DNA, 750 bp, Mycobacterium abscessus; identical to SEQ ID NO: 42722

SEQ ID NO: 46950 - DNA, 3348 bp, Mycobacterium abscessus; identical to SEQ ID NO: 42723

SEQ ID NO: 46951 - DNA, 1461 bp, Mycobacterium abscessus; identical to SEQ ID NO: 42721

SEQ ID NO: 46952 - DNA, 750 bp, Mycobacterium abscessus; identical to SEQ ID NO: 42722

SEQ ID NO: 46953 - DNA, 3348 bp, Mycobacterium abscessus; identical to SEQ ID NO: 42723

SEQ ID NO: 46954 - DNA, 1461 bp, Mycobacterium abscessus; identical to SEQ ID NO: 42721

SEQ ID NO: 46955 - DNA, 750 bp, Mycobacterium abscessus; identical to SEQ ID NO: 42722

SEQ ID NO: 46956 - DNA, 3348 bp, Mycobacterium abscessus; identical to SEQ ID NO: 42723

SEQ ID NO: 46957 - DNA, 1461 bp, Mycobacterium abscessus; identical to SEQ ID NO: 42721

SEQ ID NO: 46958 - DNA, 750 bp, Mycobacterium abscessus; identical to SEQ ID NO: 42722

SEQ ID NO: 46959 - DNA, 3348 bp, Mycobacterium abscessus; identical to SEQ ID NO: 42723

SEQ ID NO: 46960 - DNA, 1461 bp, Mycobacterium abscessus; identical to SEQ ID NO: 42721

SEQ ID NO: 46961 - DNA, 750 bp, Mycobacterium abscessus; identical to SEQ ID NO: 42722

SEQ ID NO: 46962 - DNA, 3348 bp, Mycobacterium abscessus; identical to SEQ ID NO: 42723

SEQ ID NO: 46963 - DNA, 1461 bp, Mycobacterium abscessus; identical to SEQ ID NO: 42721

SEQ ID NO: 46964 - DNA, 750 bp, Mycobacterium abscessus; identical to SEQ ID NO: 42722

SEQ ID NO: 46965 - DNA, 3348 bp, Mycobacterium abscessus; identical to SEQ ID NO: 42723

SEQ ID NO: 46966 - DNA, 1461 bp, Mycobacterium abscessus; identical to SEQ ID NO: 42721

SEQ ID NO: 46967 - DNA, 750 bp, Mycobacterium abscessus
gtgacgacacaggcttcagggaccgccctggggaacatcaatttcgacgacctgccgggtgtcgaacccgatgcctcggcaccgcgaacggccaaggggccgcgattcgacggcgacaccagtgagcttccggacaaggcctgctgggcgctgcagaacctggtggcccggcgttacctgagtaaggacggtcagcccgaactgtgggcgtcgatgatcgagcatcgcaaggtgctggccgcgcgcctgtccgaattggacctgcggctgcgggtgttcgacgatctcgaggttgcctacgccgaaccagctccgttggagaatcccagcgtgtacggcgccagggtgttgcgccgggaaccgttgggcacctacgcgtcgatcgtggcactgcatctggccaagatcgcgaggaccgcgcacgacgaacatgtattggtcagccgcgacgatattcacgaacttttcgccaacgtctcccacgacatcgaccgcgacgaggcgatgctgcgtgatcgcgttgacgaggcgatcaagcggctgtccaaggctgagattctgcagcgcacccgcgatgacgagcacagctacaccatcagcccagtcatcaacgcgctgatgtcggcgcagatgatcgaggcactgcagcgtcagtacgagcagttgcagcgcggcggcgccgcgcccgaagacgccgacggcgcagaccccaccgacgaagtagttggcgagaccgatgacgacgagtga

SEQ ID NO: 46968 - DNA, 3348 bp, Mycobacterium abscessus; identical to SEQ ID NO: 42723

SEQ ID NO: 46969 - DNA, 1461 bp, Mycobacterium abscessus; identical to SEQ ID NO: 42721

SEQ ID NO: 46970 - DNA, 750 bp, Mycobacterium abscessus; identical to SEQ ID NO: 42722

SEQ ID NO: 46971 - DNA, 3348 bp, Mycobacterium abscessus; identical to SEQ ID NO: 42723

SEQ ID NO: 46972 - DNA, 1461 bp, Mycobacterium abscessus; identical to SEQ ID NO: 44403

SEQ ID NO: 46973 - DNA, 750 bp, Mycobacterium abscessus; identical to SEQ ID NO: 41998

SEQ ID NO: 46974 - DNA, 3348 bp, Mycobacterium abscessus; identical to SEQ ID NO: 44436

SEQ ID NO: 46975 - DNA, 1461 bp, Mycobacterium abscessus; identical to SEQ ID NO: 42721

SEQ ID NO: 46976 - DNA, 750 bp, Mycobacterium abscessus; identical to SEQ ID NO: 42722

SEQ ID NO: 46977 - DNA, 3348 bp, Mycobacterium abscessus; identical to SEQ ID NO: 42723

SEQ ID NO: 46978 - DNA, 1461 bp, Mycobacterium abscessus; identical to SEQ ID NO: 42933

SEQ ID NO: 46979 - DNA, 750 bp, Mycobacterium abscessus; identical to SEQ ID NO: 42934

SEQ ID NO: 46980 - DNA, 3348 bp, Mycobacterium abscessus
atgacgacgagtgatgcagcgacacaacagttctggttgtcccggctgcaggtcatcaactggggcgtcttcgacggctatcacagcatcgagttcagccgtcgcggtacgctgatcaccggctcctccggtagcggtaaatcatctctactggatgcgatctcgctggcattcttgtcttcgaaccgccgtaacttcaacgcttcgagcgacaccaccgccgcgggttccagcatgggcaagcgtaccgtcgacaagtatgtgcggggcttgtggggagagctgaaaaacccgggggagcgccccaagcagatgttcctgcgcggcaagggtggggcctggtcggctatcgccgtcacctactccggcaccgacggtcgggtgatcaccggcctggtactcaagtggcttgccccgggctcggactcggactcgtccagccgctactacctgatcgacgcggacgccgacatccgcgatctctgcaatgcatgggccagcaagggatacgccggctcggtattcgagggcgcgggttggcgcggccacaagagcgaacgctggtacctggaacagctatacgccgccgtcggtattcagggttcctctgccgcgcagcagctgctgggcaaggccaagtcgctcaagagtgtcggcggcctggagcagttcgtacgcgagtacatgctcgatgaaccggagtcgatggcagcgatatccgaagcgctagggcagatcacaccattggtcgacgcccgtgccgccttggcgatcgcgcagcgccagcggcagacgctgggcgatatcgaacagatccaacagacgtatgccagcgatgcggcgcagttggccaccgtggacgtcgtggaccatcacaccgtgcgcgactacgtggatcagcagcgcctggcgctggcgggcccggagatcgatctgctggataccgagatcacccggctgggcggtgagtgtgacgaaatccagtcgcgccaggacattctcacgggagagcgggacaaattgctcggccggatcgccgctgccgacagcaatctggcaccactcaaaagcgagctggctcatgctcgtgcccgcgcagaagaggtgtcgcgccggcgtacggcctacgacagtgcattgtgggacctgggtcacgaagacgatatcgaatctgccgaggaattcgaggccatgcgggtggagagcctgcgggcagtcacccggatcaacgctgagctcgaagccggccacgatgcatatgtcatggccgcgggtgcgctctcgacggcacgtgaccagctgcgtgccgcatccgccgaattcaagcgggtcgagcacctgggtaccccggtgccaccggatgaggaccgcatgcgcggggagatcgcggcggcgcttgggcttaccgccaaggacctgccctacgtgtgcgaactgatggatttgcgcccagggcaggaacggtggcgcaaatctgtggagaaggtgttgcgctccaccgggctctgcctgctggtgcccgatcagcaccaccgccaggtgctgcgttacgtcaacgagaacccgatgcgtggctacctgcagatggagcgggtgattccctccggtaccccgcggcgcgccgagccgggcacgctcgccgactgtttgcgcctgaccaaccccaaccacgaatgcgccagtgccgccatgaatctggtggccggtgtcggcgactacgtgttggtcgacagccccgacgaattcagcaagcaccgccgggcggtcacagatcagggactgcgcaaggacggtgaccggcgcgcggtcaaggacgatcggcgtgaattgcgggcctcccagtacatctatcagggcaacgccggtgataagcgcgccgcgctttccgacgatgtggtcgaagcgcagcaggcggtgagtgatgccgaaaagttcatcggcgaaatggacaccaagcgcgaagagctgcgctcggaggtggtgcggtggtccaagctgcacagccagtacgagtattggagccagatcgatacggactcggccgaagctgccgtggcgcgtctgcaggaccagtacgacgcgatgctggaagccaaccccgacctgaccggattgcagcagcaggccgactcctacctcgacgagatcaagaggctctccgaacgcatcggagcattgcgcaagcaagaatccgagcatgattcgcgccggacccggctgctggatctgctggacaacctgagcccgcgtgaggtgggcgggcacacccgatcgggaatcgaggcctacgtgccccaactctcgtccagcctggatgtgttggaacccgatgcctaccgactggagctgtggcggcagatcgagaaggatcagtcggtgctgcgtgagagcgtcacccgctcacgtaacgagctgaaccggattctcaacgcgtacgaccgggacttccccgactctatccccaacgacagtgagaacttcgacgagaagatccacgactatgtcgcgctctgccgccggatcgatgaacgcgacctgcccgctgcctacgaacggatgctgcggctaatcaccgagcaggcgcccactgccgtgttgcggctgcaccagctcgccgaggaggaggcacaccgcatcaccgaccagatcgaccgtgtcaatagcggtttgggttcggtcgagttcaaccggggtacccggctgaccctgcgtgccgagccgaaggcgctcgaagcggtcggcgagctcaacgagcgtgcccggcggatatccgggcgtgccgtcgccgtttcgatgggggacgagaaggccatccacgatcagtaccaggacatcctgcaactgcgtaacctgttggccgctgagacacctgaggcgcgccagtggacgcgcgacgcgttggatgtgcgtaaccgcttcgtgttgtactgcgaggagcgcgatgccaggaccggcgaaccgatccgtacctacagcaacgcgggtgccaattccggtggagaacaagagaagttgatggcgttctgcctcgccggcgcgctgagcttcaacctggctaacccggagacgggggacaaccggccggtcttcgcgcagcttatgctcgacgaggcgttctcgaaatcggatccgcagttcgcccagcaggcgctgtccgcgttccgtaagttcggattccagctggtgatcgtggccaccgtgcagaacaccaccaccatccagccctatatcgacagcgtggtgatggtgtccaagccggacggcccgggggtgcgtccggttgcttcgacgcgcacggtgccgatcggtgagctcggtgacgtacgcaaggccgtgagcgcccgctag

SEQ ID NO: 46981 - DNA, 1461 bp, Mycobacterium abscessus; identical to SEQ ID NO: 42721

SEQ ID NO: 46982 - DNA, 750 bp, Mycobacterium abscessus; identical to SEQ ID NO: 42722

SEQ ID NO: 46983 - DNA, 3348 bp, Mycobacterium abscessus; identical to SEQ ID NO: 42723

SEQ ID NO: 46984 - DNA, 1461 bp, Mycobacterium abscessus; identical to SEQ ID NO: 42721

SEQ ID NO: 46985 - DNA, 750 bp, Mycobacterium abscessus; identical to SEQ ID NO: 42722

SEQ ID NO: 46986 - DNA, 3348 bp, Mycobacterium abscessus; identical to SEQ ID NO: 42723

SEQ ID NO: 46987 - DNA, 1461 bp, Mycobacterium abscessus; identical to SEQ ID NO: 42721

SEQ ID NO: 46988 - DNA, 750 bp, Mycobacterium abscessus; identical to SEQ ID NO: 42722

SEQ ID NO: 46989 - DNA, 3348 bp, Mycobacterium abscessus; identical to SEQ ID NO: 42723

SEQ ID NO: 46990 - DNA, 1461 bp, Mycobacterium abscessus; identical to SEQ ID NO: 42721

SEQ ID NO: 46991 - DNA, 750 bp, Mycobacterium abscessus; identical to SEQ ID NO: 42722

SEQ ID NO: 46992 - DNA, 3348 bp, Mycobacterium abscessus; identical to SEQ ID NO: 42723

SEQ ID NO: 46993 - DNA, 1461 bp, Mycobacterium abscessus; identical to SEQ ID NO: 42721

SEQ ID NO: 46994 - DNA, 750 bp, Mycobacterium abscessus; identical to SEQ ID NO: 42722

SEQ ID NO: 46995 - DNA, 3348 bp, Mycobacterium abscessus; identical to SEQ ID NO: 42723

SEQ ID NO: 46996 - DNA, 1461 bp, Mycobacterium abscessus; identical to SEQ ID NO: 42721

SEQ ID NO: 46997 - DNA, 750 bp, Mycobacterium abscessus; identical to SEQ ID NO: 42722

SEQ ID NO: 46998 - DNA, 3348 bp, Mycobacterium abscessus; identical to SEQ ID NO: 42723

SEQ ID NO: 46999 - DNA, 1461 bp, Mycobacterium abscessus; identical to SEQ ID NO: 42721

SEQ ID NO: 47000 - DNA, 750 bp, Mycobacterium abscessus; identical to SEQ ID NO: 42722

SEQ ID NO: 47001 - DNA, 3348 bp, Mycobacterium abscessus; identical to SEQ ID NO: 42723

SEQ ID NO: 47002 - DNA, 1461 bp, Mycobacterium abscessus; identical to SEQ ID NO: 42721

SEQ ID NO: 47003 - DNA, 750 bp, Mycobacterium abscessus; identical to SEQ ID NO: 42722

SEQ ID NO: 47004 - DNA, 3348 bp, Mycobacterium abscessus; identical to SEQ ID NO: 42723

SEQ ID NO: 47005 - DNA, 1461 bp, Mycobacterium abscessus; identical to SEQ ID NO: 42721

SEQ ID NO: 47006 - DNA, 750 bp, Mycobacterium abscessus; identical to SEQ ID NO: 42722

SEQ ID NO: 47007 - DNA, 3336 bp, Mycobacterium abscessus
atgacgacgagtgatgcagcgacacaacagttctggttgtcccggctgcaggtcatcaactggggcgtcttcgacggctatcacagcatcgagttcagccgtcgcggtacgctgatcaccggctcctccggtagcggtaaatcatctctgctggatgcgatctcgctggcattcttgtcttcgaaccgccgtaacttcaacgcctctagcgacaccaccgccgcgggttccagcatgggcaagcgcaccgtcgacaagtacgtgcggggcctgtggggagagctgaagaacccgggggagcgccccaagcagatgttcctgcgcggcaagggcggtgcctggtcggctatcgccgtcacctactccggcaccgacggtcgggtgatcaccggcctggtactcaagtggcttgccccgggctcggattcggactcgtccagccgctactacctgatcgatgcggacgccgacatccgtgatctctgcaatgcgtgggccagcaagggatacgccggctcggtgttcgagggcgcgggttggcgcggccacaagagcgaacgctggtacctggaacagctatacgccgccgtcggtattcagggttcctctgccgcgcagcagctgctgggcaaggccaagtcgctcaagagtgtcggcggcctggagcagttcgtacgcgagtacatgctcgatgaaccggagtcgatggcagcgatatccgaagcgctagggcagatcacgccattggtcgacgcccgtgccgccttggcgatcgcgcagcgccagcggcagaccctgggcgatatcgaacagatccaacagacgtacgccagcgatgcggcgcagttggccaccgtggacgtcgtggaccatcacaccgtgcgcgactacgtggatcagcagcgcctggcgctggcgggcccggagatcgatctgctcgacaccgagatcacccggctgggtggtgagtgtgacgaaatccagtcgcgccaggacattctcacgggagagcgggacaaattgctcggccggatcgctgccgccgacagcaatctggcgccactcaaaagcgagctggctcatgctcgtgcccgcgcagaagaggtgtcgcgccggcgtacggcctacgacagtgcgttgtgggacctgggtcacgaagacgatatcgaatccgccgaggaattcgaggccatgcgggtggagagcctgcgggcagtcacccggatcaacgctgagctcgaagccggccacgatgcatatgtcatggccgcgggtgcgctctcgacggcacgtgatcagctgcgtgctgcatccgccgaattcaagcgggtcgagcacctgggtaccccggtgccgccggatgaggaccgcatgcgcggggagatcgccgcggcgcttgggcttaccgccaaggacctgccctacgtgtgcgagctgatggatctgcgcccagggcaggaacggtggcgcaaatctgtggagaaggtgttgcgctccaccgggctctgcctgctggtgcccgatcagcaccaccgccaggtgctgcgttatgtcaacgagaacccgatgcgcggctacctgcagatggagcgggtgattccctccggtaccccgcggcgcgccgagccgggcacgctcgccgactgtttgcgcctgaccaaccccaaccacgaatgcgccagtgccgccatgaatctggtggccggtgtcggcgactacgtgttggtcgacagccccgacgaattcagcaagcaccgccgggcggtcaccgatcagggactgcgcaaggacggtgaccggcgcgcggtcaaggacgatcggcgtgaattgcgggcttcccagtacatctatcagggcaacgctggcgacaagcgcgccgcgctttccgacgatgtggtcgaagcgcagcaggcggtcagtgatgccgaaaagttcatcggcgaaatggacaccaagcgcgaagagctgcgctcggaggtggtgcggtggtccaagctgcacagccaatacgagtattggagccagatcgataccgactcggccgaagccgccgtggcgcgtctacaggaccagtacgacgcgatgctggaagccaaccccgacctgaccggattgcagcagcaggccgactcctacctcgacgagatcaagaggctctccgaacgcatcggagcattgcgcaagcaagaatccgaacatgattcgcgccggacccggttgctggatctgctggacaacctgaacccgcgtgaggtgggcgggcacacccgatcgggaatcgaggcctatgtgccccaactctcgtccagcctggatgtgttggaacccgacgcctaccgactggagctgtggcggcagatcgagaaggatcagtcggtgctgcgtgagagcgtcacccgctcgcgcaacgagctgaaccggattctcaacgcgtacgaccgggacttccccgactctatccccaacgacagtgagaacttcgacgagaagatccacgactatgtcgcactctgccgcaggatcgatgaacgcgacctgcccgccgcctacgaacggatgctgcggctgatcaccgagcaggcgcccactgccgtgttgcggctgcaccagctcgccgaggaggaggcacaccgcatcaccgaccagatcgaccgtgtcaatagcggtttgggttcggtcgagttcaaccggggtacccggctgaccctgcgtgccgagccgaaggcgctcgaagcggtgggcgagctcaacgagcgtgcccggcggatatccgggcgtgccgtcgccgtttcgatgggggacgagaaggccatccacgaccagtaccaggacatcctgcaactgcgtaacctgttggccgctgagacacctgaggcgcgccagtggacgcgcgacgcgttggatgtgcgtaaccgcttcgtgttgtactgcgaggagcgcgatgccaggaccggcgaaccgatccgtacctacagcaacgcgggtgcgaattccggtggagaacaagagaagttgatggcgttctgcctcgccggcgcgctgagcttcaacctggccaacccggagacgggggacaaccggccggtcttcgcgcagcttatgctcgacgaggcgttctcgaaatcggatccgcagttcgcccagcaggcgctgtccgcgttccgtaagttcggattccagctggtgatcgtggccaccgtgcagaacaccaccaccatccagccctatatcgacagcgtggtgatggtgtccaagccggacggcccggggggcgtccggttgcttcgacgcgcacggtgccgatcggtgaactcggtgacgtacgcaaggccgtga

SEQ ID NO: 47008 - DNA, 1461 bp, Mycobacterium abscessus; identical to SEQ ID NO: 44403

SEQ ID NO: 47009 - DNA, 750 bp, Mycobacterium abscessus; identical to SEQ ID NO: 41998

SEQ ID NO: 47010 - DNA, 3348 bp, Mycobacterium abscessus; identical to SEQ ID NO: 44436

SEQ ID NO: 47011 - DNA, 1461 bp, Mycobacterium abscessus; identical to SEQ ID NO: 42721

SEQ ID NO: 47012 - DNA, 750 bp, Mycobacterium abscessus; identical to SEQ ID NO: 42722

SEQ ID NO: 47013 - DNA, 3348 bp, Mycobacterium abscessus; identical to SEQ ID NO: 42723

SEQ ID NO: 47014 - DNA, 1461 bp, Mycobacterium abscessus; identical to SEQ ID NO: 44403

SEQ ID NO: 47015 - DNA, 750 bp, Mycobacterium abscessus; identical to SEQ ID NO: 41998

SEQ ID NO: 47016 - DNA, 3348 bp, Mycobacterium abscessus; identical to SEQ ID NO: 44436

SEQ ID NO: 47017 - DNA, 1461 bp, Mycobacterium abscessus; identical to SEQ ID NO: 44403

SEQ ID NO: 47018 - DNA, 750 bp, Mycobacterium abscessus; identical to SEQ ID NO: 41998

SEQ ID NO: 47019 - DNA, 3348 bp, Mycobacterium abscessus; identical to SEQ ID NO: 44436

SEQ ID NO: 47020 - DNA, 1461 bp, Mycobacterium abscessus; identical to SEQ ID NO: 42721

SEQ ID NO: 47021 - DNA, 750 bp, Mycobacterium abscessus; identical to SEQ ID NO: 42722

SEQ ID NO: 47022 - DNA, 3348 bp, Mycobacterium abscessus; identical to SEQ ID NO: 42723

SEQ ID NO: 47023 - DNA, 1461 bp, Mycobacterium abscessus; identical to SEQ ID NO: 41997

SEQ ID NO: 47024 - DNA, 750 bp, Mycobacterium abscessus; identical to SEQ ID NO: 41998

SEQ ID NO: 47025 - DNA, 3348 bp, Mycobacterium abscessus; identical to SEQ ID NO: 41999

SEQ ID NO: 47026 - DNA, 1461 bp, Mycobacterium abscessus; identical to SEQ ID NO: 42721

SEQ ID NO: 47027 - DNA, 750 bp, Mycobacterium abscessus; identical to SEQ ID NO: 42722

SEQ ID NO: 47028 - DNA, 3348 bp, Mycobacterium abscessus; identical to SEQ ID NO: 42723

SEQ ID NO: 47029 - DNA, 1461 bp, Mycobacterium abscessus; identical to SEQ ID NO: 42721

SEQ ID NO: 47030 - DNA, 750 bp, Mycobacterium abscessus; identical to SEQ ID NO: 42722

SEQ ID NO: 47031 - DNA, 3348 bp, Mycobacterium abscessus; identical to SEQ ID NO: 42723

SEQ ID NO: 47032 - DNA, 1461 bp, Mycobacterium abscessus; identical to SEQ ID NO: 46767

SEQ ID NO: 47033 - DNA, 750 bp, Mycobacterium abscessus; identical to SEQ ID NO: 42934

SEQ ID NO: 47034 - DNA, 3348 bp, Mycobacterium abscessus; identical to SEQ ID NO: 42935

SEQ ID NO: 47035 - DNA, 1461 bp, Mycobacterium abscessus; identical to SEQ ID NO: 42721

SEQ ID NO: 47036 - DNA, 750 bp, Mycobacterium abscessus; identical to SEQ ID NO: 42722

SEQ ID NO: 47037 - DNA, 3348 bp, Mycobacterium abscessus; identical to SEQ ID NO: 42723

SEQ ID NO: 47038 - DNA, 1461 bp, Mycobacterium abscessus; identical to SEQ ID NO: 42721

SEQ ID NO: 47039 - DNA, 750 bp, Mycobacterium abscessus; identical to SEQ ID NO: 42722

SEQ ID NO: 47040 - DNA, 3348 bp, Mycobacterium abscessus; identical to SEQ ID NO: 42723

SEQ ID NO: 47041 - DNA, 1461 bp, Mycobacterium abscessus; identical to SEQ ID NO: 42721

SEQ ID NO: 47042 - DNA, 750 bp, Mycobacterium abscessus; identical to SEQ ID NO: 42722

SEQ ID NO: 47043 - DNA, 3348 bp, Mycobacterium abscessus; identical to SEQ ID NO: 42723

SEQ ID NO: 47044 - DNA, 1461 bp, Mycobacterium abscessus; identical to SEQ ID NO: 44403

SEQ ID NO: 47045 - DNA, 750 bp, Mycobacterium abscessus; identical to SEQ ID NO: 41998

SEQ ID NO: 47046 - DNA, 3348 bp, Mycobacterium abscessus; identical to SEQ ID NO: 44436

SEQ ID NO: 47047 - DNA, 1461 bp, Mycobacterium abscessus; identical to SEQ ID NO: 42721

SEQ ID NO: 47048 - DNA, 750 bp, Mycobacterium abscessus; identical to SEQ ID NO: 42722

SEQ ID NO: 47049 - DNA, 3348 bp, Mycobacterium abscessus; identical to SEQ ID NO: 42723

SEQ ID NO: 47050 - DNA, 1461 bp, Mycobacterium abscessus; identical to SEQ ID NO: 42721

SEQ ID NO: 47051 - DNA, 750 bp, Mycobacterium abscessus; identical to SEQ ID NO: 42722

SEQ ID NO: 47052 - DNA, 3348 bp, Mycobacterium abscessus; identical to SEQ ID NO: 42723

SEQ ID NO: 47053 - DNA, 1461 bp, Mycobacterium abscessus; identical to SEQ ID NO: 42721

SEQ ID NO: 47054 - DNA, 750 bp, Mycobacterium abscessus; identical to SEQ ID NO: 42722

SEQ ID NO: 47055 - DNA, 3348 bp, Mycobacterium abscessus; identical to SEQ ID NO: 42723

SEQ ID NO: 47056 - DNA, 1461 bp, Mycobacterium abscessus; identical to SEQ ID NO: 42721

SEQ ID NO: 47057 - DNA, 750 bp, Mycobacterium abscessus; identical to SEQ ID NO: 42722

SEQ ID NO: 47058 - DNA, 3348 bp, Mycobacterium abscessus; identical to SEQ ID NO: 42723

SEQ ID NO: 47059 - DNA, 1461 bp, Mycobacterium abscessus; identical to SEQ ID NO: 42933

SEQ ID NO: 47060 - DNA, 750 bp, Mycobacterium abscessus; identical to SEQ ID NO: 42934

SEQ ID NO: 47061 - DNA, 3348 bp, Mycobacterium abscessus; identical to SEQ ID NO: 42935

SEQ ID NO: 47062 - DNA, 1461 bp, Mycobacterium abscessus; identical to SEQ ID NO: 42721

SEQ ID NO: 47063 - DNA, 750 bp, Mycobacterium abscessus; identical to SEQ ID NO: 42722

SEQ ID NO: 47064 - DNA, 3348 bp, Mycobacterium abscessus; identical to SEQ ID NO: 42723

SEQ ID NO: 47065 - DNA, 1461 bp, Mycobacterium abscessus; identical to SEQ ID NO: 44403

SEQ ID NO: 47066 - DNA, 750 bp, Mycobacterium abscessus; identical to SEQ ID NO: 41998

SEQ ID NO: 47067 - DNA, 3348 bp, Mycobacterium abscessus; identical to SEQ ID NO: 44436

SEQ ID NO: 47068 - DNA, 1461 bp, Mycobacterium abscessus; identical to SEQ ID NO: 46758

SEQ ID NO: 47069 - DNA, 750 bp, Mycobacterium abscessus; identical to SEQ ID NO: 46759

SEQ ID NO: 47070 - DNA, 3348 bp, Mycobacterium abscessus; identical to SEQ ID NO: 46760

SEQ ID NO: 47071 - DNA, 1461 bp, Mycobacterium abscessus; identical to SEQ ID NO: 42721

SEQ ID NO: 47072 - DNA, 750 bp, Mycobacterium abscessus; identical to SEQ ID NO: 42722

SEQ ID NO: 47073 - DNA, 3348 bp, Mycobacterium abscessus; identical to SEQ ID NO: 42723

SEQ ID NO: 47074 - DNA, 1461 bp, Mycobacterium abscessus; identical to SEQ ID NO: 44403

SEQ ID NO: 47075 - DNA, 750 bp, Mycobacterium abscessus; identical to SEQ ID NO: 41998

SEQ ID NO: 47076 - DNA, 3348 bp, Mycobacterium abscessus; identical to SEQ ID NO: 44436

SEQ ID NO: 47077 - DNA, 1461 bp, Mycobacterium abscessus; identical to SEQ ID NO: 42721

SEQ ID NO: 47078 - DNA, 750 bp, Mycobacterium abscessus; identical to SEQ ID NO: 42722

SEQ ID NO: 47079 - DNA, 3348 bp, Mycobacterium abscessus; identical to SEQ ID NO: 42723

SEQ ID NO: 47080 - DNA, 1461 bp, Mycobacterium abscessus; identical to SEQ ID NO: 44403

SEQ ID NO: 47081 - DNA, 750 bp, Mycobacterium abscessus; identical to SEQ ID NO: 41998

SEQ ID NO: 47082 - DNA, 3348 bp, Mycobacterium abscessus; identical to SEQ ID NO: 44436

SEQ ID NO: 47083 - DNA, 1461 bp, Mycobacterium abscessus; identical to SEQ ID NO: 42721

SEQ ID NO: 47084 - DNA, 750 bp, Mycobacterium abscessus; identical to SEQ ID NO: 42722

SEQ ID NO: 47085 - DNA, 3348 bp, Mycobacterium abscessus; identical to SEQ ID NO: 42723

SEQ ID NO: 47086 - DNA, 1461 bp, Mycobacterium abscessus; identical to SEQ ID NO: 42721

SEQ ID NO: 47087 - DNA, 750 bp, Mycobacterium abscessus; identical to SEQ ID NO: 42722

SEQ ID NO: 47088 - DNA, 3348 bp, Mycobacterium abscessus; identical to SEQ ID NO: 42723

SEQ ID NO: 47089 - DNA, 1461 bp, Mycobacterium abscessus; identical to SEQ ID NO: 42721

SEQ ID NO: 47090 - DNA, 750 bp, Mycobacterium abscessus; identical to SEQ ID NO: 42722

SEQ ID NO: 47091 - DNA, 3348 bp, Mycobacterium abscessus; identical to SEQ ID NO: 42723

SEQ ID NO: 47092 - DNA, 1461 bp, Mycobacterium abscessus; identical to SEQ ID NO: 44403

SEQ ID NO: 47093 - DNA, 750 bp, Mycobacterium abscessus; identical to SEQ ID NO: 41998

SEQ ID NO: 47094 - DNA, 3348 bp, Mycobacterium abscessus; identical to SEQ ID NO: 44436

SEQ ID NO: 47095 - DNA, 1461 bp, Mycobacterium abscessus; identical to SEQ ID NO: 42721

SEQ ID NO: 47096 - DNA, 750 bp, Mycobacterium abscessus; identical to SEQ ID NO: 42722

SEQ ID NO: 47097 - DNA, 3348 bp, Mycobacterium abscessus; identical to SEQ ID NO: 42723

SEQ ID NO: 47098 - DNA, 1461 bp, Mycobacterium abscessus; identical to SEQ ID NO: 42933

SEQ ID NO: 47099 - DNA, 750 bp, Mycobacterium abscessus; identical to SEQ ID NO: 42934

SEQ ID NO: 47100 - DNA, 3348 bp, Mycobacterium abscessus; identical to SEQ ID NO: 42935

SEQ ID NO: 47101 - DNA, 1461 bp, Mycobacterium abscessus; identical to SEQ ID NO: 42721

SEQ ID NO: 47102 - DNA, 750 bp, Mycobacterium abscessus; identical to SEQ ID NO: 42722

SEQ ID NO: 47103 - DNA, 3348 bp, Mycobacterium abscessus; identical to SEQ ID NO: 42723

SEQ ID NO: 47104 - DNA, 1461 bp, Mycobacterium abscessus; identical to SEQ ID NO: 42933

SEQ ID NO: 47105 - DNA, 750 bp, Mycobacterium abscessus; identical to SEQ ID NO: 42934

SEQ ID NO: 47106 - DNA, 3348 bp, Mycobacterium abscessus; identical to SEQ ID NO: 42935

SEQ ID NO: 47107 - DNA, 1461 bp, Mycobacterium abscessus; identical to SEQ ID NO: 42933

SEQ ID NO: 47108 - DNA, 750 bp, Mycobacterium abscessus; identical to SEQ ID NO: 42934

SEQ ID NO: 47109 - DNA, 3348 bp, Mycobacterium abscessus; identical to SEQ ID NO: 42935

SEQ ID NO: 47110 - DNA, 1461 bp, Mycobacterium abscessus; identical to SEQ ID NO: 42721

SEQ ID NO: 47111 - DNA, 750 bp, Mycobacterium abscessus; identical to SEQ ID NO: 42722

SEQ ID NO: 47112 - DNA, 3348 bp, Mycobacterium abscessus; identical to SEQ ID NO: 42723

SEQ ID NO: 47113 - DNA, 1461 bp, Mycobacterium abscessus
atgaatgatctgaccgtcgaagagctgttcgcgcacaacgatgacgtgcagaaatcccgtgcggtccgcctgttggccgccaagaatctggcgccctacatcacgctcatggaacgccacctggaccgcagcgccaaagtctccgaacctcagctggtagccaagctggaccgggacctgagcgccgtcgggctgggagaacagtccgggctggctctcatcaagagctgggcgagcgacgggtggctgcaccgagcgtcggacggcaccggccccgatgccgagaacgtctgctcgctgaccgaggacgcgcgcagcgcgctggcctttgtgcgccgcctgcgccgcgctgacacggtggccacgggtgggtccatcgccggtatcgcggcaggcctcaaacgggtggccacccagctggacggcgacccgtcacgcctgcgcgccgacatcgaagcccagatcgcagaactgcagacccagctgcatgccatcgacgacggataccgcccggaaccggatatcgtcgatcttgaggacgagacccgggccatcgcctatcagatggaacaggtgatcaccgacatcgtccgctacggcagcatgcagaatgagatcaccgccggactcatcgacgccgccgaggactccgactccggcttccgcgaccgcgcccgcagaatgttcgcggactacgacgccctcttcgattcccgcgaacgcgcctcatattcggccttcacgcggaccatccaggatcctgatcagcgagccgcgctacggagcgatattgcctgtgtcgcagagggtttgcccgatctcgacccgggactgcgcgaggtcatgaagaacttcttcaagctcgtttctcagcagatcacggaggtctcccgcatcgaacagcgctgcgcacagcgcatccggcggttcttcgccgccggcaccacggagcaggctcgtggccgtgcgcgacagctcaacgacgctctggcagccgggcacgctctactcaaggtgtcgacggcggactctccgatcgacgccgagctaccgattgggcgttccgctgcagcggccatcggcgcgctgtctttcaccatcaaggacaccgcgccgccggtgctcgcgcaggacgctccgtcggggccgctggatttgagcggattctcggcgctggccacccaggtggacatggcggcattggccgatacggtcaacagtgctgttgccggtggaccagtttccttgcccgacatgatctctcatgtcgaggccccctacctgggtgatgtgatcgtgttgtggtcactggccctcaagcaggacaacactgccgaccgcgaatcggtaaaggtgaagttccggtcccttgacggacaggaccgggtgatggaggtacctcagttgatgttccgtgaaccggtgctggccaccctcgaagaggagggatcgacactatga

SEQ ID NO: 47114 - DNA, 750 bp, Mycobacterium abscessus; identical to SEQ ID NO: 42790

SEQ ID NO: 47115 - DNA, 3348 bp, Mycobacterium abscessus
atgacgacgagtgacgcagcgacacaacagttctggttgtcccggctgcaggtcatcaactggggcgtcttcgacggctatcacagcatcgagttcagccgtcgcggtacgctgatcaccggctcctccggtagcggtaaatcatctctgctggatgcgatctcgttggcatttttgtcttcgaatcgccgtaacttcaacgcctcgagcgacaccaccgccgcgggttccagcatgggcaagcgcaccgtcgacaagtatgtgcggggcttgtggggagagctgaagaacccgggggagcgccccaagcagatgttcctgcgcggcaagggtggggcctggtcggctatcgccgtcacctactccggcaccgacggtcgggtgatcaccggcctggtactcaagtggcttgccccgggctcggatacggactcgtccagccgctactacctgatcgatgccgacgccgacatccgtgatctctgcaatgcatgggccagcaagggatacgccggctcggtgttcgagggcgcgggttggcgcggccacaagagcgaacgctggtacctggaacagctatacgccgccgtcggtattcagggttcctctgccgcgcagcagctgctgggcaaggccaagtcgctcaagagtgtcggcggtctggagcagttcgtacgcgagtacatgctcgatgaaccggagtcgatggcagcgatatccgaagcgctagggcagatcacgccattggtcgacgcccgtgccgccttggcgatcgcgcagcgccagcggcagacgctgggcgatatcgaacagatccaacagacgtacgccagcgatgcggcgcagttggccaccgtggacgtcgtggaccatcacaccgtgcgcgactacgtggatcagcagcgcctggcgctggcgggcccggagatcgatctgctcgataccgagatcacccggctgggcggtgagtgtgacgaaatccagtcgcgccaggacattctcacgggagagcgggacaaattgctcggccggatcgccgccgccgacagcaatctggcgccactcaaaagcgagctggctcatgctcgtgcccgcgcagaagaggtgtcgcgccggcgcacggcctacgacagtgcattgtgggacctgggtcatgaagacgatatcgaatctgccgaggaattcgaggccatgcgggtggagagcctgcgggcagtcacccggatcaacgctgagctcgaagccggccacgatgcatatgtcatggccgcgggtgcgctctcgacggcacgtgaccagctgcgtgccgcatccgccgaattcaagcgggtcgagcacctgggtaccccggtgccgccggatgaggaccgcatgcgcggggagatcgccgcggcgcttgggcttacggccaaggacctgccctatgtatgcgagctgatggatctgcgcccggggcaggaacggtggcgcagatctgtggagaaggtgttgcgctccaccgggctctgcctgctggtgcccgatcagcaccatcgtcaggtgctgcgttacgtcaacgagaacccgatgcgcggctacctgcagatagagcgggtgattccctccggtaccccgcggcgcgccgagccgggcacgctcgccgactgtttgcgcctgaccaaccccaaccacgaatgcgtcagtgccgccatgaatctggtggccggtgtcggcgactacgtgttggtggacagccccgacgaattcagcaagcaccgccgggcggtcaccgatcagggactgcgcaaggacggtgaccggcgcgcggtcaaggacgatcggcgtgaattgcgggcctcccagtacatctatcagggcaacgccggtgacaagcgcgccgcgctttccgacgatgtggtcgaagcgcagcaggcggtcagtgatgccgaaaagttcatcggcgaaatggacaccaagcgcgaagagctgcgctcggaggtggtgcggtggtccaagttgcacagccagtacgagtattggagccagatcgatacggactcggccgaggcggccgtggcgcgtctacaggaccagtacgacgcgatgctggaagccaatcccgacctgaccggattgcagcagcaggccgactcctacctcgacgagatcaagaagctctccgaacgcatcggagcattgcgcaagcaagaatccgagcatgattcgcgccggacccggctgctggatctgctggacaacctgaacccgcgtgaggtgggcgggcatacccgatcgggaatcgaggcctacgtgccccaactctcgtccagcctggatgtgttggaacccgacgcctaccgacttgagctgtggcggcagatcgagaaggaccagtcggtgctgcgtgagagcgtcacccgctcacgcaacgagctgaaccggattctcaacgcgtacgaccgggatttccccgactctatccccaacgacagtgagaacttcgacgagaagatccacgactatgtcgcactctgccgccggatcgatgaacgcgacctgcccgctgcctacgaacggatgctgcgactgatcaccgagcaggcgcccactgccgtgttgcggctgcaccagctcgccgaggaggaggcacaccgcatcaccgaccagatcgaccgtgtcaatagcggtttgggttcggtcgagttcaaccgcggtacccggctgaccctgcgtgccgagccgaaggcgctcgaagcggtgggcgagctcaacgagcgtgcccggcggatatccgggcgtgccgtcgccgtttcgatgggggacgagaaggccatccacgaccagtaccaggacatcctgcaactgcgtaacctgttggccgccgagacacctgaggcgcgccagtggacgcgcgacgcgttggatgtgcgtaaccgcttcgtgttgtactgcgaggagcgcgatgccgggaccggcgaaccgatccgcacctacagcaacgcgggtgcgaattccggtggagaacaagagaagttgatggcgttctgcctcgccggcgcgctgagcttcaacctggccaacccggagacgggtgacaaccggccggtcttcgcgcagcttatgctcgacgaggcgttctcgaaatcggatccgcagttcgcccagcaggcgctgtctgcgttccgcaagttcgggttccagctggtgatcgtggccaccgtgcagaacaccaccaccatccagccctatatcgacagcgtggtgatggtgtccaagccggacggcccgggggtgcgtccggttgcctcgacgcgcacggtgccgatcggtgagctcggtgatgtacgcaaggccgtgagcgcccgctag

SEQ ID NO: 47116 - DNA, 1461 bp, Mycobacterium abscessus; identical to SEQ ID NO: 42721

SEQ ID NO: 47117 - DNA, 750 bp, Mycobacterium abscessus; identical to SEQ ID NO: 42722

SEQ ID NO: 47118 - DNA, 3348 bp, Mycobacterium abscessus; identical to SEQ ID NO: 42723

SEQ ID NO: 47119 - DNA, 1461 bp, Mycobacterium abscessus; identical to SEQ ID NO: 46767

SEQ ID NO: 47120 - DNA, 750 bp, Mycobacterium abscessus; identical to SEQ ID NO: 42934

SEQ ID NO: 47121 - DNA, 3348 bp, Mycobacterium abscessus; identical to SEQ ID NO: 42935

SEQ ID NO: 47122 - DNA, 1461 bp, Mycobacterium abscessus; identical to SEQ ID NO: 42721

SEQ ID NO: 47123 - DNA, 750 bp, Mycobacterium abscessus; identical to SEQ ID NO: 42722

SEQ ID NO: 47124 - DNA, 3348 bp, Mycobacterium abscessus; identical to SEQ ID NO: 42723

SEQ ID NO: 47125 - DNA, 1461 bp, Mycobacterium abscessus; identical to SEQ ID NO: 42933

SEQ ID NO: 47126 - DNA, 750 bp, Mycobacterium abscessus; identical to SEQ ID NO: 42934

SEQ ID NO: 47127 - DNA, 3348 bp, Mycobacterium abscessus; identical to SEQ ID NO: 42935

SEQ ID NO: 47128 - DNA, 1461 bp, Mycobacterium abscessus
atgaatgatctgacagtcgaagagctgttcgcgcacaacgatgacgtgcagaaatcccgtgcggtccgcctgttggccgccaagaatctggcgccctacatcacgcttatggaacgccacctggaccgcagcgccaaagtctccgaacctcagctggtggccaagctggaccgggacctgagcgccgtcgggctgggagaacagtccgggctggcccttatcaagagctgggcgagcgacgggtggctgcaccgagcgtcggacggcaccggccccgatgccgagaacgtctgctcgctgaccgaggacgcgcgcagcgcgctggcctttgtgcgccgcctgcgccgtgctgacacggtggccacgggcgggtccatcgccggtatcgcggcaggcctcaaacgggtggccacccagctggacggcgacccgtcacgcctgcgcgccgacatcgaggcccagatcgcagaactgcagacccagctgcacgccatcgacgacggataccgtccggaaccggatatcgtcgatcttgaggacgagacccgggccatcgcctatcagatggaacaggtgatcaccgacatcgtccgctacggcagcatgcagaacgagatcaccgccggactcatcgacgccgccgaggactccgactccggcttccgcgatcgcgcccgcagaatgttcgcggactatgacgcccttttcgattcccgcgaacgtgcctcttattcggccttcacgcggaccatccaagatccggatcagcgagccgcgctacggagtgatatcgcctgtgtcgcagatggtttgcccgatcttgaccccgggctgcgcgaggtcatgagaaacttcttcaagctcgtgtctcagcagatcgcggaggtctcccgcatcgaacagcgctgcgcacagcgcatccggcgattcttcgctgccggcaccacggagcaggctcgtggccgtgcgcgacagctgaatgacgcgctggcggccgggcacgctctactcaagatgtcgacggcggactctccgatcgacgccgagctaccgatcgggcgttccgccgcagcggcgatcggcgcgctgtctttcaccatcaaggacaccgcgccgccggtgctcgcacaggacgccccgtcggggccgctggatttgagcgggttctcggcgctggccacccaggtggatatggccgcattggccgatacggtcaacagtgctattgccggtggcccagtttccttgcccgacatgatctctcatgtcgaggccccctaccttggtgatgtgatcgtgttgtggtcactggccctcaagcaggacaacactgccgaccgtgaatcggtaaaggtgaagttccggtccctcgacggacaagaccgggtgatggaggtacctcagttgatgttccgtgaaccggtgctggccaccctcgaagaggagggatcgacactgtga

SEQ ID NO: 47129 - DNA, 750 bp, Mycobacterium abscessus; identical to SEQ ID NO: 42793

SEQ ID NO: 47130 - DNA, 3348 bp, Mycobacterium abscessus; identical to SEQ ID NO: 43029

SEQ ID NO: 47131 - DNA, 1461 bp, Mycobacterium abscessus; identical to SEQ ID NO: 42721

SEQ ID NO: 47132 - DNA, 750 bp, Mycobacterium abscessus; identical to SEQ ID NO: 42722

SEQ ID NO: 47133 - DNA, 3348 bp, Mycobacterium abscessus; identical to SEQ ID NO: 42723

SEQ ID NO: 47134 - DNA, 1461 bp, Mycobacterium abscessus; identical to SEQ ID NO: 42721

SEQ ID NO: 47135 - DNA, 750 bp, Mycobacterium abscessus; identical to SEQ ID NO: 42722

SEQ ID NO: 47136 - DNA, 3348 bp, Mycobacterium abscessus; identical to SEQ ID NO: 42723

SEQ ID NO: 47137 - DNA, 1461 bp, Mycobacterium abscessus; identical to SEQ ID NO: 42721

SEQ ID NO: 47138 - DNA, 750 bp, Mycobacterium abscessus; identical to SEQ ID NO: 42722

SEQ ID NO: 47139 - DNA, 3348 bp, Mycobacterium abscessus; identical to SEQ ID NO: 42723

SEQ ID NO: 47140 - DNA, 1461 bp, Mycobacterium abscessus; identical to SEQ ID NO: 46758

SEQ ID NO: 47141 - DNA, 750 bp, Mycobacterium abscessus; identical to SEQ ID NO: 46759

SEQ ID NO: 47142 - DNA, 3348 bp, Mycobacterium abscessus; identical to SEQ ID NO: 46760

SEQ ID NO: 47143 - DNA, 1461 bp, Mycobacterium abscessus; identical to SEQ ID NO: 46758

SEQ ID NO: 47144 - DNA, 750 bp, Mycobacterium abscessus; identical to SEQ ID NO: 46759

SEQ ID NO: 47145 - DNA, 3348 bp, Mycobacterium abscessus; identical to SEQ ID NO: 46760

SEQ ID NO: 47146 - DNA, 1461 bp, Mycobacterium abscessus; identical to SEQ ID NO: 44403

SEQ ID NO: 47147 - DNA, 750 bp, Mycobacterium abscessus; identical to SEQ ID NO: 41998

SEQ ID NO: 47148 - DNA, 3348 bp, Mycobacterium abscessus; identical to SEQ ID NO: 44436

SEQ ID NO: 47149 - DNA, 1461 bp, Mycobacterium abscessus; identical to SEQ ID NO: 42721

SEQ ID NO: 47150 - DNA, 750 bp, Mycobacterium abscessus; identical to SEQ ID NO: 42722

SEQ ID NO: 47151 - DNA, 3348 bp, Mycobacterium abscessus; identical to SEQ ID NO: 42723

SEQ ID NO: 47152 - DNA, 1461 bp, Mycobacterium abscessus; identical to SEQ ID NO: 42721

SEQ ID NO: 47153 - DNA, 750 bp, Mycobacterium abscessus; identical to SEQ ID NO: 42722

SEQ ID NO: 47154 - DNA, 3348 bp, Mycobacterium abscessus; identical to SEQ ID NO: 42723

SEQ ID NO: 47155 - DNA, 1461 bp, Mycobacterium abscessus; identical to SEQ ID NO: 42721

SEQ ID NO: 47156 - DNA, 750 bp, Mycobacterium abscessus; identical to SEQ ID NO: 42722

SEQ ID NO: 47157 - DNA, 3348 bp, Mycobacterium abscessus; identical to SEQ ID NO: 42723

SEQ ID NO: 47158 - DNA, 1461 bp, Mycobacterium abscessus; identical to SEQ ID NO: 42721

SEQ ID NO: 47159 - DNA, 750 bp, Mycobacterium abscessus; identical to SEQ ID NO: 42722

SEQ ID NO: 47160 - DNA, 3348 bp, Mycobacterium abscessus; identical to SEQ ID NO: 42723

SEQ ID NO: 47161 - DNA, 1461 bp, Mycobacterium abscessus; identical to SEQ ID NO: 42721

SEQ ID NO: 47162 - DNA, 750 bp, Mycobacterium abscessus; identical to SEQ ID NO: 42722

SEQ ID NO: 47163 - DNA, 3348 bp, Mycobacterium abscessus; identical to SEQ ID NO: 42723

SEQ ID NO: 47164 - DNA, 1461 bp, Mycobacterium abscessus; identical to SEQ ID NO: 42721

SEQ ID NO: 47165 - DNA, 750 bp, Mycobacterium abscessus; identical to SEQ ID NO: 42722

SEQ ID NO: 47166 - DNA, 3348 bp, Mycobacterium abscessus; identical to SEQ ID NO: 42723

SEQ ID NO: 47167 - DNA, 1461 bp, Mycobacterium abscessus; identical to SEQ ID NO: 42721

SEQ ID NO: 47168 - DNA, 750 bp, Mycobacterium abscessus; identical to SEQ ID NO: 42722

SEQ ID NO: 47169 - DNA, 3348 bp, Mycobacterium abscessus; identical to SEQ ID NO: 42723

SEQ ID NO: 47170 - DNA, 1461 bp, Mycobacterium abscessus; identical to SEQ ID NO: 42721

SEQ ID NO: 47171 - DNA, 750 bp, Mycobacterium abscessus; identical to SEQ ID NO: 42722

SEQ ID NO: 47172 - DNA, 3348 bp, Mycobacterium abscessus; identical to SEQ ID NO: 42723

SEQ ID NO: 47173 - DNA, 1461 bp, Mycobacterium abscessus; identical to SEQ ID NO: 46936

SEQ ID NO: 47174 - DNA, 750 bp, Mycobacterium abscessus; identical to SEQ ID NO: 41998

SEQ ID NO: 47175 - DNA, 3348 bp, Mycobacterium abscessus; identical to SEQ ID NO: 44436

SEQ ID NO: 47176 - DNA, 1461 bp, Mycobacterium abscessus; identical to SEQ ID NO: 42721

SEQ ID NO: 47177 - DNA, 750 bp, Mycobacterium abscessus; identical to SEQ ID NO: 42722

SEQ ID NO: 47178 - DNA, 3348 bp, Mycobacterium abscessus; identical to SEQ ID NO: 42723

SEQ ID NO: 47179 - DNA, 1461 bp, Mycobacterium abscessus; identical to SEQ ID NO: 42721

SEQ ID NO: 47180 - DNA, 750 bp, Mycobacterium abscessus; identical to SEQ ID NO: 42722

SEQ ID NO: 47181 - DNA, 3348 bp, Mycobacterium abscessus; identical to SEQ ID NO: 42723

SEQ ID NO: 47182 - DNA, 1461 bp, Mycobacterium abscessus; identical to SEQ ID NO: 42721

SEQ ID NO: 47183 - DNA, 750 bp, Mycobacterium abscessus; identical to SEQ ID NO: 42722

SEQ ID NO: 47184 - DNA, 3348 bp, Mycobacterium abscessus; identical to SEQ ID NO: 42723

SEQ ID NO: 47185 - DNA, 1461 bp, Mycobacterium abscessus; identical to SEQ ID NO: 42721

SEQ ID NO: 47186 - DNA, 750 bp, Mycobacterium abscessus; identical to SEQ ID NO: 42722

SEQ ID NO: 47187 - DNA, 3348 bp, Mycobacterium abscessus; identical to SEQ ID NO: 42723

SEQ ID NO: 47188 - DNA, 1461 bp, Mycobacterium abscessus; identical to SEQ ID NO: 42721

SEQ ID NO: 47189 - DNA, 750 bp, Mycobacterium abscessus; identical to SEQ ID NO: 42722

SEQ ID NO: 47190 - DNA, 3348 bp, Mycobacterium abscessus; identical to SEQ ID NO: 42723

SEQ ID NO: 47191 - DNA, 1461 bp, Mycobacterium abscessus
atgaatgatctgacagtcgaagagctgttcgcgcacaacgatgacgtgcagaaatcccgtgcggttcgcctgttggccgccaagaatctggcgccctacatcacgctcatggaacgccacctggaccgcagcgccaaagtctccgaacctcagctggtggccaagctggaccgggacctgagcgccgtcgggctgggagaacagtccgggctggcccttatcaagagctgggcgagcgacgggtggctgcaccgagcgtcggacggcaccggccccgatgccgagaacgtctgctcgctgaccgaggacgcgcgcagcgcgctggcctttgtgcgccgcctgcgccgtgctgacacggtggccacgggcgggtcgatcgccggtatcgcggtaggcctcaaacgggtggccacccagctggacggcgacccgtcacgcctgcgcgccgacatcgaggcccagatcgcagaactgcagacccagctgcacgccatcgacgacggataccgtccggaaccggatatcgtcgatcttgaggacgagacccgggccatcgcctatcagatggaacaggtgatcaccgacatcgtccgctacggcagcatgcagaacgagatcaccgccggactcatcgacgccgccgaggactccgactccggcttccgcgatcgcgcccgcagaatgttcgcggactatgacgcccttttcgattcccgcgaacgtgcctcttattcggccttcacgcggaccatccaagatccggatcagcgagccgcgctacggagcgatatcgcctgtgtcgcagatggtttgcccgatctcgaccccgggctgcgcgaggtcatgagaaacttcttcaagctcgtgtctcagcagatcgcggaggtctcccgcatcgaacagcgctgcgcacagcgcatccggcgattcttcgccgccggcaccacggagcaggctcgtggccgtgcgcgacagctcaatgacgcgctggcggccgggcacgctctactcaagatgtcgacggcggactctccgatcgacgccgagctaccgatcgggcgttccgccgcagcggcgatcggcgcgctgtctttcaccatcaaggacaccgcgccgccggtgctcgcacaggacgccccgtcggggccgctggatttgagcgggttctcggcgctggccacccaggtggatatggccgcattggccgatacggtcaacagtgctattgccggtggcccagtttccttgcccgacatgatctctcatgtcgaggccccctaccttggtgatgtgatcgtgttgtggtcactggccctcaagcaggacaacactgccgaccgcgaatcggtaaaggtgaagttccggtccctcgacggacaagaccgggtgatggaggtacctcagttgatgttccgtgaaccggtgctggccaccctcgaagaggagggatcgacactgtga

SEQ ID NO: 47192 - DNA, 750 bp, Mycobacterium abscessus; identical to SEQ ID NO: 46774

SEQ ID NO: 47193 - DNA, 3345 bp, Mycobacterium abscessus
atgacgagtgatgcagcgacacaacagttctggttgtcccggctgcaggtcatcaactggggcgtcttcgacggctatcacagcatcgagttcagccgtcgcggtacgctgatcaccggctcctccggtagcggtaaatcatctctgctggacgcgatctcgctggcattcttgtcttcgaaccgccgtaacttcaacgcctcgagcgacaccaccgccgcgggttccagcatgggcaagcgcaccgtcgacaagtacgtgcggggcctgtggggagagctgaagaacccgggggagcgccccaagcagatgttcctgcgcggcaagggcggtgcttggtcggctatcgccgtcacctactccggcaccgacggtcgggtgatcaccggcctggtactcaagtggcttgccccgggctcggattcggactcgtccagccgctactacctgatcgatgcggacgccgacatccgtgatctctgcaatgcatgggccagcaagggatacgccggctcggtgttcgagggcgcgggttggcgcggccacaagagcgaacgctggtacctggaacagctatacgctgccgtcggtattcagggttcctctgctgcgcagcagctgctgggcaaggccaagtcgctcaagagtgtcggcggcctggagcagttcgtacgcgagtacatgctcgatgaaccggagtcgatggcagcgatatccgaagcgctagggcagatcacgccattggtcgacgcccgtgccgccttggcgatcgcgcagcgccagcggcagaccctgggcgatatcgaacagatccaacagacgtacgccagcgacgcggcgcagttggccaccgtggacgtcgtggaccatcacaccgtgcgcgactacgtggatcagcagcgcctggcgctggcgggcccggagatcgatctgctcgataccgagatcacccggctgggtggtgagtgtgacgaaatccagtcgcgccaagacattctcacgggagagcgggacaaattgctcggccggatcgctgccgccgacagcaatctggcgccactcaaaagcgagctggctcatgctcgtgcccgcgcagaagaggtgtcgcgccggcgtacggcctacgacagtgcgttgtgggacctgggtcacgaagacgatatcgaatccgccgaggaattcgaggccatgcgggtggagagcctgcgggcagtcacccggatcaacgctgagctcgaagccggccacgatgcatatgtcatggccgctggtgcgctctctactgcacgtgatcagctgcgtgccgcatccgccgaattcaagcgggtcgagcacctgggtaccccggtgccgccggatgaggaccgcatgcgcggggagatcgccgcggcgcttgggcttaccgccaaggacctgccctatgtgtgcgagctgatggatctgcgcccagggcaggaacggtggcgcaaatctgtggagaaggtgttgcgctccaccgggctctgcctgctggtgcccgatcagcaccaccgccaggtgctgcgttatgtcaacgagaacccgatgcgcggctacctgcagatggagcgggtgattccctccggtaccccgcggcgcgccgagccgggcacgctcgccgactgtttgcgcctgaccaaccccaaccacgaatgcgccagtgccgccatgaatctggtggccggtgtcggcgactacgtgttggtcgacagccccgacgaattcagcaagcaccgccgggcggtcaccgatcagggactgcgcaaggacggtgaccggcgcgcggtcaaggacgatcggcgtgaattgcgggcttcccagtacatctatcagggcaacgctggcgacaagcgcgccgcgctttccgacgatgtggtcgaagcgcagcaggcggtcagtgatgccgaaaagttcatcggcgaaatggacaccaagcgcgaagagctgcgctcggaggtggtgcggtggtccaagctgcacagccaatacgagtattggagccagatcgataccgactcggccgaagctgccgtggcgcgtctacaggaccagtacgacgcgatgctggaagccaaccccgacctgaccggattgcagcagcaggccgactcctacctcgacgagatcaagaggctctccgaacgcatcggagcattgcgcaagcaagaatccgaacatgattcgcgccggacccggttgttggatctgctggacaacctgaacccgcgtgaggtgggcgggcacacccgatcgggtatcgaggcctacgtgccccaactctcgtccagcctggatgtgttggaacccgacgcctaccggctggagctgtggcggcagatcgagaaggatcagtcggtgctgcgtgagagcgtcacccgctcgcgcaacgagctgaaccggattctcaacgcgtacgaccgggacttccccgactctatccccaacgacagtgagaacttcgacgagaagatccacgactatgtcgcactctgccgccggatcgatgaacgcgacctgcccgccgcctacgaacggatgctgcggctgatcaccgagcaggcgcccactgccgtgttgcggctgcaccagctcgccgaggaggaggcacaccgcatcaccgaccagatcgaccgtgtcaatagcggtttgggttcggtcgagttcaaccggggtacccggctgaccctgcgtgccgagccgaaggcgctcgaagcggtgggcgagctcaacgagcgtgcccggcggatatccgggcgtgccgtcgccgtttcgatgggggacgagaaggccatccacgaccagtaccaggacatcctgcaactgcgtaacctgttggccgctgagacacctgaggcgcgccagtggacgcgcgacgcgttggatgtgcgtaaccgcttcgtgttgtactgcgaggagcgcgatgccaggaccggcgaaccgatccgtacctacagcaacgcgggtgcgaattccggtggagaacaagagaagttgatggcgttctgcctcgccggcgcgctgagcttcaacctggccaacccggagacgggggacaaccggccggtcttcgcgcagcttatgctcgacgaggcgttctcgaaatcggatccgcagttcgcccagcaggcgctgtccgcgttccgtaagttcggattccagctggtgatcgtggccaccgtgcagaacaccaccaccatccagccctatatcgacagcgtggtgatggtgtccaagccggacggcccgggggtgcgtccggttgcttcgacgcgcacggtgccgatcggtgaactcggtgacgtacgcaaggccgtgagcgcccgctag

SEQ ID NO: 47194 - DNA, 1446 bp, Mycobacterium abscessus
gtggatctgactgagctattgaaggttaatcgcggccttcagaaggactctccgactcttaagttgttcgccgccgacacgttcgccgcggtgctggcgcttatggagcagcatctggatcggggtgtgaagatcgccgagactgaattggtcgcccgtttcgagcgtgatatgccggctgtcgggttgactagccagacgccggcccagttgataagtatctgggccgagcgcggttggttgcaccggattgccgacgatgtcgctcctggagcgcggcgcgtgtgctggctgagctccgaagcgcagacggttctcgatatcgcgcgccggatccgcaatgacgacagcgtcgcgacgggcggctcgattatcggaatctcggatcgattgaagcgagtggctagacaactcgacaatgaccctgaccggctgctgaacgatctcgatgaacgtatcgctgaactgcaacgccagcgcgaacaggtggcggcgggcaatcggccagagccgaactttctcgacttggaggatgaggccaaggcgatcggtatgcagatggagcacgtggtcgccgatatcggccgttacgcgaccatacagaaccggatcacgacggggcttctcagcgagctcggcgacagcgacgccgaattccgcgaccgtcaccacaagctgtttgatgactatctcgctctcgatcaatcacgtgagcaggcctcctaccaggcgtttacccgcatgattcaggatcctgcggctcagctgcggttgcgtcgcgacatcgacttggtggccgcgggcctgcccgacttggatgcaggggtgaaggatctgctgcgaggattcttgacttcggtgagtcgccagatgagcgaggtcgatcgggtgcggcagcgctgcgcgcagcgcattcggcggtttttcgccgcgggcacggcagagcagagccgcggtttcgcgcgccagctcaacgaggccatcgcggcgggccaggcgctgctgaatgtgtcgttgaccgactcgcaacttgactgtgagatcccgatcgtgacatcggaggcggagacatcgctgggggcgctggggttcaagattgtcgacccgacgccgccgccgttggcgcaggagtcggtcgaaacactcgatatcgcggggtttgcggcgttagcggcgcaggttgacgtggaagcacttgcaggggcggtgaatacggcgctggcggcggggccgatatcgcttccggaagcgcttatgttggttgatgacgcatatctgggggagctactggtgctgtggacttgggcgcaagcccaacctcaagggcagtcccccgtggaggctgaggcgaccgttcagttccggtcaatgggcggcgttgatcgtcaaatgcgggtaccactactgatgttcaccgaacctgtgatcgaaggggacctgctgtga

SEQ ID NO: 47195 - DNA, 723 bp, Mycobacterium abscessus; identical to SEQ ID NO: 46888

SEQ ID NO: 47196 - DNA, 3375 bp, Mycobacterium abscessus; identical to SEQ ID NO: 46889

SEQ ID NO: 47197 - DNA, 1227 bp, Mycobacterium abscessus
gtgatcaccgtcgaacaagcccgcgacaaggttgtttccgttgtcgaaaaccgttggcgtcaatggattcgactcggaagcacctggccgatcacggtcgcgctgcacccacccagcggcgggcaactcgccgctcatctgatcgacgtgcagaactgggccggaacctggcaagcagcggaacaagccggtagcttgcctggccaggtggtgtggactgaccgtcgcgtgcttggaatgggtatgtacacgctgccacacaaactggtagtgcctgacctcgccgctgcgctggccgtcgccccagcagccgcgcgcagatatcggcgggcgatgacacgtcaccagcaggccatcgccaactcctcggtgcgttggaccgcgctcgatgagatctccggcgactccctgtccagaatcgaggccttggacgaccatgactgggcattagcattggaattggccgagtacctcacgtccacgccggtcaccggcatgatggtccgccaaatcactatcgacggccttcacagcaaatggatcgaacaacacgccgtgctcgtcctggacatgatttgtccgccgaaaatcgaactgcccgacggcagcccgctcacaaagctccggcacatactggggttgcgtgcgaaggatttacggataaacgtcgcgctgcgctgtccgcaacttcgggccgtcgctgctggaatggagcgattctcgacaaccatcagcacactcaacgacagcgcgttggcaccgcagaacctgctgatcattgagaatgatcagccggggtacaccctcaccagggatatcccgaatctggccgtgctacacggcctgggtgactcagttacgagcctgacgccattgcgctggtttcagaccgccagtcaagtcctgtactggggcgacatagaccgtgcaggtctacaggccgttgcctctttacggcgcgcgggaatccctgcgcattcactcctcatggactgcatcaccctcgacacccacgaggatcaggcacacaaggccacaaagactcaggcgacagatcagaatgtcccagatggcctcactgcggatgaaaggctgctctacgagcggttgaacacgcacttccagcagactggcgaggagtggcaactcgaacaagagcacttgccgactcagattgtcgaatcagcgctagtcagtgcgtgccagggtcctggtaataggaaatga

SEQ ID NO: 47198 - DNA, 1461 bp, Mycobacterium abscessus
atgaatgatctgacagtcgaagagctgttcgcgcacaacgatgacgtgcagaaatcccgtgcggtccgcctgttggccgccaagaatctggcgccctacatcacgcttatggaacgccacctggaccgcagcgccaaagtctccgaacctcagctggtggccaagctggaccgggacctgagcgccgtcgggctgggagaacagtccgggctggccctcatcaagagctgggcgagcgacgggtggctgcaccgagcgtcggacggcaccggccccgatgccgagaacgtctgctcgctgaccgaggacgcgcgcagcgcgctggcctttgtgcgccgcctgcgccgtgctgacacggtggccacgggcgggtctatcgccggtatcgcggcaggcctcaaacgggtggccacccagctggacggcgacccgtcacgcctgcgcgccgacatcgaggcccagatcgcagaactgcagacccagctgcacgccatcgacgacggataccgtccggaaccggatatcgtcgatcttgaggacgagacccgggccatcgcctatcagatggaacaggtgatcaccgacatcgtccgctacggcagcatgcagaacgagatcaccgccggactcatcgacgccgccgaggactccgactccggcttccgcgatcgcgcccgcagaatgttcgcggactatgacgccctcttcgattcccgcgaacgtgcctcttattcggccttcacgcggaccatccaagatccggatcagcgagccgcgctacggagcgatatcgcctgtgtcgcagatggtttgcccgatcttgaccccgggctgcgcgaggtcatgagaaacttcttcaagctcgtgtctcagcagatcgcggaggtctcccgcatcgaacagcgctgcgcacagcgcatccggcggttcttcgccgccggcaccacggagcaggctcgtggccgtgcgcgacagctcaatgacgcgctggcggccgggcacgctctactcaaggtatcgacggcggactctccgatcgacgccgagctaccgatcgggcgttccgccgcagcggcgatcggcgcgctgtctttcaccatcaaggacaccgggccgccggtgctcgcacaggacgccccgtcggggccgctggatttgagcgggttctcggcgctggccacccaggtggatatggccgcattggccgatacggtcaacagtgctattgccggtggcccagtttccttgcccgacatgatctctcatgtcgaggccccctaccttggtgatgtgatcgtgttgtggtcactggccctcaagcaggacaacactgccgaccgtgaatcggtaaaggttaagttccggtccctcgacggacaggaccgggtgatggaggtacctcagttgatgttccgtgaaccggtgctggccaccctcgaagaggagggatcgacactgtga

SEQ ID NO: 47199 - DNA, 750 bp, Mycobacterium abscessus; identical to SEQ ID NO: 42722

SEQ ID NO: 47200 - DNA, 3348 bp, Mycobacterium abscessus
atgacgacgagtgatgcagcgacacaacagttctggttgtcccggctgcaggtcatcaactggggcgtcttcgacggctatcacagcatcgagttcagccgtcgcggtacgctgatcaccggctcctccggtagcggtaaatcatctctgctggatgcgatctcgctggcattcttgtcttcgaaccgccgtaacttcaacgcctctagcgacaccaccgccgcgggttccagcatgggcaagcgcaccgtcgacaagtacgtgcggggcctgtggggagagctgaagaacccgggggagcgccccaagcagatgttcctgcgcggcaagggcggtgcctggtcggctatcgccgtcacctactccggcaccgacggtcgggtgatcaccggcctggtactcaagtggcttgccccgggctcggattcggactcgtccagccgctactacctgatcgatgcggacgccgacatccgtgatctctgcaatgcgtgggccagcaagggatacgccggctcggtgttcgagggcgcgggttggcgcggccacaagagcgaacgctggtacctggaacagctatacgccgccgtcggtattcagggttcctctgccgcgcagcagctgctgggcaaggccaagtcgctcaagagtgtcggcggcctggagcagttcgtacgcgagtacatgctcgatgaaccggagtcgatggcagcgatatccgaagcgctagggcagatcacgccattggtcgacgcccgtgccgccttggcgatcgcgcagcgccagcggcagaccctgggcgatatcgaacagatccaacagacgtacgccagcgatgcggcgcagttggccaccgtggacgtcgtggaccatcacaccgtgcgcgactacgtggatcagcagcgcctggcgctggcgggcccggagatcgatctgctcgacaccgagatcacccggctgggtggtgagtgtgacgaaatccagtcgcgccaggacattctcacgggagagcgggacaaattgctcggccggatcgccgctgccgacagcaatctggcaccactcaaaagcgagctggctcatgctcgtgcccgcgcagaagaggtgtcgcgccggcgtacggcctacgacagtgcgttgtgggacctgggtcacgaagacgatatcgaatccgccgaggaattcgaggccatgcgggtggagagcctgcgggcagtcacccggatcaacgctgagctcgaagccggccacgatgcatatgtcatggccgcgggtgcgctctcgacggcacgtgatcagctgcgtgctgcatccgccgaattcaagcgggtcgagcacctgggtaccccggtgccgccggatgaggaccgcatgcgcggggagatcgccgcggcgcttgggcttaccgccaaggacctgccctacgtgtgcgagctgatggatctgcgcccagggcaggaacggtggcgcaaatctgtggagaaggtgttgcgctccaccgggctctgcctgctggtgcccgatcagcaccaccgccaggtgctgcgttatgtcaacgagaacccgatgcgcggctacctgcagatggagcgggtgattccctccggtaccccgcggcgcgccgagccgggcacgctcgccgactgtttgcgcctgaccaaccccaaccacgaatgcgccagtgccgccatgaatctggtggccggtgtcggcgactacgtgttggtcgacagccccgacgaattcagcaagcaccgccgggcggtcaccgatcagggactgcgcaaggacggtgaccggcgcgcggtcaaggacgatcggcgtgaattgcgggcttcccagtacatctatcagggcaacgctggcgacaagcgcgccgcgctttccgacgatgtggtcgaagcgcagcaggcggtcagtgatgccgaaaagttcatcggcgaaatggacaccaagcgcgaagagctgcgctcggaggtggtgcggtggtccaagctgcacagccaatacgagtattggagccagatcgataccgactcggccgaagctgccgtggcgcgtctacaggaccagtacgacgcgatgctggaagccaaccccgacctgaccggattgcagcagcaggccgactcctacctcgacgagatcaagaggctctccgaacgcatcggagcattgcgcaagcaagaatccgaacatgattcgcgccggacccggttgctggatctgctggacaacctgaacccgcgtgaggtgggcgggcacacccgatcgggaatcgaggcctatgtgccccaactctcgtccagcctggatgtgttggaacccgatgcctaccgactggagctgtggcggcagatcgagaaggatcagtcggtgctgcgtgagagcgtcacccgctcgcgcaacgagctgaaccggattctcaacgcgtacgaccgggacttccccgactctatccccaacgacagtgagaacttcgacgagaagatccacgactatgtcgcactctgccgcaggatcgatgaacgcgacctgcccgccgcctacgaacggatgctgcggctgatcaccgagcaggcgcccactgccgtgttgcggctgcaccagctcgccgaggaggaggcacaccgcatcaccgaccagatcgaccgtgtcaatagcggtttgggttcggtcgagttcaaccggggtacccggctgaccctgcgtgccgagccgaaggcgctcgaagcggtgggcgagctcaacgagcgtgcccggcggatatccgggcgtgccgtcgccgtttcgatgggggacgagaaggccatccacgaccagtaccaggacatcctgcaactgcgtaacctgttggccgctgagacacctgaggcgcgccagtggacgcgcgacgcgttggatgtgcgtaaccgcttcgtgttgtactgcgaggagcgcgatgccaggaccggcgaaccgatccgtacctacagcaacgcgggtgcgaattccggtggagaacaagagaagttgatggcgttctgcctcgccggcgcgctgagcttcaacctggccaacccggagacgggggacaaccggccggtcttcgcgcagcttatgctcgacgaggcgttctcgaaatcggatccgcagttcgcccagcaggcgctgtccgcgttccgtaagttcggattccagctggtgatcgtggccaccgtgcagaacaccaccaccatccagccctatatcgacagcgtggtgatggtgtccaagccggacggcccgggggtgcgtccggttgcttcgacgcgcacggtgccgatcggtgaactcggtgacgtacgcaaggccgtgagcgcccgctag

SEQ ID NO: 47201 - DNA, 1461 bp, Mycobacterium abscessus; identical to SEQ ID NO: 46758

SEQ ID NO: 47202 - DNA, 750 bp, Mycobacterium abscessus; identical to SEQ ID NO: 46759

SEQ ID NO: 47203 - DNA, 3348 bp, Mycobacterium abscessus; identical to SEQ ID NO: 46760

SEQ ID NO: 47204 - DNA, 1461 bp, Mycobacterium abscessus; identical to SEQ ID NO: 42721

SEQ ID NO: 47205 - DNA, 750 bp, Mycobacterium abscessus; identical to SEQ ID NO: 42722

SEQ ID NO: 47206 - DNA, 3348 bp, Mycobacterium abscessus; identical to SEQ ID NO: 42723

SEQ ID NO: 47207 - DNA, 1461 bp, Mycobacterium abscessus; identical to SEQ ID NO: 42792

SEQ ID NO: 47208 - DNA, 750 bp, Mycobacterium abscessus; identical to SEQ ID NO: 42793

SEQ ID NO: 47209 - DNA, 3348 bp, Mycobacterium abscessus; identical to SEQ ID NO: 43029

SEQ ID NO: 47210 - DNA, 1461 bp, Mycobacterium abscessus; identical to SEQ ID NO: 42721

SEQ ID NO: 47211 - DNA, 750 bp, Mycobacterium abscessus; identical to SEQ ID NO: 42722

SEQ ID NO: 47212 - DNA, 3348 bp, Mycobacterium abscessus; identical to SEQ ID NO: 42723

SEQ ID NO: 47213 - DNA, 1461 bp, Mycobacterium abscessus; identical to SEQ ID NO: 43021

SEQ ID NO: 47214 - DNA, 750 bp, Mycobacterium abscessus; identical to SEQ ID NO: 41998

SEQ ID NO: 47215 - DNA, 3348 bp, Mycobacterium abscessus; identical to SEQ ID NO: 43023

SEQ ID NO: 47216 - DNA, 1461 bp, Mycobacterium abscessus; identical to SEQ ID NO: 44403

SEQ ID NO: 47217 - DNA, 750 bp, Mycobacterium abscessus; identical to SEQ ID NO: 41998

SEQ ID NO: 47218 - DNA, 3348 bp, Mycobacterium abscessus; identical to SEQ ID NO: 44436

SEQ ID NO: 47219 - DNA, 1461 bp, Mycobacterium abscessus; identical to SEQ ID NO: 42721

SEQ ID NO: 47220 - DNA, 750 bp, Mycobacterium abscessus; identical to SEQ ID NO: 42722

SEQ ID NO: 47221 - DNA, 3348 bp, Mycobacterium abscessus; identical to SEQ ID NO: 42723

SEQ ID NO: 47222 - DNA, 1461 bp, Mycobacterium abscessus; identical to SEQ ID NO: 44403

SEQ ID NO: 47223 - DNA, 750 bp, Mycobacterium abscessus; identical to SEQ ID NO: 41998

SEQ ID NO: 47224 - DNA, 3348 bp, Mycobacterium abscessus; identical to SEQ ID NO: 44436

SEQ ID NO: 47225 - DNA, 1461 bp, Mycobacterium abscessus; identical to SEQ ID NO: 42721

SEQ ID NO: 47226 - DNA, 750 bp, Mycobacterium abscessus; identical to SEQ ID NO: 42722

SEQ ID NO: 47227 - DNA, 3348 bp, Mycobacterium abscessus; identical to SEQ ID NO: 42723

SEQ ID NO: 47228 - DNA, 1461 bp, Mycobacterium abscessus; identical to SEQ ID NO: 42721

SEQ ID NO: 47229 - DNA, 750 bp, Mycobacterium abscessus; identical to SEQ ID NO: 42722

SEQ ID NO: 47230 - DNA, 3348 bp, Mycobacterium abscessus; identical to SEQ ID NO: 42723

SEQ ID NO: 47231 - DNA, 1461 bp, Mycobacterium abscessus; identical to SEQ ID NO: 42721

SEQ ID NO: 47232 - DNA, 750 bp, Mycobacterium abscessus; identical to SEQ ID NO: 42722

SEQ ID NO: 47233 - DNA, 3348 bp, Mycobacterium abscessus; identical to SEQ ID NO: 42723

SEQ ID NO: 47234 - DNA, 1461 bp, Mycobacterium abscessus; identical to SEQ ID NO: 42721

SEQ ID NO: 47235 - DNA, 750 bp, Mycobacterium abscessus; identical to SEQ ID NO: 42722

SEQ ID NO: 47236 - DNA, 3348 bp, Mycobacterium abscessus; identical to SEQ ID NO: 42723

SEQ ID NO: 47237 - DNA, 1461 bp, Mycobacterium abscessus; identical to SEQ ID NO: 42721

SEQ ID NO: 47238 - DNA, 750 bp, Mycobacterium abscessus; identical to SEQ ID NO: 42722

SEQ ID NO: 47239 - DNA, 3348 bp, Mycobacterium abscessus; identical to SEQ ID NO: 42723

SEQ ID NO: 47240 - DNA, 1461 bp, Mycobacterium abscessus; identical to SEQ ID NO: 42721

SEQ ID NO: 47241 - DNA, 750 bp, Mycobacterium abscessus; identical to SEQ ID NO: 42722

SEQ ID NO: 47242 - DNA, 3348 bp, Mycobacterium abscessus; identical to SEQ ID NO: 42723

SEQ ID NO: 47243 - DNA, 1461 bp, Mycobacterium abscessus; identical to SEQ ID NO: 42721

SEQ ID NO: 47244 - DNA, 750 bp, Mycobacterium abscessus; identical to SEQ ID NO: 42722

SEQ ID NO: 47245 - DNA, 3348 bp, Mycobacterium abscessus
atgacgacgagtgatgcagcgacacaacagttctggttgtcccggctgcaggtcatcaactggggcgtcttcgacggctatcacagcatcgagttcagccgtcgcggtacgctgatcaccggctcctccggtagcggtaaatcatctctgctggatgcgatctcgctggcattcttgtcttcgaaccgccgtaacttcaacgcctctagcgacaccaccgccgcgggttccagcatgggcaagcgcaccgtcgacaagtacgtgcggggcctgtggggagagctgaagaacccgggggagcgccccaagcagatgttcctgcgcggcaagggcggtgcctggtcggctatcgccgtcacctactccggcaccgacggtcgggtgatcaccggcctggtactcaagtggcttgccccgggctcggattcggactcgtccagccgctactacctgatcgatgcggacgccgacatccgtgatctctgcaatgcgtgggccagcaagggatacgccggctcggtgttcgagggcgcgggttggcgcggccacaagagcgaacgctggtacctggaacagctatacgccgccgtcggtattcagggttcctctgccgcgcagcagctgctgggcaaggccaagtcgctcaagagtgtcggcggcctggagcagttcgtacgcgagtacatgctcgatgaaccggagtcgatggcagcgatatccgaagcgctagggcagatcacgccattggtcgacgcccgtgccgccttggcgatcgcgcagcgccagcggcagaccctgggcgatatcgaacagatccaacagacgtacgccagcgatgcggcgcagttggccaccgtggacgtcgtggaccatcacaccgtgcgcgactacgtggatcagcagcgcctggcgctggcgggcccggagatcgatctgctcgacaccgagatcacccggctgggtggtgagtgtgacgaaatccagtcgcgccaggacattctcacgggagagcgggacaaattgctcggccggatcgctgccgccgacagcaatctggcgccactcaaaagcgagctggctcatgctcgtgcccgcgcagaagaggtgtcgcgccggcgtacggcctacgacagtgcgttgtgggacctgggtcacgaagacgatatcgaatccgccgaggaattcgaggccatgcgggtggagagcctgcgggcagtcacccggatcaacgctgagctcgaagccggccacgatgcatatgtcatggccgcgggtgcgctctcgacggcacgtgatcagctgcgtgctgcatccgccgaattcaagcgggtcgagcacctgggtacccaggtgccgccggatgaggaccgcatgcgcggggagatcgccgcggcgcttgggcttaccgccaaggacctgccctacgtgtgcgagctgatggatctgcgcccagggcaggaacggtggcgcaaatctgtggagaaggtgttgcgctccaccgggctctgcctgctggtgcccgatcagcaccaccgccaggtgctgcgttatgtcaacgagaacccgatgcgcggctacctgcagatggagcgggtgattccctccggtaccccgcggcgcgccgagccgggcacgctcgccgactgtttgcgcctgaccaaccccaaccacgaatgcgccagtgccgccatgaatctggtggccggtgtcggcgactacgtgttggtcgacagccccgacgaattcagcaagcaccgccgggcggtcaccgatcagggactgcgcaaggacggtgaccggcgcgcggtcaaggacgatcggcgtgaattgcgggcttcccagtacatctatcagggcaacgctggcgacaagcgcgccgcgctttccgacgatgtggtcgaagcgcagcaggcggtcagtgatgccgaaaagttcatcggcgaaatggacaccaagcgcgaagagctgcgctcggaggtggtgcggtggtccaagctgcacagccaatacgagtattggagccagatcgataccgactcggccgaagccgccgtggcgcgtctacaggaccagtacgacgcgatgctggaagccaaccccgacctgaccggattgcagcagcaggccgactcctacctcgacgagatcaagaggctctccgaacgcatcggagcattgcgcaagcaagaatccgaacatgattcgcgccggacccggttgctggatctgctggacaacctgaacccgcgtgaggtgggcgggcacacccgatcgggaatcgaggcctatgtgccccaactctcgtccagcctggatgtgttggaacccgacgcctaccgactggagctgtggcggcagatcgagaaggatcagtcggtgctgcgtgagagcgtcacccgctcgcgcaacgagctgaaccggattctcaacgcgtacgaccgggacttccccgactctatccccaacgacagtgagaacttcgacgagaagatccacgactatgtcgcactctgccgcaggatcgatgaacgcgacctgcccgccgcctacgaacggatgctgcggctgatcaccgagcaggcgcccactgccgtgttgcggctgcaccagctcgccgaggaggaggcacaccgcatcaccgaccagatcgaccgtgtcaatagcggtttgggttcggtcgagttcaaccggggtacccggctgaccctgcgtgccgagccgaaggcgctcgaagcggtgggcgagctcaacgagcgtgcccggcggatatccgggcgtgccgtcgccgtttcgatgggggacgagaaggccatccacgaccagtaccaggacatcctgcaactgcgtaacctgttggccgctgagacacctgaggcgcgccagtggacgcgcgacgcgttggatgtgcgtaaccgcttcgtgttgtactgcgaggagcgcgatgccaggaccggcgaaccgatccgtacctacagcaacgcgggtgcgaattccggtggagaacaagagaagttgatggcgttctgcctcgccggcgcgctgagcttcaacctggccaacccggagacgggggacaaccggccggtcttcgcgcagcttatgctcgacgaggcgttctcgaaatcggatccgcagttcgcccagcaggcgctgtccgcgttccgtaagttcggattccagctggtgatcgtggccaccgtgcagaacaccaccaccatccagccctatatcgacagcgtggtgatggtgtccaagccggacggcccgggggtgcgtccggttgcttcgacgcgcacggtgccgatcggtgaactcggtgacgtacgcaaggccgtgagcgcccgctag

SEQ ID NO: 47246 - DNA, 1461 bp, Mycobacterium abscessus; identical to SEQ ID NO: 44403

SEQ ID NO: 47247 - DNA, 750 bp, Mycobacterium abscessus; identical to SEQ ID NO: 41998

SEQ ID NO: 47248 - DNA, 3348 bp, Mycobacterium abscessus; identical to SEQ ID NO: 44436

SEQ ID NO: 47249 - DNA, 1467 bp, Xanthomonas arboricola pv. juglandis
atgaagccacagctttacgcaagcgcttacgagcggcttcggggagaggcggcctggtcgctgctcaccgcgcacttggcacctgttgtgctggcactgctgcagcatctgctctatgcaaatgagcgtgtgctccccgcatccgtcttgatcgagcgtttgcacacggagcttggagagctgcgggccaaggggcgggacctgacgggttccgccagctactacgtcgacagttggcggcgcgaaggctggatcgagcggcgcctgatcgaaggggctgacgaagaggagttcgagctcacagccgccgcgctcgccgcgctcaagctcgtgtccgcgctgcaaaccacgcgcgcagtggcgaccgagagccgcttggcgctcgtcatcgggcagcttgcccagctcgccgagcagaccgacaccaatgccgcaacgcggatggagcgccttttggctgagcgcgcgcggattgatcaggagatcgcgcgggtgtcgggcggtcaggtcgacgtgttgtcagacgcgcgcgcggccgaaaagctggcggagatcgtggcgcttgccagtgagctatcggacgactttcggcgggtgcgcgatgacttcgcgcgcctcaatcgcgattttcgcgagcggatcatccatgacgagtctcagcggggcgaactcctgacggatctgttcaatgatgtggacgtgatttcgcaaagcgcacaaggccagagctttgaggcgttttggagcctcttagtggacccagaagaaagcgcgcgactggaagcgggtctgagagaggttgccgctcggccgtttgccgagcagcttgggcgcagtgaacggcgcctcctgcgtcacctcacccgcacgcttttggatggggccggcagcgtccacagcacgcgcacgcgctttgccaggagtctgcgcggcttcgtgcagagcaaggagtatcgcgaacagcggcgcctgagccagcttctgcgcgacgccaaggcacgcgcactcgaagtagcgccattgttctcacccagtcagaagatcgggtttgagcttgagctcagctcagccacctatcgttcgatctcgcgcctgcgcccgcatgacccggttcaggcgatggagcagccagatctcggcgctgccggcgaggcagaagtggatcttctcgccatcgccaatgcggtggccgaatcggacatcgatttccgaagcctcgcggcgaacatcaagtcgatgctgaccgaagtcgcgcagtgctccattggcgatgcgatggccgtcttcgcgcctcagcagggccttggcacggtcattggctacctagcgcttggcgtcaagcatggcgacgtcgcgccactggacaccgaacgcgtcagctggcagggcggagatggcgcgcaccggagtgccgacattccactgatctatttcttagcggagcgcgttgatgaactccctggatga

SEQ ID NO: 47250 - DNA, 660 bp, Xanthomonas arboricola pv. juglandis
atgaactccctggatgaccctggcgatgcagtcgtcgtcgacaagacgcttttcgttggcgacgcgggcacgctgcccgtggacgcgcggcgcgcgctctgcaagctgctctcgggcccatttctcgatgacacccacggcgcgtggcccgcgctactgcgcgaggaggcggtgcttcgaagccgcttgtctgatctgttcctggaactggtgatcgaccgggagcgcaaggtggccttcgcccggcaagccgataccggagaggtcgatgcgccggtcttgatgcgcgcccaggcgctctccttcatggagtcggtgctgctcctgcacctgcgccacgcccttgtggaggcggagggacaagatcagcgcgccgtcgtgtctcaaagcgacctgacggaggtgctgagcgtttacttggagcagggcgtgtccgatacggtcggcgccgcggcgaaggtgaactcggcaatcgagaagctcaggaccgctgggatcctccggattcttcggggcggcgagcgaagatttgaggtctcgccggtcctgcgcctcttgttcacggccgaagacgtcgaggcacttgggaagctctacgcatcgtcggcgcaggcaggcggggcacctgaggacatggaagaggagggggaggatgcatag

SEQ ID NO: 47251 - DNA, 3360 bp, Xanthomonas arboricola pv. juglandis
atgcatagttcggccgaggtgtttcacttgtcggacctgccagacccgcaggatgaacagtttcgaatgcgtcagctcagcgtcctcaactgggggacattcacgggcctgcaccgcatgccggtgtcccccgaaggcaccctaatcatcggtccgagcggcgcgggtaagtccacgctgctcgacgcgatctccgcgctgacggtgtccccgcgcacggtgcgctttaacgcggcggccgacgagagtggcaagcgcgacccggatcgcaccttgatgtcgtatgtgcgtggcgcttgggcggagcgcgcggatgaccagagcgcgcgctcgctcgccaaacagtatctgcgcacgaatgcgacgtggacggccgtggcgctcgaatacgccaatgcgcttgggcgcgtgatgtcgattgtgcgcgtgctttgggtgcggggagcaggctcaaacgcgaaggtcgagagtcattttctggtcgttgacgcgccgtttgatctctcggaaatcggcgagttcacgggcgagcgcaaggcgctgacgaagcgcttttcagatcccccctaccgttcgcacgagagcttcacggccttctcggagcactggtgccgagttgtcgggattgtcgagcccaacgcgctgaaccttctgcaccagacccagtcgaccaagaatctgagtgatctgaacggctttctgcgcgactacatgctcgccgagccgaagacctttgagatcgccgatagcctggtcagcgaatttgtggatctggatgaagcgcaccgggccgtggtcgtcgcgcgcgagcaaattgacgtcctcgcgccgtcccgagacgcctaccgagatcgggaggttgcggagggccgggtccagcacgtcagaagcctgatcgtgagccttccgcagtttcaggcgcaggagacagcaagacttctgcgcgatgaggatgtgcgcctcgaaagcgtgattagcacgacgcgcatcgaggcggaagaggcgcatcggcatcagcacgcgctgagcgaagcgctcgaaaacttgcgccgcgctgcggacgcgggtggcggaggggatctggcgcagctcgaagctgcgcgcgggcagctcctgctggataaggaacgggtcgagcggaggcggacatcggccgggggctgggccggcgcgctcggactgacgctggcggatgatcaggccacgtttgcagcgcagctccttgcggcgcggtcggagcaggcccgggcggaggagcgccttgcaggcgcggaaggtgagcgagacacgctgctcgtggacgagtcgcgcctcagggaggagctgtccctgctccgcaaggagatcgagacgctcgaaggcagcacgtccagcatcccccgcgacaagcaagagatccgcgcctggatgtgccgtgatcttggaatcccgaaatcgcgcgtccccttcgcaggtgagctgatctccgtcaaacctgagcacaaggactgggagggcgcggccaatcgattgctgggcggctttggcacctccctgctcgtggatgtcaacgactaccgccaggttgccgcttgggtcgataagaaccatctgcggagccgctggagctattaccaagtcgagcccacgccgagcaccggcaatcgtgaccggcgccccggcctgttgctgaactgcctagacgtatctgagagcccctaccgccaatgggtctggaaggagctttggcaccaagccgactttgagtgcgtcgagaaggcgtcggacctgatgaagggtcagcgacgcatcacgcgggcagggcagattcgtttcagcggcggtctccaccagaaggacgaccggtttcgcgtcgatgacgagagccgctgggtgcttggggacaatcgcgccaagctcgatcgcctcaagcgaaacgcggccgacacggccggcgcgcttgcaaagatttcccaaaggcgtagcgaagcggtgcagagcgcggacggcatacggctgcgcgcgcaggcggcggcgcatcttgtggaagtcgagtggccaagcatcgatctgaccggcgctctgcgcaggatcgaggagaaccaggaggcacagcgcgctcttttggagcgcacgccggggctcatcgatctgcaaggccagctggtccagaaacaggacgaagccaaacgggcactagcggacgcaacccgcctcaccctcgacatcgaagcgctggagcgccagcgcgccgagaacgcaggcgagcttgaggcggcatccattcgcgcgctagggcttccgcctgaggccgatgcgggcctgacggcgcggtgcggcccatggacgccgaccctcaaaacgattcatggcgaacttgcgcgcgtgcgggaagtgctcgaccgagagaaagatgtactcagtgaggcgatcagtgcacacgtgcagtcgatcttgcagtgctttcagaccttcttgcaccgctggccggaggagcgcggcagtctccagccgaaccttccaagcgcgacggacttctttgccaagctcgagcgattggaaacggatggcctcccaaagcacgaagcgcgctttcaggagctactccgaaagcaaagcatgcagcgcctcgctgagctctcccagcacctgcacgaggcgcgctcggaaattgaaaacggtatggacgacgtcaaccgggcgctgcggccggtgccctacaacccggacacctatctctacatccgcacggaggatcggggcctcgatgaaccgcgcgagttccgcaggcgccttggcacgctgttcgcgcagcggggggagctgacggaggaaaccgctgaggcgcagtttgagggccttcgccgcctcattcaggaccttcgcgcggatgacgcggccggaaggcagtggcgagacctagtgcttgatgtgcgtaagcacgttgagtttattgccgatgagtgcgaccgcatcagcggagtagtcgtcgagaactatggcggggccggcggcaagtctggcggtcagcggcaaaagctcaccgcgacgtgccttgccgctgccctgcgcttcaagctcggcgggtcggacggcggcgtgccgtcgtatgcggccgttgtactcgatgaggctttcaccaaaaccgacaacgaattcaccgccacctgcatgcgcattttcaccggcatgggctttcagatgatcgtcgcgacgcccatgaagtcggtgatgacgctggaagagttcgtgggcggagcgacctacgtctcgatcaaggatcgcaaggtgtcgagtcttctgcacatcgcctacgacgccgatcagcggcggttgagactccccgaaggcgcgcggcgggggatggagcttgcggagtga

SEQ ID NO: 47252 - DNA, 1221 bp, Xanthomonas arboricola pv. juglandis
gtgaaggcgatccatgaggcgcgcgagcaactggggcgagcgtgggagaacaggtggctcgggtggctcgcgggcaccggcacgtggccactgacccttgcgctggggccgccctcgcaaaaggaggcgctctcagactggacgcgctttgttgcgtggcgcgacggctggctaatgagtggcgtagctgtgtcatcggtcaaccgggcttggccgagccttggcggcgcacaagtcttgcctgcgcatgtgtcgtttgacgggccagagacgctcgcccatttcctcggaacagataagcttgcggcgtggaagcaggcacgagcgcgactcttgtcttggcaggcgagatggccgggcagcacgccgggtgggagaggccttcgctggctcattgaggcgcgtgaggacgacttcactcgcatgcaagcactcttagagtggttgaaagataacccggatgcggatctcttcattcgtcaggtgcctgtacccggcatagacaccaagtgggcgcagaaaagcggcacggtcgcacttgagctaagtagaaccactgcaagtaaggaagaggccggtttaggaacgttcaagcaggaccttccgcgtattcggatgcggctgctggaccccttgcttcgcgcgaagctaggaggtcttgatgatatatctgcccccatcgcttcgatcagtgcgctctcgctccccgtacgctgcgcagtcgtggtggagaacctccagacttttctcgcgtttgacgatattcccggcgttgcgctcttctttggccagggatttggcgcacgtagcctctcaaaaattgcgtggctgcgtgagctaccgatcgtctactggggtgacatcgacactgcaggatttgagatcctgaacgccgttcgtagcgaactacctaacgcatcgtcgttttcgatggatgaggcgacgctttcaaacaatcgagcactctgcgtaccagatcctaagcagcggcgagccgagctaaagcgccttacggctgcagagcaggctacctattatttacttctcaatgaccaattcttcgcgggcatgcgccttgagcaggagcggctggcgtgggggcagcagtggcccagagttctagaagcagtcgccaggatcgctgcccgccatcctttgcataacagcggacatccactactggccgcgccagtgactactgattcgatcgataaggagtag

SEQ ID NO: 47253 - DNA, 1470 bp, Xanthomonas arboricola pv. juglandis
atgaagcaccaggcacgtatcgccggctatcgccaattgcgcgagcagccggtatggaaactgctggccgccgaccacgccccggagctgatcggcctgctgcagacggtgttgctggacggcgaacgccgcctgccctcggccgtgctgcacgagcgcctgcagcgccagctcgacgcactgcgcgccgacgaactctcgcgcgagttgccgcgtaccgcgcaggcctatctggcgcattggctggcgcagggctggctggaacgccgcctgcccgagggcgcggccgaagaagagtacgagctatcgcgcgcggccacccaggccatccgcttcatcgtcggcctgcgcgagagcagcagcagcgccaccgaaagccgcctgtcgctggtgatccagcagctggtgcagctggcgggccagaccgaagccgacccggagctgcgcctggccgccctgcgcgaagaacgcgcgcgcatcgatgccgagatcgaacgcgtggcctccggccgcgtggccgcgctggatggcaagcgcgcgctggagcgcgcccgcgacctgatccatctctccgacgagctggccgaagatttccatcgcgtgcgcgacgatttcgaacagctcaaccgccagttccgcgaacgcatcatcgacgacgagggcgcgcgcggcgatgtgctggagcagctgttcaacggcgtggacgtgatcgccgacagcgaggccgggcgcaccttcgaagcgttctggagcctgctcaacgacacccagcaaagcagccagctcgatcaggcgctggatgcgctgctggcacgcggtttcgcgcgcaagctggaccggcgcgagcgcgccttcctgcgcgggttgaccggcacgctgctggagcgtggcggcgaggtgcacacggtgatgcagcacttcgcccgcagcctgcgcggtttcgtgcagagccgcggctatctggagcagcgccggctcaatcaattgctcaagcaggcgcagggcgaagccttgcagctgcgcgacagcctgcacgccaccaccgccaccggctatacccaggcgttgagcgctgcccgcctgcgttcgctgtcgcaatggcgcctgcacgacccgcgcctgacccaggtcgatggccgcgtgcaggccgccgatgcggcagacatctcgctcgacagcgtgggcgatctggtcgcgcaatcggaaatcgacgtgcgcagcctgcgccgcgacctgcacgagctgctcggccagcgcccgcgcctgaccatcggcgatgcgctgcagcagcgcccggccgcgcagggcctgggcagcgtgatcggttacctgtcgctgggcacgcgccacggcgtggtgatcgacggacagatggaaacggtgcaatgggaaggcggcgacggcgccctgcggcgcgcacgcattccgctggtgtggttcacccgggagaaacgcaatgaactggactga

SEQ ID NO: 47254 - DNA, 702 bp, Xanthomonas arboricola pv. juglandis
atgaactggactgaggacacgcgcctggacgcggacgaggacagcggcgcgtcggccgatgccggccgcacgccgccgacggagacaacgcctgcacagccgcgcggcgagctgtttctgggcgacaccggcacgctgccgttcgatgcgcggcgcgcgctgtgccagctgctggccggccccagcatcgatgcgcaacgccacggtgcgttgtggcctgcgctgctgcgcaacgaggcggcgatccgccaggtgttgtgcgagctgttcctggagctggtgctggaccgcgagggcggggtggccttcacccgtcaggccgacaccgccgagctggaatcgccgaccctgctgcgcagcgcgccgctgacctttatcgagtcggtgctgctgctgttcctgcgccagcaacttgccgaagccgatacgcgcggcgagcgggcggtggtggacgaagcgcagttggtggaggccttgtcggtctacgagaagaacgtgtccaccgaccgcgccggattcgcgcgacgggtgctgacggcgatcggcaagatgcgcgagaaccagttgctgtcgcggctgcgcggcagcgaggagcgctacgaggtctcgccagtgctgaagttgctgttctcggccgaagacgtgcaggccctggtggtggcgtatcgcggcttgcgcgagggagatgttgcgctcgactaa

SEQ ID NO: 47255 - DNA, 4083 bp, Xanthomonas arboricola pv. juglandis
atgaattcccagtccaacctgtcgccggctcagccgggcgcgtccctgttcactgattcgcttgccgagcagcgcgcgcagcagttccgcatgcggcggttgcaggtgcacaactggggcacgttcaatggcttgaccgaggtgccgatcgccgagaagggcttcctgttcgtcgggcgctccgggtcgggcaagtcgaccctgctggatgcgatgtcggcattgctgaccccgcccagcatcgtcgacttcaacgccgccgcacgcgaggccgagcgcagcgggcgcgatcgcagcctggtgtcgtacgtgcgcggtgcctgggccgatcagcaggacagcgcctcgggcgagatcgccacccaatacctgcgcaagggcgccacctggtcggcgctggtactggaataccgcaacgcgcacggcgagacggtcagcctgattcgcctgttctggatcgccggcagcggcaatgccgcggccgatgtgcgccgccattacatggtcgcgccgcgcagcttcgatgtggccagcgagctggatggcttcgatctggatctgcgcaggctcaaggcgcgtcttggcgaggaggtcgcgcatttcgacggctttgccggctacgcagagcgctttcggcatacgctgggcatcggcaacgagatggcgttgcggttgctgcacaagacccagtcggccaagaacctgggcgatctcaatgtgttcctgcgcggcttcatgctggacgagccgcgcacgttcgaggcggccgaccggctggtggaagacttcgccgaactcgacggcgcacaccatgcagtggtcaccgcacgccggcaggtggaaacgctcagcccggcacgcgagcaccatgcggcgctgatggccctgcgccacagcgtcggcgagttgcgcgagctgcagctgggtgtggacagctaccgcgaacagcagcgtctggccttgctggagacgcgcctgcacgaactcgacagccaggaccgcgggctggccggcgaagaaggccagcggcgtgagtcgctggacaatcacgaacagaagctcgccgggctggagcgcgaacaacgcgccgccggtggcgagcagatcgaggaactcgaacgcgagcgcgcccgggtcgagcgcgaacgcgacgagcgcttgcggcgccgcgtgcagatcgaacaggcctgccgccagctcggcacggccctggccgcaggcgccagcggctttgccgagcagattgcgcatgcccagaccgtgctcgagaacggcaagcacgacgccagcgcgctggatgaggcgatcgccgagcgcatgggtgcgcgccgcgacgatgagcggcgctttgccgagatccgcgccgaactggatgcgttgaagcgcgcgccgtccagcatgccggcaccgatgcaggccttgcgcgcgcgcctgtgcgaggacaccggcattgccgaagcggcgctgccgttcgtcggcgaactggtgcaggtacgcgaggatcaatctgcctggcgcggcgcgatcgagcgcgtgctgagcggttttgcgcagtcgctgctggtggacgaccgccattacgcgcaggtcagcgagtgggtcaaccgcacccagctcggcacgcggctggtgtatttccgggtacgccgcaacgatgcgctgcatgcgcgcacgccggatgcgcgtgcattgccgggcaagctgcagctacgcgagcatgccttcaccgagtggctgcgcaacgagttgatgcgccgcttcgactacgaatgcgtcgacaacgccgccgcgctgcgcaatgccgaccgcgccatcacccgcgaagggcaggtcaagcatcccggcgaccgttacgaaaaggacgaccgccatgcggtcaatgaccgcaagcgctggttgctgggccacgacaaccgcgacaagctcaaggtgttcgagcgcgaagcgcagacgcttgcccagcgcatcgccagctgcgatgccgacgtggccgcgctgcgcaagcaacgcgagcaggaccaggaacggcagctggccgcgcacacgctggtggagcgcgactgggacgagatcgatgtcggccccaagctgcagcgcctgagcgacatcgacgaacagctgcagcagctgcgcgaaggcaacagcggcctgcgcgcgctcggccaggcgatcgagaccgcacgtaccttgcgcgaccaggccaagcgcacctacgaggacgtgcggctggagcgcgcgcagctggcacgcgagcgggtccggctggaacagcagcacgctgcctgtgccagccgtgccggcaccgccgcgctcacgcccacccagctgcagggcctgcgcgaacgcctggcggcgctgtcaccgctgtcgctggacaatctggaggcgcatttccgcgtggtcgagcgtggcctggccgagcaactggccgagagccagggccgcgacagccggctcagcgcgcagttgctcgattgcttccgcaagtactgccagcaatggccggaagacagcggcgatttcaccgtgagcttggccagtgccgacgattttctcgcgcgcctggatcgcctggagagcgatggcctgccgcgccacgagcaccgcttcttcgatctgctgcagacccagagcaagaacaatctgctggccctgcagcgccacaccgccgaggcccacaagggcatcaagcagcgcatggacgaggtcaacgccagtctggagcaggtgccgttcaatcgcggcacgctgctgaccatcgaggtcagcgaccgtcgcctgggcgaggtgcaggaattccagcaacagctgcgcgcggtgttgtcgcatcaacagaccgaagaccgcgcactggccgaagcgcagttttccaccctgcgcgcgttggtggcacgcctgggcgcgcaggaaccggacgcacgccgctggcgtgagcaggtgctggacgtgcgccagcatgtggaattcatcggtgtggagctggatgcgcagacccgcgcgcaggtggagatctaccgcagcggcgccggcaaatccggcggtcaacgccagaagctggcaaccacctgcctggccgccgcgttgcgctaccagctcggtggcgaagacggcgaactgccgcgctactgcgcggtggtgctggacgaagccttcgacaaggccgacaacgaattcaccgcgctggcgatgaacatcttcgagaacttcggtttccagatggtggtggccacgccgctgaaatcggtgatgacgctggagccgttcatcggcggtgcctgctttgtggaaatcagcggccggcacaactccggcgtgctgctgatcgaatacgacgagcaggcgcagcgactccagttgcccgagcgctcgcgtggggacgaggccgcagcagcggtgacggaacaggcggtgagtgctgcgcagcgcgaggatgcaccgcgttcgacgcagggtgaaacgcggatggacagcaccggtcctgtctctggcgctgagggcgcggcacttcaggacgtccctgcacaggacgacgtggcggccaaggcgagcaggcgcgccagcaaggtcgcgccggcatcgacgccggccgttcaagccgcgccgaagccatcaaaaacagccgctgccagcgcacgtgcgggatcaggcacgtcggcagcggcgaagcccgcagcgggcaaggccgcgtccgtcaagactgcaccagccaaacctgcatcagccaggcgtgcatcgcctgcagcgggcacagcgcgcaagccggcaacgccgaccaaaccggccaaaacgccagcgaacaccgggacggcatccaggcgcgcgaccgcgtccgtcaaaccgactgccaggccgaacaaagccgcgacaacagcggcagcgccgaaaaagcccgctgccaagtcgacggtagcgaccaggcgcgccaccacatcgctgggtggtgcaaccaaggcaaccaagacaactgcggcgcgcagcgcggccaggcccgtaccaaccaagcccgtgccaaccaaaaccgcggccaaggcgcgtcccgcatccacgcgcgggtctgcaggcaagccgcgcggaaaacgctga

SEQ ID NO: 47256 - DNA, 1449 bp, Arthrobacter sp. ZBG10
gtgccccgctccgccaggtcatccgctgacgcgatcagcgccaggcttcgggacctcgaactcctgacaaagggccccgcctgggcgctgacgcgatcggctccctgggtgatcgccgtgctgcaggcatccttcacccgtacccgcccgcagcttccgctcgaagagttccacgccgacgtcgactccttccttgaagagcttcgccgccaggaccccgggctgggtggcggcgccaacgggaaggccttcggcgatgaatggacgcggcggcagttcctgacccgccggaaccagtcgggccggattgtttatgaggtcaccgaacctgcagcccgcgtgctggcgttcctggacagcctgtccagtgagcggtccaccctgaacggctcccgcctgggcaccctcctgggcgacgtggaaaagctggccaacgaaaccaacccggaccaaagcgcgcggctggaatccctggaagaggaaatcggtgagcgccggcaattgatccaggacatcagcagcggcgacttcgacggcgtgctggatgacgacgacgccgtggaagccgccggcaacatcctggacctcgcggccagcctgcccgccgactacaaaaagatgcgtgaccggatcgaggagctggtgggcggactccgcaaccagatcatcgaggaatccctgaccaagggcgccacgatggcccaggtgctggccgctgacaagcggctccggcaaagccccgagggccgcacgttccggtcgttcacggcgttcctggaggacccgcagcaacaggtccggttcaggtccgccatcggtgaagtcctcagcaggcagtttgccgacgacctgtccgcggatgacagggagaccctgaagaacctggtggctgagctccgccagcagcacagccagatccagcggatctacggcaagctcagcgaaagcctcaacacctacgtccaaagcgacgacttccggcagtccgtccggctccgcagggtcctccgcgaagcggagcaggccatcaggtcactcccgtatgagcgcgaacgccccggcctggtccgcggaccggtgctcttcaacgccggattcgaatcgctgtcgatggtgaagctttatgacccggacgggtttgcggccccgcccaaacttgccgaccccatcgcgttcagcgactccgaccgggtgcgctcgccgcggaccggcaaggccaacccggctgcgatccgttccgccatggccggggcagccaccctggcggacgcctgggaacagctgccgcccggggagcagcacatcaacaccatccgcggcctcctctcccaggccctgcaggacggcgcggacttcgaccgcggggcctgggccggactggacttcgaacagatagacggcacccggcgcagggcatacctgccggtggtcaccctcgcaaaggattga

SEQ ID NO: 47257 - DNA, 858 bp, Arthrobacter sp. ZBG10
atgactgaaccctccgctgaaaccggaacagaaccttccgaatccgttgccgcagccgccggacctgctgccgtagcccgggcaggggcggacgccgaacccgcagccgggcgctcccgtgccgccgggccccgcgacacgttcattgacggcgctgccctctttccgggcgacaccggggtgctgcccatgcgcgtgcggcaggcgctggtgaagctgctcaagggaccgtacatagacggcggccgcgacgagaaactctggacggttctgctggataaccgggtcatcatccgcagcaggctctccgaactgttcctcaccatggaactggaccatgaccgcaaaattgctgtgctgcgtcccgtggatccggacgcgatcggcggcagcacccgctccagcatcctccggcagcagcgagcgctgagccgggtggagacgattgtgctgctccggctccgcctgctgctggaccggcacgtgacggcgcagactgaccccaccatcacccgcgaggaaatcgccgaccttgtggcccactaccagccctcgggccagcaggacgcgctgcgggattccgacgtggtgacccgggccatcactaagctcctggcccgccagctcctgctggccacgggcctggacgacgtgtacaccatctccaacgcccttccgctggccctcccgttcgaaaacatcggcgatatcccggcccagatcgaagccctggtcgcagcctcggcggacccgtcgggcaccgaaccgctccttgacctcgacgccgaaacagcgaccgacgaggatgccgccgacgacgcggacggtaccaccaaccccgaaggaggcaccaagtga

SEQ ID NO: 47258 - DNA, 3447 bp, Arthrobacter sp. ZBG10
gtgagcatcgccagcatgcttcccctcggggaagaaacgaacccggggcagatgcggctggcgctggtccaggtggtcaactggggcaccttccacggtgcgcacaccatgcatgtggaccgcaacggcaccctgctgaccggcaactcgggcgtcggcaagtcgacgcttttcgacgcgatgctgcgggtgttcgacgcgcggccgcggtccaacgaggccgcagcccagcgctccggcggggccgtggaggacaaacgcaccacctttacgtacatgcgcggcaaggtgggcgacaaagccgtgggcgagggctcggcaagtgcgttccagcgccccggcgccacctggtcagcggtggcgctgacgttcgacaacgcagccggtaccagggtgacggtgtccgcgctcttcgacctgcccaaaaacggcacggaatcgagtgttggccggttctacctgatcgacagctcaccgctggacctgccggccctggaggacatcgcggacaagcgcttcaccaaggccgcgctggagacggtgttcccggacgcccaggtttttgacgtgcataaggcgtttgccgagcgcttccggcggctgctgggcatcaactcggaccaggcgcttccgctgctgcgggtcatccaggccggtaaaggcctgggcggcagcgtcaacaccttcttccgggaccaggtcctggacgccccggccaccctggcggcggccgacgacgtggtggaggagttcagcaacctgatgtccatccggcagcggctcgaagacgtccgccagcagcgcgaccagctggcgccggtccctgggctgaaccgcgagtacgcccaggcgctgctggacgccaaccggctgcgggacctcgcaggcggcgaattcgaggcgtaccggcagcagctggcagtcaccgtccacgaaaagacgctgacccggttccgggagctcgcacaggccaaggcccaggacctcggggcggagcggaccgtccgggatgcgctggccaaggatctccggcagctggaaacggactacaacacccagggcggcaacgcgatctccgcgatcgaacagtcgctcgagaacgcgcgcgtcagcctgaagctccgcgaacaggtggaggaggccgcccgcgccgcgctcgccgatgccggcctgcagctggcctggacggccgcaggctgggatcaggcgcacgaacaggcagcagcccgctccgccgagctgaaggacgactcccaggccctgcaggagcttcggtttgaggcctttgacgcccatgcgacccgcaagcgggaactcgccgcggctgagcaggagctggtgtccctgaagacacgcaaatccctgctgccgccgtcgagcattgaaaaccggaccgcgattgccgcggccaccggtgtgcccgaggaccagatgccctttgcgggggaactgatggacctgctggaaggcgaggagcgctggcgccccgccgctgagcgggccctgcgcagcctcgccaccacgctgctggtgccaggcgagcatttcggcgccgtgacccggtacctgaacgcgaacaacatccgcggcgccctccgcgccgtggacgtgtccaagccgctgccaggcggtgcgctggcggtggaggacgtgaacgacggcgacctgctccgcaagctggatatcctcaccgccggcggggcagcggaagcaggggcatgggtccgcgagcggatcgccctcgacttcgccttcccctgcgtggaggacccggacgaactcgccgccctggacaagggcctgagccttggcggggtggtcaaacgcaaccgccacaccgtggaaaaggacgaccggttcaccagccgccaggactacgtgctgggcttcgacaacgccgccaagctggaactggtggccagtcaggtggccgacctccggcaggaagtggccaaggccgcggaactggcgcagagccgggaggaatcacaccagggcatgggccgccagcttgaagccctgcgccgggtcgcagcggacgacaggccctgggaccaggtgtcggccgccgtcgcggcggaggacctggcacggatcgagcagcggctcaaggatgcgctcgcagcgcaggcggatctggaaccgctgcgcgccaacatcgagcaggcccggcagaaacaccagtccagcaccgagtcggctgccgtcctgcaaagcgagtacaaggcgctggaccggcagctgaccaccgccgattccctgctgcacgccgcgcgcgggcgcctggccgaagcgccgccgtcggacgccaccgtcgaagccttggcgccctactttgacgggttcggcgacatcacggagctgcatgaactggacaacctggccaaccgggtgcgctccacgctcctgggggagctgcacgccgccgaatcccgcggccagggcaccgctgagcggctcaccaggatctttgaggggtttgtccgcgaatggggcagcgccatctcggccgaccacggcaccagcatcggcgccgcagccgacttcgaaacccggtaccacgcgattgtcagcgacgggctgccggcacaggaagccgaattccggcagttcttcaaccagcgcacgcacgaatcgttcagcacgctgctgcatctgctggatgaagagcggcggtccatcaccagccggatcctgccgctgaacggcatcctgtcgcaggtgaacttccatgaaggaagcttcctggagctggacatcaagcagactttgccgcccactgccaaggcgttcaaggacgccatccagaacgcgctcaaggcccgccacacccggccggcgcggcccgaagccggtcaggaacgcgacgaggacgccgagctcaccgcccgctacaagtcgctggaggccttggtccggcggctgggctcgcaggctccggaggaccgccgctggcgcgccgaggtgctggatgtccgcggccacctctttatccagtgcaaggaacaccgcgacgttaccggaccccgcggcgggaagcggtccgaggtctttatgcacgccgacaccgggtcgatgtccggcggcgagcggcagcggttcacggcgttcatcatggcggcagcgctcagctaccagctgggcatcgcggagcagggcttcaccacctacggcacggtgatgatggatgaagccttcgtcctggcctccgaagagttcgccggcgccggcatcaaggcgctgcatgaattcgggttccagctgctgctggcggccccggaaaacgtcatcgacctgtcccggcacctggggtccgtcaccgagatcctccgggacaagcgcaccaaccgttcaggcgtcctcacggccccggtgatcaggcccacggcaggggcggaaggggcctggcggtccgaggcgaacccggtggacatcgtcctgcgttag

SEQ ID NO: 47259 - DNA, 1467 bp, Mycobacterium neworleansense
atgcctgacgcaggcaccggtggctcgtcgctggaccagctgtaccagctcaaccgcgaggtagccgattcccggtcggcgcggctgctggtgacgaacaacctggccacctacctcacgttgatggaacgccacctcgaccggggcgccaagctcaccgagatcgagctggtggtccggctcgaacgtgacctggccgagctcggctccgagaccgagcagtcgggtctggccctgatcaagtactgggccagccagggctggctgcaccggatcaccgagcagtccggcgacaccgagcggaacgtctgctacctcacgtacgaggcgcgcgccgtgctggatttcgcccgccggatgcgccgcgaggacaccatcgccaccggcggctcgatcaccggtatcgccgccgggttgcggcgggtggccggacaggtcagcaacgatccggatcgtatccgcgccgacatcgaggccgagatcgccaagctgcgtgacgaattggatgcgctggaccaggggcagcggcccgaacccgacctgatcgacgtcgaagacgaggcccgcgccatcgccttgcagatggagcagatcgtctccgacatcgggcagtacggaagcatgctcaaccgcatcaccacccggttgctggacacctcggccgacaccgatctcggctaccgggaacgtcagcgccagctgttcgacgactatgagtcgctgttcgcgtcccgtgagagcgcctcctacaccgcctttacccggatgattcaggatcccgagcagcgcgctgccctggtggccgacatcgaggcggtgacccgcgagctcccgcacctcgacccgggcctgcgtgaggtgatgacaggattcttcagcctggtgtcggcgcagacggccgaggtgggccggacccggcagcgctgcgcccgccggatcaagcgcttcgtcgcgtccggcacgctggaacacagccgtggtgtcacccgtcagctcaacgacgcactggccagtgcgcacgaactgctcagcatctcgctcgccgacagccggatcggcatcgaggtcccgctggtgcgcaccgacttcaattcgattggcgccgtagccttcaagatccgtgacgccattccgccgtcgcaggccgagtcggcagagggcgaggtgaacctgtctgcgttctcggccctggcctctcaggtggacgccgccgagttggccgacctggtcaacggcgcggtggcggccggcccgttgtcgctgcccgacgcgatcggcatgctggactcggcatacctgggccacgtgatcgtgctgtggtcttgggcgctcaagcaaccggccgccgacggtgctgaatccgttcgggtacggttccggtccctggagggcgccgaccgcgaaatcgagattccccgactgattttcaccgagccgatccctactgcgagtgagagcatgctatga

SEQ ID NO: 47260 - DNA, 753 bp, Mycobacterium neworleansense
atgaccgacaccccggacacctcttcggtcccggatacgacgatcgatttcgatgccctgccgagcatcgacgccgtcgaacggtccaccgatcagcgccgcgcgccccgcttcgacggggacgtcagtgagttgcccgaccgcgcctgctgggcattgcagcatctgttgtcgcgtcgctacgtcagcaaggacaaccactcggagctgtggtcatgggtcacccggtaccgtagcgagctcaccgttcggctgtcggaactcgatatgcggctgtgcatctcggacgatcacgacatcgcctatgtcgagcaggccgactacgagtcgcagtggcggcgccggctgctgcgccgcgaaacgctcaacacctacgattcgatcctggccctgcacctggccaagctcatgcgcgccgcgtcgcgcgacgagaacgtcctgatcagccgtgacgagatccacgagctgttcgccggggtgaacaacgacaccgaccgggacaccgcctcgttcgacaagcgcatcgacaacgcgatcgagcggctcaccgacatcgagatgctctcccgcaaccgggaagacgaggacagtttcacgatcagcccggtggtcaacgcgatcatgacggcctcgatgatcaccgaactgcagcagcagttcgagcagttgaagcgggccgccaccggcaccggggacgacgacatcgacgacctgtccgaacggctctccgacgaagtggatgctcatggctga

SEQ ID NO: 47261 - DNA, 3363 bp, Mycobacterium neworleansense
atggctgaaccgaccaaccagttctcgctgtcgcgtctgcaggtcatcaactggggcgtgttcgacgggtatcactcgatcccgttcagccagcacggcacactgatcacgggatcgtcggggagcggcaaatcctcgctgctggacgcgatttcgctggccttcctgccgtcgcaccgccgcaacttcaatgcctccggcgataccaccgccgcgggatcgggcaccggtaagcgcaccgtcgacaagtacgtccgcggcgcctggggagagcggcgcgagggcaccagccgccagatcatgtacctgcgcgggacgggtccggcctggtcggccgtcgcggtcacctacagcgaccgcaccgggcgttcggtcaccggattggtgctcaaatggctggccgcagagaagacctcggatccgggcagccgctactacctgatcgacgacgaccgcgacatcttcggtttgtgcaaccgctgggcgtccaacggctatgacgccgcggtgttccgcgacgacggctggaccggtggccgcagcgagagccagtacctggcccagctgtactccagcatcggcatccgggcctccgaggccgcacagcagctgctcggaaaggccaagtcgctgaaaagcgttggcggtcttgagcagttcgtccgggagttcatgctcgacgagccggccagcctcagcggggtggaagaggccctggagcagataaacccgctggtcgaggctcgcggcctgctcgatgtggcccggcgcaagcgcaacacgctcggcaacatcgccgcggtccaggcgcgttacgccgacgaggcggccaagttcggggtgatcgacaccatcgacaacgccatgatccgcgattacgtcgaccacctgcgcctggcccaggccggcccggagatcgccaatctcgacgatcagatcacccagctcggcgcccagcgcgacgagttcggtacccagcagcgtcagctcaagaacgagcacaactcgctgatggcccagatcaacaccgtcaccgtggatctggtgccgctgcaacaacggctgaccgaggccgagcggatcagcgaggaagtctcgcgtcggcgcagcacctacgaggacaaggtcacctcgcttggactgaccccgccggacaacggcgaggagttctggtcgctgcgtgagactttgatggaggaagccgaccggctgcaccgcgaactgttcaccggcaaccagccttacgtcgaggcgtcggccaaggaagtccgggctcgtgaggcgcgggagagcgtggaggccgagctggagcgggtgcagcggctgggctcgccgctgcctcggaccgagtacgagatgcgggcgcgtatcgcccgggcgctcgacatctccgagcgcgatctggtctacgtggccgagctgatggagctgaagccggacgagtcgcggtggcggctggccgtcgagaaggtgttgcgcggggccggattacgcctgctggttcccgatgcctacatggagcgggcgctgcgcttcgtcaacgagaacgacatgcgcgggcggatccagttgcagcacgtccagcacggctcgcagttgcgtacgccgcccccgaacacgctggccaccaagctgcagctcgccgacccgacacacgacagtgccgtggaggcgctcaacgtgatcgcaagcgtcggtgactacgtgtgtgtggacgggccgggggagttcaccgagcagtcccgtgcggtcaccgaccagggtctgcgcaaggacagcggccggctctcgatcaaggacgaccggtcgcggctgcggccctcggactacatcttcctcggtggcaccgcggccaaagtcgaagcgctgcaggatgatctgaccgctgcacaggatgtgtaccaggtggcgcgcaccgcccgcgagcggctcgacgagcaccgcggccagctgcaatcccgggaacgggcgtgccgggcactgtgcgaccagtacatgcagtggagcgacatcgacaccgattcggtcgacgagatgctcgagcggctgcaggacgaacacgacctgctggtgtccgacaatcccgatgccgaacggctgcaacaacgggccgacgagtgctgggagcgcgtcgagaaggtcatccagcagatcggctcgctcaacgaacgtgagaccacgctggatcgcaggcgcaccgcgctgcttgagctcagtgagctcctcaccgaacggatcgggtccggcgaattcccgtcgcatgcccgcgacacgatcgacggctatgccgccgacatcgccttgagccttgagttgctcgaacccgagccctaccgaaacgaactgatccgcgtcatcagccgggagcgggaccggctgcgggcggaccgcaaccgctcgcatgacgagttggccggcatcatgtccgcctacgacagctcgttccccgacgcgatcccgaacgacagcgatgtgttcgacgagcgggtgcacgactacgtggcgctgtgccgtcgtatcgacgagcgggaactgcccgacgcctacgagcgcatgcagcgcctgatcaccgaacaggccccgggcgcgatcctgaacctgcacatgatcgccgacaacgaggcgcggcggatcaccgagcagatcgcccgggttaacaccgggctgggcgcggtggagttcaaccgcggcacccggctgaccctgcacgcaggtacccggcacctggcggcggtcgacgagctgaacgagaaggcgcagcgcatctcggcgcgggtgtcactggtgagcttcggtgatgagaccgcgatgttcgagcagtacaccgacatactgcaactgcgaaagttgttggccggcaacacacccgaggaccggcagtggacccgcgacgcgctggatgtgcgtaaccggttcgtgctgtattgcgaggagcgcgacgccgagaccggtgaggtgatccggacctacagcaactccggtgacaactccggtggtgagcaggagaagctcatggcgttctgtctggccggggcgctgagcttcaacctggccagcccggacagcaatgacacccggccgctgttcgcccagttgatgctcgacgaggcgttctccaaatcggacccgcagttcgcccagcaggcgctgtcggcgttccgaaagttcggtttccagttggtgatcgtgtcgaccgtgcagaacagcacgacgatccagccctacatcgacaacgtggtgatggtgtccaagtctgatgcatcggcacccaatgcccggccggtcgcgtcggtcacctcggcatcgatctccgaattcgccgatctgcggcggacttccggggatgccgtcccgagcgcgtga

SEQ ID NO: 47262 - DNA, 1473 bp, Corynebacterium striatum
atgtctgttgaagcacgcgccctatcgctacggcgtttgatgcgcgattccgccgcgatccggctcttggccgcggacaacgcgcccgtgattttggcgttgatcgcggagtacttcccgcgcggtaccagggcgcgcccggcggcggaggtctatgagctcatggtcaccgatttcgaggtgctggccagtgagttttccatgccccgcactccacagaattactgcaatgattgggtcaaggccgggtggctcatccgaaaatccggaaagagctcccacggcgaaacgctcgaacccagcgaggaagccctgtccgcgctcgaagccattgagcgctgggaagcgccggtgaccacggtaacggcgtcacgtgtggaatcgatcagctccgcgctgcaaaggctagcgagggatacgaacgaggacattgctagccgcgtagccagcttggaggaagagcgcgcccgcatcgaccgtgagattgaaaaagcccgcagcgggcagttcgaaaggctcaccgccgcggaggcagaagagcgcgtccaggacgtgttgaacatggccatggctgtgccgagtgatttcgcccgggtgcgccacgagctcgaggccctcaaccaccagctgcgccgccagcttttggatccggagggctatcggggcgaggtgctcgaggagatcttcaacggcgtggaccacatcgcggagtcagacgccgggcgcagtttccgcggcttctattccctcttaatggatagggagcgcagcgcctggttggaccagtggatcacggaggttctcgacagcgaggccgggcaggcgctggccccggacaggcggcagcagctgcgcaggctcttccgcgatatggaagaaaccagcttcgaggtcaaccagaccatgacggggctggcacgcagcctgcgcaactatgtctcctccgagcagttcgcggaggaccggcgcatgattgaactactgcgggaggcccgcggcatggctatcgatgccgcacagtactccgagctcaaagcctttcaccggatggagacaccgctgcagcgcatcggtatgtcgattcattcggtctcccgtatccgcctggccaacccaggccgcgaagtcgtggaagaaacaccggtggcataccagccggaggcagaagacccgctagccttatatgagctggtgcgcgaatcggagattgatttcgaggaattacacgaggcgatacgcgcgacagtcgcccagtccggcccctgcacggttggccaggtgctgcaagcccatccccctacccagggccttgccagcgtggtggggttggtgcacatcgcagaccaacacccggtgcccgtgctgcgtcaatcgcgcgagaaggtcacatggaccgaggaagacggcacggtgcgctccgcccatatccctactctgtatttcgatcacacaaccgttaaggagctacagtga

SEQ ID NO: 47263 - DNA, 639 bp, Corynebacterium striatum
gtgacggccgcacacactccccgcgtcgattccgcccacgaaccaccgctgtgggagcacgataaaggctcgctgacctaccactcgcggcgcgcattagtacagctcttgcaggggccgctcattcgcgcacagaaggaaccggtgctgtgggccgccatcatctcggatgaggagaacctccgcgcccggctgcatgacgtattcctagaactcgtcgtggacgaaaccgagggcttcgcgtttactcggatggtggaagaagaaaccttgaccatcccgcaggtgctgcgcacggacaagctcaagcacatcgacaccgccatccttctgaacctgcgccaagagctggggcttgcgctgcccggcgagcgggtcatcgtggatgtggaggaccttcgggagggaatcggttacgtccgcgcggtggacaaccgcgatgaagccggtttcaaccgccgcttcaacgccgccatcaagcgtattcagaacgactactcactgctgagcgctaccgagaccgaagggcgcttggaggtctcgccggtgctccgccagcttttcgacgcctccaccgtcaccgccatccgtgacgaatacgcccgcctggcacaggccgaggaagagcaaggtagatga

SEQ ID NO: 47264 - DNA, 3369 bp, Corynebacterium striatum
atgactagcaacaccagcgtgtaccccggccagttccgcatcagccgcattcagctgattaactggggtaccttccacggctacttttccatcccggtggcgcgcaaaggtttccttatcaccggaggttcgggctccggcaagtccacgctgttggatgcgatgtcggcggtcttggttccacaaagccacctgaagttcaacgcggcttcgcagcaggacctcggccggcacaatggacgcagcctggtttcctacgtgcgcggcgcatggcggcagcaagaaaacgcgcagaccggtgaaatcgccccggagtacctgcgggagggcgccaccaactcggtggtcgccctgacctatgacaacggagcgggcaagcaacacacgctcattgctatcttccgcctcaacggtggtgagaacgcagtaggccagatcaagaagttgtatgggctggtgccgggtgatgaggacgtcgataagctcagccctttgctatcccgtagcctggacacccgcaagatcaaagccctgtataagggtcccggcgcgtcctttacgccgacgtatgccacgtttgcggatcgtttccgcaaacgccttggcatcaagaacgtggagggccagctgttgctccaccgcacgcagtccgcgaagtcgctgtccagcctggatcagctcttccgggactacatgctggaccggccctcgaccttttctagggcggaggaagccgtggaacaatttgaggatctgcgccaagcgtacctgcgggtggaggacgtcaaggcccagattgatacgctcgctcccctgccccagctgcatgctcagcgcgccaccgcggaggcagataagcacaaggcggaggccatgagcgaggcgctgcctgccgtgcgcgcccgcatggtggcagaggaactggactctttaatccgcgcgctgggtgcccaagaggtagaggcccagtcggaagtggcatcccttgaggccgatgttgcgcacctcgatgatgcggagcgccgcgccgcgatggccgtctctcagctcagcgccggcgagctcgatgccctgtgcgccaagatggagacagcggacaaggagattgaacaccgcttaaaagaattccagcgtcttgctgctgccgcgggccagtggaccgagcactatgagctcagcccgcaaggtttcgccgagctgcaggccaacgcccagctgcgcctctccgactttgagatcgactccgccgatctgacgaaccagcagcaagaagccggcgtggccgcccgcgacgcagccaccgcgtgcgcgcggctggacagcgaattgcgctcttttagttcgcggcgcaccaacatcgacaaggctttagtggagctgcgttcccaactcgcccgcgataccggctatgccgaatccgagcttcccttcgccggcgaactcatcgacatcagcccgcagcaggcggactgggaaccggtcatccaaaagctgctgcacggcttcgccgccacgctcctcgtcccggaggaagctcggaaagctattaaccagtgggtcaattcccgcaacgtgggcacccgcctggaataccgcaccatcccggagttcacgtcagcgcccgcctccgcgcgcagcccacggcagctcattcacaagctggaattccaggatcaccccatgacggcgtgggtacgccagcacatttcccgccgcttcaactatgaatgcgtggagtcggttacggaactggacaaggtcaccacaactccggccgttacccgcgatggcctggaaagccgccccaaggacaaggacggctccacgcgtttcatcaaggatgaccgctcgcgcttttccggcacagcgtggtaccgggtaggttccaccaacactgccaaaattgagctgctgcgttcgcagctagcgcaggccaaagccaccgccagcgccacggctaggcaagtccacgacctcaaccggaagatggacatcctgcgcacccagcgcgataaagcccagcaggtgctggaaacctccttccaggatatcgacaccgcctccgccgaggctcgccggcaggatctgcaggagcagtatgactcgctggcctcctccccggaggcccaagccctcgccgcagcccacgagcaagccaaggccaagctcaaggccgcacgcgccaggctgaacgccgcccagaagaacctgggcaacgtcgaaggcgagcttgagcgctcaaccgagcgccgccgtagcatcggtattgtgcccgacatcaaggaccaggacatcgcgaaagcagtcgaagatgccctgcacaagggcaagcgcaagctcaccattgatgacatcgatgcccggcgcgatgaggtgcaggctagtcttcagaacaccgcccgcaccgccacgcggcgcatcgaggacgccaacgccaaaattgtctctgtcctccacacatatctggcccagtggccggcggaggccgcggaccttgagccgcaggcgagcttcgctggcgaaggcatcgagaagctcaagttcctacgcgccgaccgcttggcggatttccgtgctcgcttcctcgagcttctcaacggctccaccgtgcgaaacctctcccacctcaccacagacctgcgccgtgctcgcagtgatattgagaggcgcatggaattcatcaacaagtccctggagcgctctcccttcaacggtgagcgcaccctgcgcatcgacgtcaaggatgctcgcggccaggtggtccaggatttccagcgggatcttgatgccgccacctcccacagcttgggcgaattcggctccgatgatacagaggctgcccttgcgcgctaccacgcgttggacaagatcttgagccgcttgggctcgagccagccagaggatagccgctggcgcaacgtggtgctagatacccgccggcacgtgagctttatcggccgtgagttgtacgccgacggaacgacagccaatacctatcaggattccgcctcgctgtctggcggccaagcacaaaagctcgtcttcttctgcctggctgcggccctgcgcttccggctggcggagccggaccaagacgtgcccacctatggttccatcattctggatgaggcctttgaccgcgccgatcccacctttacccgcactgccatgtccgtctttacgtcttttggtttccacatgattctggccacgcctttcaagctcatccagacgctgtctccttacgtggatggcacgattgtggtcaagtacgatgagcccaccatcaatggccgcccgcgggcgcgcacgggctattcgcttatcgacgcctccacctaccaggaccccgactatgcgcagccctaa

SEQ ID NO: 47265 - DNA, 1137 bp, Corynebacterium striatum
atgcgcagccctaaagacctgcaagcacacgcgtcgaaatacctgcgcaatcactttgccgaagcactggctgacccggattctgtgcgcgtcgactggcccctgcacccgcccactgccactgctgccgcccgcgatatcgacgccacgcagggcttcatccgtgcctggcagcgctggccccaccaggaggacgtcatctacgagtcccgcaattggtcgcgcgccggcctgggcacgaacaacataccggctcgcatcacaatcaacggtgccgaacgcatcgccaccgccgcgggccttaacctcgagtacgcccgcgcccgtgaacgagcacacagcatcgctgccgtctttcccgattcccccgacttcgcccacaccgtccgccgcagctatacccaatggaaggatttaagcgcctatgacctggaatgcctaggaccgtgcctgacttggctgcgcgccaaccctgactccggggagtgggagcgcgccgtgccggtcgaaggtgtggacggcaagtggattggtacccaccgccgcctactcctcacgctcctcgcgccgtttggcatcacagacttaggcctgcgccgtagcgacacccgagtccgcctgcgctacctcaaccacgctccagcgctcagcgatatcgaaatccccctagcccacgccgccacgcttttcccgcatacccctccccgcgtcctcatagtggagaacaaacaaactttcctggctttgcccacgctttcggacacctctcctcccaccgtcgccctcctcggtgccggcaccgccgcccaccaactccacgcactggactggcttaaccgcatcgacatcacctactggggcgacctcgacgccgccggctttgccatcctcaacgccgtgcgcgcccatttcccccacacgacgtcactgctcatggacacagccaccgtcaccgaattccagcacctggctgtccccgaccccggcgacggctccgccacccttacccacctcaccaccgaagagcagcgcgcctaccgccttctcttcactgcgggccggctgcgcattgagcaggagcggattccatttgctcatgtgaatgcggtgattcatgcaacgctcgcagcagcgtga

SEQ ID NO: 47266 - DNA, 1371 bp, Methylobacterium sp. ARG-1
atgctgttcgcgcagctgcccgatgagctgttcaagcccctggcgtccccgagccgtggcttcaacgccgccctgctgctacacctgcaccggcgcgtcctcggggcggagccagtgcgcaaggccgagttgctggctgagatcggcgatttcgccgccggctggagcgaccccgaaatcctgggtgacgagccgatctcggccgatcctgccgagcgccgcaacgccctctaccgccggctcctggacaccggctggctgatcgagcgccgagagcgctacgtgccggtggtcgagttcgaccccgaggcgcgcctcctgcttgaggagctgtcgcgcctggagcgcggcgagacccgctcgtatggcggcgcagtgctggaagtgctgggcggcctggagagcgccgtctccgatccggccaaccgctccgaggccctatccaacgccgcgcgggcgtccgccgccttcctggcccatgtccgtggcctcgccgccggcatgcgcaaggtcgaggaacggatcctacgcgagcccgaccgggccaagaccttccggctgttcttcgaggatttcgtcgagcgccacctgatcagcgactaccggacgctgcacacccgcttcaacccgttccggttccgggccagcgtggtccgcgaggccggccgggccctgcgcgacgcccttacggtgcgggcgctggccgagggcctgatccgcgagggccgcagccccgatctcgacaccgcccagcgggcggtccgggcggatctcgcccaaatcctgtcggtgttcgaggggctcgacaaccatctcgacgcggtcgatgccgtggtggcgcgcctggagcggcggatcggcgccgcgctccacgccatggaccggccggacccgacgggaattgagcgcaccgccgcgatgctgcgcgccgtcggcgccgccgaggtggcgcccgacgtgccgccggtggtgtcgctgctgcggccgccgatcggccaggcccacctgcagacgccccgcgcccgccgcagcgccatcgatgtcgagccgctgccggatgtcgattacgaccccgcggtcgacgccttcgccctcgccaaggccgagttccgccgccggaccacggtgacgccggagaccatgaccgccttcgtcgaggcgcggctcggcaaggccgtgtcgctgcgcggctcgcagatcacgatcgagggggtcgacgacttcgtggtgttccagcgcctgcgcgagatcgacgtgctgttcgatgcgcggctgcgcgaccgctacgccgtggtccggctgcccgagcggctggccaatggctggctggattgcccggatttcgtgttggagcgtcgcgtcggtgcttga

SEQ ID NO: 47267 - DNA, 627 bp, Methylobacterium sp. ARG-1
gtgcttgaggggtttcgcgcgatcatcgacggcgacgagccgccgccgccgggggcccgggcgcccgatgccgaggagctgtgccgcgccctgcaggtgatgctcaagggccaggtgatctacgccgacacgcccggcatcggccgctcctacgagctcgcccggcactacgcgccgttcttcgccgactacttcgcctgcctcggctacgcgctcacggtctcgcaccgcgaccagatggtctcgctgagcccggccgcggacgcgccccggcacgacatcgcctccgagcgcctacgcaaggatgagaccctggtgctgctggcgctgcggctgctctacgaggagggcctgcgcgacaaccgcgccggcaccgacgggatcgtcgagtgcaccaccgacgagatcgtggagaaaatccgcgcggcggcgcgcaacgagcccccggaagagggccggctcgccgacatcctgcgcctctatgcccgccgcggcggcctcaggatgggcgagcgcgaccgggtcgagcgggtgacgccgctgtcgctgctgccgggtctggcggtgctcgcctccgacgcctggctggagcgcctgcgggcgtggtcggaagccggggagctctga

SEQ ID NO: 47268 - DNA, 3438 bp, Methylobacterium sp. ARG-1
gtgtacgtcctcaccgatatcgccatctccaattggtacctgatccgccgcgagcagatccgcctgcggggcgccgccgccctggtgggaccgaccggggccggcaagtccacgatcttcgacgcggtcggcacggtgctggccggcaacaatgccagccggctggcgctcaacgcctcggcctccgggcgcagcgcccgcacagtgcgcgactattgcctgggctggatcagcgacccggccgagggcggccggccgacgcgcgaatcctgcgagaccgtgctcgccctggtgttcgagaacccggcctcgggccgcaccgtcacggtcgggctggcgctcgccgcccgggccgtggagccgcgcgagaccgtgctgtcgcgcttcatcgcggtcgcccatcggttcgagatcgccgattacacccgcaccgccccgggcggcagctacacggcgccgtggagcgagatcgccgcagatctgcgcgcccgggccgcgagcttcaccgaataccgcacctccggcgagcgcttcaccgccgacatcctggcgaccctgcgggagggcgcgccctcccccgagccccggcacttcctgcgcagcttcgccaacgcggtggcgttcaagccgatcttcgataccagcgccttcgtgcgcgccttcgtgctcgacccggagccgctggatgtcgagcgggtgcggctctccatcgccaattggcgccgcctgctggagacgatcggcgagctggagagccggctcgcccgtctgcgccgcctgcgcgaccgctacgatgcctggagcgaggcggtgctggccgccgcgacccatgatttgcgggcggcttgcgccgaattgcgccgccgcagcctcgacctcaccgcggtgcggttgcggctgcgcgagggcgccgacacgctgcggatcgcccgggagcgcgtcgcggcgagccgcgggcacgtgcgcgagatcgacggcgagatcgccgagaagaaggccctgctcgccggcagcgccgcggaggggcggctggccgcctcgacgctcggcctgtcgatgctggagcgggaccggaaggagctggccgcgcgggtttccgacctcgtcggcctcgtgggccagatgggcaagctccagccggtcgccccgatcctgcgccaggcctgcccgccagcggcgcggctcgccgaatcctgtgcgcgcgccggcctgcgccgggaatcctcgcccgaagagatcctgcgcccggacgggcccctggccgagctgatcgacggcctggcgcgcctacccgaattcgacgaggccctggagcgggcagccgaggacgctgcgctcaaggcccgcgcccaggagagcgaggccgagcgcaccgcaccccgcaccggaggcggctcggccgcacgcttgtcctccgatacggtggcgttccgcggcgagctggagcggcgcgggatcgaggcgctgccgatctgcgagctggccgagatcgtcgatccgacctgggggccggcgctggaaggcctgctcggccgcgcccgcgaggctttggtggtctccccggatcggttgagcgaggccctgggcgtgcttcagtcgggccgcgaccggttccaccgctgcatcctggtcaagaccaccgacaccgccaagcagcggtcgcgccgctacgacgacgggccgctcaccgtgatcgagacgagcgacccgcacgcggaggcgttcctgggggtgcggctcggcggttacgacctcgcccgggacgatgccgaactggcccggctgtcccgcgccgtggcgccgagcggccggaccaccgccggcatggcctattcggtgacccgcaacgtcgacctgctgatgacccgcggccatcgcggccccacggtcgacagccgccgggcgcacgaggccgcggtcgcagaggcacggcgcctgcgcggggaggccgcggtcctgcgcgaggccgcccgcaccgccgcggcggtacgggcgcgcatcgcccgtggcctcgacgacatcgacgccctgcgcagcgagctcgacgggctggagggacggcggcgcacgctccagaccgagcgcgagggcatcgagaagcgcgacaatgccggcctcaccgccgagatcgcggcgctgaccaccgaacgggtcggctatctgcgggaattgtccgaagagctagagccgaagctcgaccgcttgctcgccgacgaggcggctttgcgggcgcgccttgggcccgtgcgcgaggcggctcgggccgccctggcggcgcggcgctcggccctgcggcaggtcatgggcggcgacgcggcgcgggtgcgcctcgctcgctcagaatcgttcagcgtcggcgtgatcgcggaggcacggggcgccctcgcgggcctcgacgccaaggccgccggcacgcgggctgcgacggagcgcggcctcgcccgggaggccgccgaggcggctcgctcgcacggtcggatcgccgagcgcgagctgaccgaggcctgctcggcttggcgggtcgagaatccgttgaatgccggcgacgccccggcgatcgacggctatgcctgggtccggcgggaatacgaggccgttgagggccacgagctgcgccgctaccgcgcccaggccgagcgggccgaggtcgagatgcgccggctcatgaccgaggatctgctgacacgcctggccgaccggttcgagcgggtccatgcccggctcgcggccctgaacgagcggctctcggtgcgcagcttcaccggccagacctacgccttcgaggcggcggtggaccgccgctacgccgccgtccacgcgctggccaccgagaccgcccgctcgccggaggccgcgcaggcgctgctggcgggcgagaccgaggggccgatggcggcggctctggaggagatcaccgcgctgatcgccggccaggaggatgcggcccgcctcgccgattaccgcaactacttcgtctacgagatcggcatgaaggacgcggccggcaaccgcaccaccatgtcggcgcgggccctgcgcggttcggggggcgaggcgcaggcgccgttctacgtggcgatcgcggcctcgctcgccagcgcctattacccgggcgaccggcccggcgacgagaatccggggctggggctctgcctgctcgacgaggcgttctcgaagctcgacgtgcgcaacagccaggcgctggtcgatctctatcgcgcctgggggctgcagctgctgatcgccgccccggaggacaagcgcacgacgctgaccgaggtgatggacaccatcgtcaccgtctacaagagcccggatctgacgtcggtgcggatcgaggccgagcatccgctggaggcggcgcgccgggcgctgcacgcgatcaatccggagcaggtcgggatcgagggctaccgccgctcggacgcggcggagtga

SEQ ID NO: 47269 - DNA, 1449 bp, Pseudobacteroides cellulosolvens ATCC 35603 = DSM 2933
atgaaagtctttgatgttataccgggtcagtttttcaggatactgacaggaaaaaaccgcaatgtttatgtagaaatacttctgtccctgagaaaagccttcaagaacgaactttacatagataaggaaagccttgttaatatatttgcagaatgtcttggggatctaatgatccccattgacattgaagcagaactggaagaagccctatccgacttatcggacataaatatagaagggccccaatccatcacatggtcctctatggctcatctaatattacgcaggcttcgtgatacaaactggatcgaaattgagtacaaacagcgatcctatgatgaaatagtcactatacctccgtattccgtgagcatgattgaattcctgcattcaattacacaggagaacactcaaagctacaagtcatatgcttttaacacctattcatccttaaagacagttttaagtgatgattcggaggattacctgtttactgcattggagtccgcgtacaccaactgcaatttgcttcgggactccctaaaggtgttactaaacaacatacgaaggtaccatcaaattttaaacaattccgcagctgccaatgatattttgaagaaccactttgaaggttaccaggtgctggtgaatgagagaatattccaccctctggtaacaagggactctgtgctgcgattcaaagtgcccataatgaccatgatagacaaaatccgttccaatgaagagcttagaaaacgcatagtagctcttggtatcaaggaaaggcaatacaatgatccggaaagcggtatggaagagttatcccagaagttatatgagatttacgataccttcgaggggatagacaggctgatgcaggagatacaaaacaagaactcggcctataccaaggcctccatagataaaatgatatatcttttaaactatgaccagagcgtaaaaacaaagcttgcagacatattgatgaaatattccgatctggatgaagacaaaaaagaggttgtttcatcatctttaaaactctttaagcagagctatattgatgaaaaatccccatattgcagatcaaataggaagatacggtcctttgagccgcctgagaaaattaaaatcactaaaacagagcatccggaaaatgagctgagtgatttcctgaaaagcgttaaaagcctatatagccagcagcaggtcgctgagtatatggaaaaggaatttggaagccgaaaggtgcttaatagccgggacctttacataaaggatgacaggagctttgtcatgatgcttctggctgcaatgaggtcaggagaaaaaaggatcttttatgatgtggaatttttagaaggatatattgaaaataagggataccgatacccaaatatgagattcataaggaaagatgaggaaaacaatgacaaacctttggattga

SEQ ID NO: 47270 - DNA, 735 bp, Pseudobacteroides cellulosolvens ATCC 35603 = DSM 2933
atgacaaacctttggattgaagaattcgaaaagcttagcatatcagagcaaaacatgttccgaaaatgtgtgaacagtattctggcaaaaacttttaccataagtgaaacatatgatgaagatacaggtatgatgaaatccaacccggagtatcgttttattgaccgtaactttgaaattataaatacatatttgtcatatgcaggctggaacctattaaaggacagaaacctgggagttatatatattgaaagcgagtatgagtataacagattgcatcttaacagcattacaactctttttatatacacattgcggcttttgtacgatgaagagcgtgaaaagcttacattaagatctactataccagttaccacatatgatgtggtttcacgcctcatgaccttcaatacactgaaaagaaaaccttcggacaaggatttaagcgataccttcaagcttttatcccggttcaatatcatacaaaaactgagcggtgactggacagagcctgattgcaagctcattatatttccatcaatactcatggttctcccaaatgactcaattggaaggatatttagcagtcttcaggaagaccttgcttcagatttgcagcccaatggagatgaacgtaatgagatagatgagacttatgagataggtgagacttatgaaaatgatgacgttgatgacattgaccctgatgttatacgtggagaggaaaaccaatga

SEQ ID NO: 47271 - DNA, 3408 bp, Pseudobacteroides cellulosolvens ATCC 35603 = DSM 2933
atgaaaaaactgacacgccttctgctggttaactggcattattattctctagaggttattgaatttgatgatataaacttccttaccggaaaaaccggtgcaggtaaaactacaatcatagatgcaatgcagttggttcttttaggagatacaaatgggcagcattttttcaataaagctgccaacgaccgttcacgtagaacgcttaaagggtaccttcgcggtgaatacggtgatgacggccagacaggttttttgtctttaagggaaggtccattttccagctatattgtttgtgaattttttgataccgaaaaagatcgctatttgaccttgggagttgtatttgactgcaatttctctgttcaggatgaaagcacctattttatactgaaggagcctattcctgaaaactacttcatagtagatgaaagtcctctttccataaaggatctgaaggcttacctcaggaagaattacgataagaacctttttgagttcagtgaaagcggaagagcctatcaatctaaaataaagagcctttttggagggcttcgtgacaactacttcagtctcctaaaaaaagccgtatccttttcacccattgtagacattgaggagttcatcaccagtaatatatgtgatgcaaaggataatgtggatataactgcaatgcaggaaaacttgaggcattacaggaagcttgaacaggaagccaaccttatgaaatccagaattacagacctggagaatataagcaggaactacaaggctttgcaggatgaaagacaaaagcttgatatatatcaatatctaatcgacagatcggaattggaaaaaaacctgctggaaattaataagattaaggataatatagaaaacctggaaaaccaatatgctgaaaaagctggaaaccaggccaaactagcagctgaaatcatggaaaagtccacttcccgtgacagccttattgagcagcgggggaaggataacctttaccaaaaccaacaagcccttgagagtgagaagaaaacaatagaagaaaagataagatcttttgaaagcactatcaatgaactggtaaaccgcttccatatatacggtcttaactggagttctgcggcagaagatactgagaacctcataggacatgttgggagactaagtaacaaagactctattaatgatgagctcaacgagctctatacaagtcttactagctttaagcatggaataggaaagctgcttgatataagggattacaacctatcaagcttaagcagtgaccagtaccataagctgatggaatcaggagattcttttaaaacctctctttccaatcttgggcatatgcttagtaagcttttggattcaaagtcccttgtccttaaagaatgtgaagaaaaaataattgctcttaagaggaatatcaagccttttgaccgtacagtgcagactctgaaggaagaacttcagcttcgtctctcattgaagtataaaaaggacattgctgtaaatatactggcggaccttctggaaattcccgatgcaagatgggtcaacaccattgaaggatatatgaacagacagaagcagtatatactggtagctccagaatactatcctgaagcccttaagtgttatgagcaaataaagcttgataaaggtatttatgatatcgggcttattgacggagaaaaagcactttcctctaacccggtatgtttaaagggaagccttgctgaggaagttttcactgatgatccatatgcccgtgcgtacgttgactttttacttggcagggttataaagtgcgatagtgttaccgaccttagaaaaaacgaccgctctgtaacggatactggaatgctctatcaaggctatgttgcaagccaaataagtccttctctttggcaaaaacctcttataggtaaaaagtccattcaggagcaaattgcaaggctggaactggaaaaaaacgagctggaagaagattataagctcatcaagtcttcttttgatatgtttaagaaaataaggcatatagatacaatgaaccagaatgaagcacaggataacgacagaaagcttcaggaatcaatggccatacccaatctgcagtcaaggaagcaggaaatattagacaagctctcacaactagaccttgcgtggattcatgacataagcaatgaaatcaatgctcttggaatagagattgaggaacttaaatcccttgagagggattgcatatcaaaatgcggggtacttaaagaacgcatagacaatttacgtgatgttcagcttcctaatgaaatagcacagtctgagattaaaaacaagcaaattacggcaaactattcaaaggaatggatatcggaaacaggtgaaccaaggtttatagaagaactgtcaaataagaagaatccaaattcaataatagcagaccataggtcttcattaggtgctcgtagaaatcagctggaaaagcatttggagctccttttaaacctccgctctgagtataaccgcaaatatggctacagctacgacatcggtgcacgtgacaatcaaaaatacgataagacccttttagagcttcgggaagaaaaactgcctcagtatctggagaaaataactggagccaaatcaatggcctatgagcagtttgtgagtcatttccttgcagagcttaaggccaatatagatgatgttaccgagaggattgcagaacttaataattcacttaaaaagcatagatggggttcagagcaattcagtttttccgttgtacccaatcctgattacaagccgttttacgatatgattaccgacccgatgctaatgagcggttataatattacatcccatgtttttattgaaaagcacggcccggtaattgatgagctgttctcaaaaattatggattacggcagcggcatggacgcagattccaggctggaaatggagaaaaacatcaaactctacaccgattataaaacctatttgagatttgacatgtactcctatgaccaggataacaacaggcagaggctctccaagacattgctcaaaaaatccggcggcgaaacccagacaccgttttacattgcaatgctggcttccttcgcccagctttaccatgttaatgatcggaactggaactgcataaggcttattatttttgatgaggccttcagcaaaatggatggggaaagaataagagaaagtatattgcttctccgaagtatcggctttcagtgcatattatctgccccgcctgaaaaaataggagacatagcacctttggtggataggaacattgttgctattaaaaaaggccgccaatcatttacaagattttttgccggaagtaagctgtctcaggagtttgcaagcagcctggaatag

SEQ ID NO: 47272 - DNA, 1182 bp, Vulgatibacter incomptus
atgagccgcctcgtccaggtgctcgaggacgacgagcgcgcacagcgcgtcgcggcgatccgcgccctgctcgcgtcgcccctcctgtcggcctcgagcgacccggagatcttccgaaccgtcgtccggcaacgcgcgtacctgaccgaatggttcgcgagccatccgggctggcggctggtgatcgatccctccggcggctacgcgcgcctccacaaggtccccgggcgcagcgacacgacgaagccggcccgccgggccgacggtacgccgttcgatcgccggcgctacgcgctcctgtgcctcacgctcgcggcgctcgacgacgcgccggtgcagaccaccgtcggccgtatcgccgccctcgtcgaggaagccagcgcggacgacgaggaaggggtcgccttcgatccttcgctcgccgctgagcggcgggccttcgtcgacgccctgcggctgctcgtctcgctgggcgtcctgcgcgtgcgggacggagacgccgatcgctacgcgcatacgcgggagggagacgctctcctcgacgtaaacgagcgcgtgctcggccaactccttgcggcgccgatccctccggtcttcgccgggaccccggagggcatgctggacgagcagctcccggacacggacgagggccagcggctctcggcccgctaccgggtgatccgccgcctgctcgaggatcccgtgctctactacgacgacctcgacgcgcgcgcgttcgactggctcgatcattcccgtggctttctctacgccctcctcgaggacgacgtcgggatgccgatcgagcgccgcagggagggcctcgccgccatcgatccggagggcctcgttacggacgagcgcttccccgacggcggctccaccgtccggcacgcggcgctcctcctcgcgtcccacttggcgaagcagggggagcgggacgtggccgtggagcgcggagcgctcgtcgaggtcgtcaccgcgcttcaggccgatcattccgagcgctggagcaagcagtactccgccgacgagcagggggcggcgcagctctgcgaggaggccgtcgcgttgctcgaggccttcggtctggtgcggcacgaaggcgatgggcgcctccgcgtccggccggccgtcgcgcgcttctcgcccggcgagccgaagaaaaagagggcacgatga

SEQ ID NO: 47273 - DNA, 2064 bp, Vulgatibacter incomptus
atgaaagtcccgctcgacctccccgtcgcaagcaccggacgctggcagctcctgcgcgccggcatccagaacctctgggagtacgacgaccagcgcttcgtcttccaccggggccggctcctcctccgcggacagaacgagtccggcaagacgaaggccctcgaggtcctcctccccttcctcctcgacgcaaacctgcagccgagccgccttgatcccttcggcagcacgtcccgctccatgcgctggaacttgatcggcgactggaacccggaggcgaacacctcgatcggttacgtctggctggagctggggcgggtcgagaacggcgagacccgatactgcaccgtcggcgccgggctgcgggcccggcgggcctccaccgacaccgacgcctggtacttccgaacctctcagcggatcgacgtggacctgctcctggtggaagaccggctccccctcgagcgccccgccctcaccaaggcgatcgacgcacgcggccaagtctaccaacaggctgccgagtaccggcgcgccgtgaacgacgagatcttcggcatggaggaggagcagtacgggtcgttgatcgacgcgctcttgcagctccggcgcccgcagctctcgaagaagctggatcccgaggagctctcgcagatcctctcggcgagcttgccacccctcgatcgcaccgtcgtcgcgtccctcgccgaaggcttcgagcggctcgataagcaccgactggagcgggacgacgtctccgccaccctccagacgttgcgccgcttccggaaggtctacgaacgctacgtcgcctccgcggtgaaggccgcggcgaaggatttgacgaccggcgagagctcctatcacatagcccgggagtccctgcgcaaggccgaggaggagctggaggcgctctacggcgagaggaaggcactcgccggggagatcgccgcgctcgacgcagagcgacaagagctcgccgcccggctggcggccctgcgctcttccgacgggtttcgcgcggtcgagcatctcgcggatgcggagaggctggcccagcaggaggagacgcgggcccagcgcgaaggggtcctcgcggcgaaggaccgcgaggcggaacgcgtcgccacggcgcggctgggcgaggccgagaaggagagggtggaccaggggaagcgggcggaggccgcgcggcggagcacggcccgggctgcagaggatgcatccctcggccaggatcacgccgggatcgacgagctgttcgatcggggcgagctcgaggcggcggcgagcgcgattgagagcttgcacggacggcgcgagcagcacctcgcccgtctgcgcaagctcgaggacgcggcactggatgcgcgcaagcgccgtgaccgcgcagcgcaggcgtttagcgacgcaacggatcgtgcggcggatttccgcgacaggctcgaccgggcggagaagcaggcgcaggcggttcgttccgagctggaagattcgatcgggcgctggtcgcgagggctacgggtgctcctcctcgaccccgacgacgtgcgcgaactcgcgcccctcgagacgccggagcgggtgaggcgcgccgaggaggccacgcgcaaagccctcggcgaccacctgacggccgcgaggctcgagctcgagaaggtgaaagaggagctcgaagatcgacgacgcgagcacgacgagctggcggccctcacccaccggcctccgtcggcgcccgcgtggagggccccgcgcccgaccgacaggcccggcgcgccgctgtacctgctctgcgacttcgacgacggcgtcgacgagacggtccggggcgcgatcgaaggcgcgctcgaggcggccggcctcctcgacgcctgggtcgagccttccggaggtctgctggacgccgacaccttcgacctcgtgctctcacccgcgccgctcgaaggcagaacccttctcgacgtcctccgtccgatggagggtcccgttccggcgccggtggtggaaaccctcctgagctcgatcgcgcttacggacgacgggcccggcggagaagagagctga

SEQ ID NO: 47274 - DNA, 1251 bp, Vulgatibacter incomptus
ttgagcgcagacagggagaagatccggaccctcctcggagggccgcgctacgaaacgcttttccgagaggcccgcaagcgccgcgaggaggacggccgcgaggcgcgggcgttcacgctccggcgcgcgaacgttgacgagcggagggccgccgccgatctcttcgggtggcccctcgtgcctaacgggaccatccggatctccctcgatgagctcgatcggcagcttcgcgcgagtgccgtcgaagccgggctcgacgaggtgctcgaggcccttggaggcccgctcgtcaatcggcgcgcgctgcgggccgcgaccgcgatcgagcgggagctgctctgggagggagccgcgcgagcggtcggggagcggccggagctacgggcgtggctcgacgaccttcggagacacggtctcgtgtcgcgagcggcgcacgccttgagcgtgggcgaagaggttgtgctcgagcgagcgatcgccgccgcatctcggctacccgcgtcgggcctcgcccttgctgtgctcgcggcggagaccacgggggacgctcacgcgctcgacgccggaagccctcttggcggactcgttctgcgagccgcggcccgcatcgccggctggcacgagccgccgtccactgcagcgcccagacgtgccctctggggcgaggtcggcatcgtctgcgatcccctctcggcgcaggttctcgtcctcggcctgtgcctgcagggcgaggggaggctctcgcgccggttgcgggacgccgcgctcgacggggagccccagcgtctcacgctccgcgagattggcggtcgggatcttcggccggatccggcgggcgagattttcgtctgcgagaacccgagcgtcgtcgccgcggcggccgatcgtctgggcgctcgcagtgggcccctcgtgtgcaccgaaggcgtcccctccaccgccgccctgggcctgttgcgcgagctcgcccgcggcggcgcaaggctgcgggtccggggagacttcgactgggccggccttcgaatcggcgggcaggtactccgggaggcgggaggccagccctggcgcttctgcgccgacgattacctggccagcctcggcaccggcgccggccgcgagctcgagggcgctgcgggcgcctcgccctgggacccggccctggcgagcgctatggcgcggcacggcacggcagtgtacgaggagcagctcctcgacctcctgctccgggatttagaggtcggctcgtcgtaa

SEQ ID NO: 47275 - DNA, 669 bp, Arthrobacter sp. Hiyo6
atggacaggccgttcacctcccggctttccccgacgcaagtgaggactctgcgccggattctgcccacgcttcaggaccgcagctcggaaatccatgccgtcatgactgcgttcagccgcagcctccgccgttttgtccagtcccaggaatttgaacaggaccgattgatcaaccagcggctgcgctctgcattgcggcaagccatggagacctcgcaatcggtaaagccgtttgtcaagacggaattgtcgctggatctgaccagcgtgccgctcaattcggtggcggctctgaatctgcacaatccggcggacttcgaagcggccggcgagatcgcgcagcacgatgccgacacggtggacattgaggaactccgggcattggcccgagcctccgagatcgacatggtcgaattgaccggcaatctcaatgcggtgctggcccgccaaagctcggcgaccatcgccgacgttttggcggagtacccagccacgcaaggtgtggcaagtgtcgtcggactactggtgttagcggaggaacacgccaccgcgctggccggccgcgagaatatcagctggcagtaccccgcgaacaccacggatggccctggcatcatccgccgcggcaccgtgggccgctacctcttcaccgaaaggattctcccgtga

SEQ ID NO: 47276 - DNA, 675 bp, Arthrobacter sp. Hiyo6
gtgagcgaatcaggcgtgcccgggccagtcgggggcgaggggccggaatccgacgtcgcgctgtggggcggcgacaaggggaccctgcgcgagccctcccgccgcgtcctcgtgcagcttctgcgtggcccctatctttccgcttcccggcacgggaacctctggacggcgctcttgtccgatgaggacgcggtgcggtcccgtttggcggaccttttcctggaccttgttaccgaccacgccgcacaggttgccttcgtccgtaacacttccgcggatgttgacgcgccaaaggtcatgcgaaccgccacactgacgttcctggacacggcgctgttgctccacctgcggcaggcgcttcttcaggaaagcggcggccgcaagaccattatgggtgcggacgaggcggccgatcagctgcaggtctacagaggcaaggacaatgccgacatcgcgggattcgccaagcgcatcaactcgtcctggcaaaaaatggtcaaatacgggctgctggccgcaacaagcacggagggccgtttcgaggtctcacccgtcttgaggctggttttcggcacggaggagattgctgcagtgcaggcggagtaccagcggctggctgccgaggcggagcccggctccgcggagctgcccgacaccggggaggagacagagtga

SEQ ID NO: 47277 - DNA, 1281 bp, Arthrobacter sp. Hiyo6
gtgagcatcacgacggcggccgccgcgccaggcatcaggacggggcagtggcggctggaacgggtggagctgatcaactggggaacgttccagggccaccacggcttggatatctcacgaaaaggcttcttgctgacgggccactccggctcgggcaagtcatcgctggtggacgccgtctctgccgtgctgacgccacgaggaaagctgcatttcaacgcggccgcccaagacacctccgcccggggagaagaccgaacaattgtgagctacatccgcggcgcgtggcggcgaagcgcagatgacgagacgggcgaagtgcgtgcggaatatctgcgcaccggtgcgacctttagcggcatcctgctgcgctacagcgacggcacgggcgccaagccggtgctcctgctcaagctgtaccacttgcgccggggctccaacacgcctgccgacgtcagcgagttgagcatcctcctgcaggaggacgcaaagctcaccgattttgtcgactacctgcgcaatggcatagagacccggcgtatcaagagcaactggccggccgcgttcgccaccgacaagcattcggcttttgccagtcgcttctgccgcgtgctgggaatctcgggagagaacgccgtgcttctgctgcacaagacgcaatctgccaagtcgctgggcagcctggacgacctattccgccaattcatgctggacaggccaaagacgttcgacatggccgataccgcagtggcgcaatttggtgaattgtccgaggcccaccggctggtggtggaggcccgcgaacaggtggagcatctgcggggcatggaggaaccggccgtcgcgttccggctgaacagcggccgtgcagcagaagccgccgcgctttcctcagccttgcccagcttcaaggatgaatggaagctcaagctgtccgtggaggcaaaggcggccgccgagtctgccgtgctgaccgcgcagcacgacttcgagctggcggcttccgtcacggcagagttggaggaggctcactcggctgccgccggcaagtggacggccatggcgggcaggcgatgcgcgaccagcagactcaggtggacatggctcaggaacgcgaaggcgttgtcctggggcgcgcgccgagttggcttcaaagttggaagcggtaggcattaccttccccgccagcttcaaagagtacgaggaacttcgggccgcggcccgcaccgaacgcagtggcctggatgccgcccgggcggccagcaggcaggccatcaatga

SEQ ID NO: 47278 - DNA, 181 bp, Arthrobacter sp. Hiyo6
ggcgtggagccagcttcctccggaggaacgccacatcaactcgatccgtgccctgctgacgcacgcgctccacgacggggccggcttcgaccgggacggctgggaagccgtggacttcgaacagatagacggaaccacccgcacggcgtacctgccggtggtcacgctcaagaaggactga

SEQ ID NO: 47279 - DNA, 855 bp, Arthrobacter sp. Hiyo6
atgactgaagagattacgacgacgaccgatcgagtgaccgctgccccggggtcggcgtccggtgctgggcgtccccttgcagtcacaccgcgggacaccttcgtggacggcgcggcgttgtttcccggagataccggggtgctgtccatgaaggtccgccaggccctcgtgaaactgctcaagggcccgtacatcgacggtggccgcgacgaaaagctctggaccacgctgctggacaatcaaataatcctgcgcagccgcctctccgagcttttcctgacgctgcagctggaccacgaacgaaagattgcggtgctgcgcccggtggaccccgagtccatcggcgggagtacccgctccagcatcctgcgccaacagcgggccttgagccgggtcgaaaccatcgtgcttctgcgcctgaggctgcttctggaccgtcacgtcactgcccagaccgaccccaccatcaggcgcgaggaaatcgcggaactcgtggcccactaccagccgtccggccagcaggacgccttgcgggattccgacgtcgtgaaccgtgccatcaccaagctcctggcccgccagctcctcctcgccaccggcctggacgacgtctacaccatttcgaacgcgctcccgctggccctcccctttgaaaacatcggtgacatcccggcccagatcgaagccctcgtggcagcaaccgcggaccagtccggcacggaacccctgatcgaactcgacggcgaggacaccgttcgctccgatgacgacagtgaagacgatgattcggtgaccgacagcagcggtggcgccgcggaaggcgaccaaactgacgaagtggaggcagccaagtga

SEQ ID NO: 47280 - DNA, 306 bp, Arthrobacter sp. Hiyo6
gtgagcatcgcaaccatgctgccgataggcgagctgaccaacccgggccagatgcgccttgcgctcgtccaagtggtcaactggggcaccttccacggcgcccacaccatgcgtgtggaccgaaacggcacgctcctgacgggcaattcgggcgtcggcaagtccacgctctttgacgcgatgctgcgcgttttcgacgcgcgcccccgttccaacgaagcggcggcccaacgctccggcggcgcgtggaggacaagcggaccacgttcacgtacatgcgcggcaaggtgggtgacaaagccgtag

SEQ ID NO: 47281 - DNA, 1467 bp, Corynebacterium riegelii
atggctcttcaggcacgggcgctgacatttaagcgtcagaaagaacagtcggcggcggtgcgcctcttgcacgccgacaacgcgcccgtagtcctcgccatgatcgcggagtacttcccgcgcggcgccgagccaagacccgccggggaagtgtacgagctgatggcggccgactttgcgctgctgcgcgacacgtttgatctgccgaagagtccgcagtcgtattgcaacgactgggtaaaagcgggctggctcgttcgaaaatctggcactcaggtcacgggtgagacgctggagccgagcgaggacggcctggttgcgctgcagatgatggatcgggttgggggtccgtattcggcggtgacggcgagtagggtggcgtcgataagcaatgccctccaagacctggcaagggacacagacccggacatttcaacgcgcctgaagcacctgcggaggcagcgtgatcgggtggacgaaatgattgcagatgtggagcgcggcgtgtttgagctgccttcggatgcgagtgtgcaggagcgggtgggcgatattttgggcatggcctctgcaatcccgagtgattttgcgcgtgtgcggcatcagttggaggtgctgaatctggatttgcgcaggcagttgctggacccggagggcagtcgcggtgatgtgctagcggagattttcgcgggcgtggacgtgatttcggagtcggatgcggggcgcagcttcaacgggttttatcggctggttgtggattcggagcatggcgcgtgggtggagtcatggattggggagattcttcagcgggttggtccggaggtgatggattccaagacgcgttcgcagtttaggaatctgttccgcaatcttgaagacgctggttatgaggtcaaccgcatgatgacccgccttgcgcgcaatttgcgtaattatgtttccagtgagcagtttgctgaggatcgtcggatgattgagctgttgcgcgatacgcgcaggcttgcggcggaggcggcggaggctgaggagttgtcgccaaccaagcggatggaaactccgttgcagcgtattggtatggcggtcagttctgttgcgcaaatgaagttggcggatccgggggcggaggtgattacgtcggatgtggagcgttttgaggccagtgagggggatgcggaggcgttgcttgagctggtgcgcgagtctgaaattgatcttgaggagctgtccgccgctgttgctgatgcggttgctgagctaggcaaaccttctattgcggatgtattggagcaccatccggcgacgcaggggttggcctcggttgtgggtttggtttatttggccatgcggttcggggtgcagcttgatggcagggaatcggttcgttttgaggaggacgatggggcagttcgcttagcgacgttgcctctgttcaccttcgacaccacatcagtggaggaaatgcgatga

SEQ ID NO: 47282 - DNA, 624 bp, Corynebacterium riegelii
atgacggaagcactgtggagtggagatacggggacgttatcgtatgagtcccggcgcgcgttggtggatttgttgaagggtccgctgattagcgcggaccgcaagaaggacacgtggaacgccattttgagcgacaaggaggcgttgcgcagctggctgcatgacgtgtttttggagctggtgattgatgaggaagccggcattgcgtttacccgccacgttcgccccgacaacgacgacgtgcatgtcccgccggtgttgcgtacggattccttgacgcacctgcagacggcggttttgctgcagcttcgccacgaactgggtatgagtacgccgggggagcgcgtggtggttggtgaagatgagctctacacggcgatcgggtatgtccgggcggtggataaccgtgatgaggctgggtttaagcgtcgttttgatgcggcgatcaacgccatcaagaacaagtacagcctgctcacggagacagaaacggaagggcgctacgtggtctccccagttcttcgccacatttttgatgcggatacggtgtacgcgctgcgcgaggagtacctacggctagctggagccaacgctggcaatgaacccgagggagaagagcagtga

SEQ ID NO: 47283 - DNA, 3297 bp, Corynebacterium riegelii
gtgaccgaacaattcaagttggcacgagttcagcttgtgaactggggaacgttccacggctactttgacattccggtggggcaaaagggttttttgatcacgggtgcgtcgggctcgggtaagtccacgctgattgatgcgttttcgaccatcctggttccccagtccaagatccgttacaacgcggcggcgcagcaggacagcacgcgcgataaaggtcgtagcagggtgtcgtacattcgtggcgcgtggcgcaggagcgaggaccccactactggtgagatccgcagtcagtacctgcgcgaaggtgcaaccgcgacggtggttgcaatgacgtatcacagcccaagcgagacgtatacgttggtggcaatttttcgtctcaacgcagggcaaaactccgaggcccaggtgcggacgctttacggcatcttcccggacgaggtggacgttgatgcgttcatgccgcacctggtgaactcgctggataagcgcaagcttgagcagaagttcaagacgccgagcaacggcgtcacgtttacagatcagtattcggtgtttgccaaccgtttccgtgcgcgcctgggcattgatagtgaggacgcccagatgctgctgcaccgtacgcagtcggcgaagtctttgagcagtatggatgagctgtttcgtgattacatgctggagcagcccatcacgttcgacctggccagggaggcggtggctacgcatggtgatctgcgctatgcctacgagcgtctggaagatctgaaccgccagattgaggcgttggcgccattgccggggttgcaggcgtcgttagaagaggcgcaggctacgcgcgggcatgcggaggcgctggcggcagcgttgccgtctgtacgcagggcgattgaggctgccgagcttcgcgacgccatcacgacccaccaagcccaacgcgaagctgtcaaggtgcaagaaagctcacttacccagcgcaaacaagcacaacaggaggcggtgcagcgcgcgtacgcgaagttggaggggctgaccggtgacgctgtgacgccgcttcgccagcgcatccaacgggaggagcaagagcttgctgcgcgtacggcgaaggcgaaagagctgcagcggatcctgggcgtggacgagctaaccacggaaacctttgcggaactcaaagcgcaagctcgccgtgagattgaagaggcacccgcagaacgcgagctacttgacgcaacgtggtccgacgcccgcgcacagaaacagcagtgcgagcagcaggagcgcgcaatccagcaggagcttgagggcttaagtgcgcgttccagcaacatcgaccagggattcattgatctgcgcgcgcagatgtgcgcggacatcaacctgacaacgcaggggctgccctttgtgggtgagctgattgacgtgttgaagcaggaggaggagtgggagccggtgatccagcgcctgttgtccaactttgccatcacgctgctggtgccggaggagcatgagcgcgcggtgaacagttgggtcaatagctgccggcttggccgcaggttggagtaccgcacggtgccggcgggtgcgaccccgccgagacggccaaagaactcagccagcttgtttcacaaagtcgcggtggtggacagtccaatgcgcccctggctggaacagatgctgaccagcacgtttgattacgcgctggtgcgcaccgttgaggagctggagcagcagacgcagcgcgcggcgactatcgacggtttggagcgcaacgtccgcgaccgcacaaggtccacccgctatatcaaggacgatcgccgcccgcttgggcagcatcgtgattaccgtttgggctcctccaacaacaagaaggtggaattgctgcgtgggtcgttgaaagaagcgcgccaggcaacaactgctgcccacaaccgggagcgagagctgcaacgaaagcgcgtgagcttgcagcatcgcctggatcaggtgaaattaattgcttcgacggggtgggtcgaggtggattacgtgggcgtcgagaagcaactggctcaactgcaagctgagctggagcttgtgacctcctcacccgaggtgcgcgagctgagccgtgcctacgaggacgcgtgtgacagcctgcaggccaccgaggaggagctgcgtgaggtgcagcggcagatcaccgtcgcggagaccagcattgccgcagatcaggcgcggctggcggaggttgagcgcgccagcgttgcggtggaccaggcgctgtttgatgagctggaggccaagctgaaaagccgtaagcggcggctaacgcgcgagaacatcggttcgcttgcagacgaggtgcagtccgaactcgacgccaccatcaaacacaacgcgcaagtgatcaccagtgcaaacacaaagattggcaacattttgaccagctacctggccgggtggccctctgaatcggcggagctgcgtgccgagccggagtttgcgggtgaggccatcaaccgcctggaagcgctccgtgcggaccgcctgccggagttccgcggccggttcctggagctgctcaacggccaatccgtcatgcacctcagccacatctccacgcagctcgcgcgggcgaagggtgacattgaaaccaacctgggcccgatcaatgcttcgctgatgcgctcgaaatacacccccgagggcggcgggcggtatctgcagattgaggtccgcgacaaccgcggtcctgaagttcgcgaattccagcaggacctgcgagaagccaccgccggcagtttgagcgcagccgacgaaaccgaagcgattgcgcgctaccatcggctggcgaaaatcatggaccgcctcgcctcctcggagcgtgccgatacccgctggcgcaacctcgtcctggacacccgccgccacgtgaagtttgtgggcaacgaaattgatgccgacggtgaggtgtacaacacccacgttgactccgcgtcactctccggcgggcaggcgcagaaacttgtattcttttgcctggctgcggcgctgcgctaccgcctcgccggggtggatgcggacgttcccacatacgccaccgttgtgcttgatgaggccttcgatcgcgccgaccccacctttacccgcaccgctatggacgtgttcacccgcttcggtttccacatgattctggcgactccgatgaagctgatcaagacactatcgccctatgtggacggcacgattgtggtcaactacgccgaaacgccacaggcgcgctccacgttcgaattcattgacactcacggtggttag

SEQ ID NO: 47284 - DNA, 1161 bp, Corynebacterium riegelii
atgcgtttacccgaccagcttccgttgcgccttgacattgagcgtgcgcttttgggttcggcgctgcccgagtcgatcccgctgcacccgccaaccgcgaagaaagtgctagcggagcccttagtggcaaccgagttcgttcgcgcctggcaggcatatgagccccaggtggaggtggagtgggttactcgccgctgggcgcacctagggcagcagcgggtcccggcgcgtgtgcatattggcagttgggagcgggttgcggagctcaccgggcagtcttcagcgttggcgttggcgcgctcccggtttgctgaacttgtgggattgttcccgtgttcgccgggcttccccggctttcgtgtgaccgttgcgcgcactcactccacttggctgtcgctggacaatttggacttcacccgccttaccaacactctgacctggatgtatacgcaccccgcttccggtctgcgcccgcgcgccgtgcccgttgaaggcgttgacaccaaatgggtcgagagccaccagagcctcctgttgcgtttgctcaagccgctcggtctggccactttgggcctttcgcttaccgacgccaccctccgcctccgcttcctcgacccctctttggcccccacaccgaatcttcttgacatcgcagttccgtttaacgccttgccgcttcctttgggcctgacggttgtgattgtggagaacaaagagacgttccttgcgctgccgcaagcgcctgttggttctaacgccgtgttggtgttcggcgcgggctacagcggagcgcaattagcttcccttgactgggtccgcggcggcaaggtgctgtactggggcgatgcggatgcggatggctacgccattctgaacgcactgcgcagccacatgagcgccggtgctgatggcgccagcggtgcggacgctgaattcggctgtgttgaaagcgttgcgatggatagcgtgaccgttgcgaagtttctgcacctatcagttgatgatcccggcgacgccacccgacacctacctttccttaccgaggaggaagaaaacgcgcgacgcctcctgatcacacgcggcaaccggaggcttgagcaggagcgagtgtcgcttgagtgggcgctcgcgcaggaagcattcactgcgatctggggttga

SEQ ID NO: 47285 - DNA, 1575 bp, Bifidobacterium animalis subsp. animalis MCC 1489; identical to SEQ ID NO: 42953

SEQ ID NO: 47286 - DNA, 810 bp, Bifidobacterium animalis subsp. animalis MCC 1489; identical to SEQ ID NO: 42954

SEQ ID NO: 47287 - DNA, 3498 bp, Bifidobacterium animalis subsp. animalis MCC 1489; identical to SEQ ID NO: 42955

SEQ ID NO: 47288 - DNA, 1221 bp, Bifidobacterium animalis subsp. animalis MCC 1489; identical to SEQ ID NO: 42956

SEQ ID NO: 47289 - DNA, 1575 bp, Bifidobacterium animalis subsp. animalis MCC 0499
atggcggatgtgcggagtgaattggcccagttgaggccggtgtatgagaccggcgtgctgcgcatgctactgcacaagtattccgatatctacatcgccatgctgcgcgcctgcttcgacccgctcactgcagaagtcccgcaggagcgactgctggcgcgcatgcgcgaggcgattggcgagctcgccgccgatggcacctacaccccgcgcgagggcgaggacgacatgatggcggcccggcgcatactcaaggagctcaaagccgaggatgccggcgactatgcgtgggtggccgattcgattgaccgccgccagcacaggctcatgtgccgcctgacccaacgtgcccatagagccatcgaggcattggcgacgcttcagcaacgcacggtgtcgctgtccggtgcgcaggtgaattcgatcatcatggagatcgagagcgcgcgcaaacaactcaccgtgaatgtggaggagcgcattgagctgctcgaacgtgagatcgacgaacggcagcaccagatcgacaatctcaaggcgcatggcattgggcggcggcccactcgcgagcaggtgtccgacatcatcaacgtcgtgtacaacacgctgcgcggggtgcctgtcgatttgcgcgaattggtgatcaccgagcgcgacaatggcgatgcgttgcgccggcgcatcgacgacggctcgatgagcagcaacgacatgctcacgttctaccacgaggaatacgagcgcacgtaccggctcagcgacgagggacgccgcttcaacgatgcattccaggtgatgtatgccccgcagagccgcgaggagctcaacgaggcgctgcaagacatctcgaacagcgaatggctgcatggcgaggccgacgacctcatgagcgtggtcaatcgggagttcgaagacatctacgacggcatagacgatgtgcgtcaccagattcgtgtgaccgacgaaagcgtgaaacttctggtgaggcagcagaccgacatgcagttccgcacgatgtctcgtcagctcgcgaagctgttcacccagttgggtgagtcggtgcatgcgaaaggccgctacgacattggcacggcgaccacctcgttgctcacattgccgacccgtgcgcgtgaaacacccgtgaaaaccgcggctcccgaactgcagatgcaggtggacgacggcatcgcacaggtcgatctcaatggcatcgttgcggccggcggcccacgcatccaccatatgatcgaattggtggccgcgcacccggtgctcatcgacgatgccggcggtgcgctcgccgattccgttgtcgacatcgcagccagtttcaacgaacttgccgccgacgagcgccgtgagagcgaaatcgtgggcttcctgagctacttgggttccgcgtcgcctaccgatgccgctggcaatagcgatggcggccagattcccgtgccccgcgagagtctgtggcattgcgtgaccaccgacggtcggactcgcgtatggcgcacctgtgcgctgttcgtgcccgggcaggtgctgaaggattttctcgacgataccatggtggaggactga

SEQ ID NO: 47290 - DNA, 810 bp, Bifidobacterium animalis subsp. animalis MCC 0499
atggcgatggacgacagcaccgggcagggaattgccggcgatgccaatctgggcatggtctcgaaggtgctcagtgacgagtatgaggaaggtgtggccgacgaggccggcatggccgatctggccaatgtgcatgcactgttcgatggtgacatcggtgacatgcccgcacccgcccgtgaggccgcgattgcgctgaaacgcaacaggtcgatcagcggcgacatgtaccaccaggcactcgactatatggaccacgtgcggcgttcgctcaacaacgacatgctcgtgccggtcatcgacacctactatgaggtgatgtatgcggagccgatcgctgccgatgaatacggcatacgatcgctcaagacccgtgccagcctgagtgcccgtgaggcggtgatgctggcttcgctgcggcgcaaggtgctcgactacgagaatgtgggcgccgcggccgccgattggctcatttcgaaggaggagattgtcaacacgatgtccaccggcgcgggcccgcttgccggccgcaattcggaggaggcggtgcaggcgcaggtggaccgcctaatcggcagtgcgaagaacaacggcttcctggcgcctgtcgaagacgacgaaggcatgtatgtgatcaccaaactcgtgcccgtggtgctcaatccggagcgcatcgccgcatggctcggcgcggacgacgcatcgaccgcacagcccgaaccggatggaacaggtgacgattccgacggctccgggcataccgaccaagacgaataccccgaagatgacgatatggaggcgctgttttga

SEQ ID NO: 47291 - DNA, 3498 bp, Bifidobacterium animalis subsp. animalis MCC 0499
ttgagcgagacttccgacatctatgcctcgattgaactcatgccgccgcattgggcgctcgcctcgcggcaattggtgaattggggttcctatgacggctaccatgtattcgaaccctccaccgccggcgacgatacggtgacgttgctcaccggccagagcgaatcgggaaaatccacactcgtcgacgcgcaggtctcgttgctctacccggcgaatgccgtattcaacaaggcctcgaacgccggacgctccgatcgcagcgactactcatacctgttgggactgaggggaatccgcagcaacaacgggcacgatgagccggtttacctgcgcgggcgcagcgggaagggcgagccgtacgcggtctggggtgcgatcgtcgaccactatgtcgacaccgccaacagcggcgcgttatggattgccaagttcatgtatctgcctgcggagggcacgccggagagcatggtgaagctctatgtggtctccagctatgcaatcgacccgcggctcatggatgcacatcgcgaggagcgcttctcggtgccgctgatcaagcaggtgtacccgggcgtcaccgtgtacaactacgcgaagcagttccacgaagacatctggaaacgattcggcctcactgagtccgcgtgccgtctgctccaccgcatgcaggcctccgatgcgccctcccagctcgatgacatcttccgcaaaggtgtgctcaatgagccgcgcgccattgagttcggcaagctcgccatcgacgattacgaacagttcgccgagaatttctcgagtatggagcgtacgcgtaagcgggtgcggcaactggaggcgatcgcctccgagttcgccgagtatgagtccgccgaacgtggtgtgcgcgagctttccgctatcgccccccagcagggcgatagcgcacggattcgcacccaatggcttgacgatcgcattcatgccgacatcaccgaagtactgcccgaatatgagcagtatgccacggagtgcagtgccagtgcacaggccgccaaagagcgggcggagcagatgcgggaacaggtcgactcgctcaataggcagcttcagggtatgggaggcgacgagataggccgcctggaagaccgcattcgcgatgcacagcggcgccaacgcgaagtgttgggacgcagggagctgttggcctcccgattcagtgcctctggcgaagcattgccggaaagtcgcgggcagtgggatgcattggtggccgaatacacgcaactcgaatcggaataccagcagcgtaaaaccgaattgcacgggttgcagtacccattgatcgacgcccagaagaaagccgaacagcgaatcaaggcactcgagaaggacttggaacgcaaacgccagtcgaagacgcgcatctccagcgatatggacgaggcccgcaatatgattgcgcgcgccaccggcctgagcccgcaggagctgccttatgcggcggagctcatggacgtgggcgaggagaacgaggagtggcgcaccgccatgaacgtggcataccggtcgctcgcaacggtgattctggtcgacagtcgccatgagaacggcttcgcagcgaaagtctcgcagatttcccaggaggcgctcccacgacgcaactggcggttcgtcgacacgagcgtccatgtggaggctgaggagcgtgaagggtggctgtcgagcaagctcacgttcaacgtggaatctccgttcgtcgattggcttcgtgcccgggtgaccgaggcacggtacgacgcatggtgcgtggaggcgatcgacgacaccaatgagacgacgcgccaggtgcagcgtgacggacagatcaaggaaggtcggaagggcagccacggcaccaagaacatgcctgccgtcatcggattcgtcaccgatgcctatctgcgcgatctggaggcagacattgccgaggcgcacaagacgcgggatgccgcaactcgcgatctcgaacagtacgacgtgcaactcaacgcgcttgagcaacgccatagtctggcccagacgctgcaggaccatgcatggaacgacatagatgcatacggtgtggaagaggaaatcgccagcctccaacaacgcgtcgacgaactcgagcagaaccccgaactggcacagctcaatgccacgctgaaagtccagcagcaggaaatggccaaggcgaacagtgcatgctatgccgcggaagacaaactcaagcgggcgaatgcggcggtgaggtcgacccggcagtggctggaagcgtatgaccggcgcacgcaatccgtggaacgccggcatttgaacgaggcatgcggtcggctgcttgaacagggatatctggcatacttcggcgagagcacacaatcggcgaacgaacgaatgggcagaatactcggtttggacgggcaatccggcacctcactgggcggccatgtacgcgagaacgaggcctgcgccaaacacgtacgcgaactgctcggcacactcgcccaaaccgtaggcaggcaggtgaaggaactggctacacagcgcgacaaccggaaacggtcatgcgaggcaagcatgcgctcgtacctcgaccagtatgcgtcaggcgacgaacgagtgagcgccgacgtggagaacgagcggtacttcaggaaagacctggaggagctcaaaccaggggtgatcggcgacgaggcgacgaacgtggaatacatgaactcgctcgacaagatgctccaggacctcgtgcagttgcagacgatgctcaaacttgaccagcagaggatcaccgaacagatcggcaaaatcaaccatctgcttgaacggtacccattcggtgcgcgaggcggtaggctgtcgatcgtcgtgcaggtgcacaggcccgatgcgaagttcaccacggcactcaccgggcaaatcggccgcatcaatgcgttcaaggcaaacgacgagcatgacgtggagaggtgccgaaagctgttcgccggccttgcgggactcatcgagatgttgcgcggcagcttcgacgaatatgcgggcaacggacgtggcaacgcgaacctcgacccacgcaaacgctcacggttcttcgggtcggtgacgaacccggatggcgtggtggaatcgatcaactccaccggcggcggatcgggcggctacttgcaggagctcacgtcgttcgcctacggcgcggcgctcatgtacctgctcgccaacgacaacgcaaccgaaccctcgtatgccaccgtcttcctcgacgaggcgctcatcaaagccgacggccagtacacgcgccgcgcattgagcgtgctgccgggactcggcttccaagtgatcgtttcggcaccggaatcgaagaccggcgagatcatgggttcggcttcgaaggtcattgtggcacacaaggaccaggccagcggcaggacgacgctgatgcagggagatctgctgggggacgctgatggcgatgagtcttcgatgggggagcggtccgagtga

SEQ ID NO: 47292 - DNA, 1221 bp, Bifidobacterium animalis subsp. animalis MCC 0499
gtgacggatacggcgacactcaagactccggcggatgtgcgcggcgatgtggcgcgcattgtacagcgcgagttgttcgccgacgagagtccatggccgcgcacgattcgcattccgtggcccaaggagacgcagctcgtcgccgatgtggccggcgtgcacgcggcgaataatgcgctgaaggagttcgcggcacgattcggctgccggaccgacttcatctcgcgcaaaatgggcacggccgtgccgcttgtcgcgtatatccatgtgcctgacgaggccacggcgctcgccattgcggggcctacgctgcgacgccctcgcgaacaggcgttggccagagcggcgcagctcgagcaacgatgccgtgtcgaccatgcgctcgccatggacgtggtgcgcaggttgaacaacgaaaccgacgtcgatttcgggttgttcgtcgaagccgcgcagtggttcggccggcattgggctgaagtgccggggctcactgctcgtgagatccccttgcccgggttttcggcgaaatggttggcaggttcacgatcccacaggcgcgcggcgatctgtacagtgctcggtgtgcatcggatgccgctgcgggaacgcccgggcgaggtgcggtaccggtacatggaccaacggttcgccgccgagcccgaccgtgtggcgacctcggtgcagtgcgttcccgaacgccccgtctcgctggccgtcattgtggagaacaaagacacctaccaagccatgggccccattgacggagccgtatgtgtgttcggcgccggattcgccgtgaaccgggtacccgaactgctgccttggcttgccaatgatgcggtgcgtgttgtgtattggggtgacatcgatgctgcgggatttgagattctcagtggactgcgggcttcgggggtcgcttgtgagagcatattgatggatcgcatgacctatgccgaatacgagcgtttcggcacgacgagggatgcgatgagccatgagattcgctgcggcgaaccgaagcatgggctgcatctcagttcggaggagtattcgctgtatcgtgacctgtgcacgggcgaacttgccgtgccgcgcatcgagcaggaacgcattccgatcgctgaattcatgcgcttgatcagcgcaggccggagcgatggaagtgacggtgcaagagccgaccaatgccatagccaatcgccgcgcacaccaaagtga

SEQ ID NO: 47293 - DNA, 1575 bp, Bifidobacterium animalis subsp. animalis MCC 0483; identical to SEQ ID NO: 47289

SEQ ID NO: 47294 - DNA, 810 bp, Bifidobacterium animalis subsp. animalis MCC 0483; identical to SEQ ID NO: 47290

SEQ ID NO: 47295 - DNA, 3498 bp, Bifidobacterium animalis subsp. animalis MCC 0483
ttgagcgagacttccgacatctatgcctcgattgaactcatgccgccgcattgggcgctcgcctcgcggcaattggtgaattggggttcctatgacggctaccatgtattcgaaccctccaccgccggcgacgatacggtgacgttgctcaccggccagagcgaatcgggaaaatccacactcgtcgacgcgcaggtctcgttgctctacccggcgaatgccgtattcaacaaggcctcgaacgccggacgctccgatcgcagcgactactcatacctgttgggactgaggggaatccgcagcaacaacgggcacgatgagccggtttacctgcgcgggcgcagcgggaagggcgagccgtacgcggtctggggtgcgatcgtcgaccactatgtcgacaccgccaacagcggcgcgttatggattgccaagttcatgtatctgcctgcggagggcacgccggagagcatggtgaagctctatgtggtctccagctatgcaatcgacccgcggctcatggatgcacatcgcgaggagcgcttctcggtgccgctgatcaagcaggtgtacccgggcgtcaccgtgtacaactacgcgaagcagttccacgaagacatctggaaacgattcggcctcactgagtccgcgtgccgtctgctccaccgcatgcaggcctccgatgcgccctcccagctcgatgacatcttccgcaaaggtgtgctcaatgagccgcgcgccattgagttcggcaagctcgccatcgacgattacgaacagttcgccgagaatttctcgagtatggagcgtacgcgtaagcgggtgcggcaactggaggcgatcgcctccgagttcgccgagtatgagtccgccgaacgtggtgtgcgcgagctttccgctatcgccccccagcagggcgatagcgcacggattcgcacccaatggcttgacgatcgcattcatgccgacatcaccgaagtactgcccgaatatgagcagtatgccacggagtgcagtgccagtgcacaggccgccaaagagcgggcggagcagatgcgggaacaggtcgactcgctcaataggcagcttcagggtatgggaggcgacgagataggccgcctggaagaccgcattcgcgatgcacagcggcgccaacgcgaagtgttgggacgcagggagctgttggcctcccgattcagtgcctctggcgaagcattgccggaaagtcgcgggcagtgggatgcattggtggccgaatacacgcaactcgaatcggaataccagcagcgtaaaaccgaattgcacgggttgcagtacccattgatcgacgcccagaagaaagccgaacagcgaatcaaggcactcgagaaggacttggaacgcaaacgccagtcgaagacgcgcatctccagcgatatggacgaggcccgcaatatgattgcgcgcgccaccggcctgagcccgcaggagctgccttatgcggcggagctcatggacgtgggcgaggagaacgaggagtggcgcaccgccatgaacgtggcataccggtcgctcgcaacggtgattctggtcgacagtcgccatgagaacggcttcgcagcgaaagtctcgcagatttcccaggaggcgctcccacgacgcaactggcggttcgtcgacacgagcgtccatgtggaggctgaggagcgtgaagggtggctgtcgagcaagctcacgttcaacgtggaatctccgttcgtcgattggcttcgtgcccgggtgaccgaggcacggtacgacgcatggtgcgtggaggcgatcgacgacaccaatgagacgacgcgccaggtgcagcgtgacggacagatcaaggaaggtcggaagggcagccacggcaccaagaacatgcctgccgtcatcggattcgtcaccgatgcctatctgcgcgatctggaggcagacattgccgaggcgcacaagacgcgggatgccgcaactcgcgatctcgaacagtacgacgtgcaactcaacgcgcttgagcaacgccatagtctggcccagacgctgcaggaccatgcatggaacgacatagatgcatacggtgtggaagaggaaatcgccagcctccaacaacgcgtcgacgaactcgagcagaaccccgaactggcacagctcaatgccacgctgaaagtccagcagcaggaaatggccaaggcgaacagtgcatgctatgccgcggaagacaaactcaagcgggcgaatgcggcggtgaggtcgacccggcagtggctggaagcgtatgaccggcgcacgcaatccgtggaacgccggcatttgaacgaggcatgcggtcggctgcttgaacagggatatctggcatacttcggcgagagcacacagtcggcgaacgaacgaatgggcagaatactcggtttggacgggcaatccggcacctcactgggcggccatgtacgcgagaacgaggcctgcgccaaacacgtacgcgaactgctcggcacactcgcccaaaccgtaggcaggcaggtgaaggaactggctacacagcgcgacaaccggaaacggtcatgcgaggcaagcatgcgctcgtacctcgaccagtatgcgtcaggcgacgaacgagtgagcgccgacgtggagaacgagcggtacttcaggaaagacctggaggagctcaaaccaggggtgatcggcgacgaggcgacgaacgtggaatacatgaactcgctcgacaagatgctccaggacctcgtgcagttgcagacgatgctcaaacttgaccagcagaggatcaccgaacagatcggcaaaatcaaccatctgcttgaacggtacccattcggggcgcgaggcggtaggctgtcgatcgtcgtgcaggtgcacaggcccgatgcgaagttcaccacggcactcaccgggcaaatcggccgcatcaatgcgttcaaggcaaacgacgagcatgacgtggagaggtgccgaaagctgttcgccggccttgcgggactcatcgagatgttgcgcggcagcttcgacgaatatgcgggcaacggacgtggcaacgcgaacctcgacccacgcaaacgctcacggttcttcgggtcggtgacgaacccggatggcgtggtggaatcgatcaactccaccggcggcggatcgggcggctacttgcaggagctcacgtcgttcgcctacggcgcggcgctcatgtacctgctcgccaacgacaacgcaaccgaaccctcgtatgccaccgtcttcctcgacgaggcgctcatcaaagccgacggccagtacacgcgccgcgcattgagcgtgctgccgggactcggcttccaagtgatcgtttcggcaccggaatcgaagaccggcgagatcatgggttcggcttcgaaggtcattgtggcacacaaggaccaggccagcggcaggacgacgctgatgcagggagatctgctgggggacgctgatggcgatgagtcttcgatgggggagcggtccgagtga

SEQ ID NO: 47296 - DNA, 1221 bp, Bifidobacterium animalis subsp. animalis MCC 0483
gtgacggatacggcgacactcaagactccggcggatgtgcgcggcgatgtggcgcgcattgtacagcgcgagttgttcgccgacgagagtccatggccgcgcacgattcgcattccgtggcccaaggagacgcagctcgtcgccgatgtggccggcgtgcacgcggcgaataatgcgctgaaggagttcgcggcacgattcggctgccggaccgacttcatctcgcgcaaaatgggaacggccgtgccgcttgtcgcgtatatccatgtgcctgacgaggccacggcgctcgccattgcggggcctacgctgcgacgccctcgcgaacaggcgttggccagagcggcgcagctcgagcaacgatgccatgtcgaccatgcgctcgccatggacgtggtacgcaggttgaacaacgaatccgacgtcgatttcgggttgttcgtcgaagccgcgcagtggttcggccggcattgggccgaagtgccggggctcaccgctcgtgagatccccttgcccgggttttcggcgaaatggttggcaggttcacgatcccacaggcgcgcggcgatctgcacagtgctcggtgtgcatcggatgccgctgcgggaacgcccgggcgaggtgcggtaccggtacatggaccaacggttcgccgccgagcccgaccgtgtgacgacctcggtgcagtgcgttcccgaacgccccgtctcgctggccgtcattgtggagaacaaagacacctaccaagccatgggccccattgacggagccgtatgtgtgttcggcgccggattcgccgtgaaccgggtacccgaactgctgccttggcttgccaatgatgcggtgcatgttgtgtattggggtgacatcgatgctgcgggatttgagattctcagtggactgcgggcttcgggggtcgcttgtgagagcatattgatggatcgcatgacctatgccgaatacgagcgtttcggcacgacgagggatgcgatgagccatgagattcgctgcggcgaaccgaagcatgggctgcatctcagttcggaggagtattcgctgtatcgtgacctgtgcacgggcgaacttgccgtgccgcgcatcgagcaggaacgcattccgatcgctgaattcatgcgcttgatcagcgcaggccggagcgatggaagtgacggtgcaagagccgaccaatgccatagccaatcgccgcgcacaccaaagtga

SEQ ID NO: 47297 - DNA, 1575 bp, Bifidobacterium animalis subsp. lactis ATCC 27536; identical to SEQ ID NO: 41902

SEQ ID NO: 47298 - DNA, 810 bp, Bifidobacterium animalis subsp. lactis ATCC 27536; identical to SEQ ID NO: 41925

SEQ ID NO: 47299 - DNA, 3498 bp, Bifidobacterium animalis subsp. lactis ATCC 27536; identical to SEQ ID NO: 41904

SEQ ID NO: 47300 - DNA, 1221 bp, Bifidobacterium animalis subsp. lactis ATCC 27536; identical to SEQ ID NO: 41905

SEQ ID NO: 47301 - DNA, 1575 bp, Bifidobacterium animalis subsp. lactis ATCC 27674; identical to SEQ ID NO: 41902

SEQ ID NO: 47302 - DNA, 810 bp, Bifidobacterium animalis subsp. lactis ATCC 27674; identical to SEQ ID NO: 41925

SEQ ID NO: 47303 - DNA, 3498 bp, Bifidobacterium animalis subsp. lactis ATCC 27674; identical to SEQ ID NO: 41904

SEQ ID NO: 47304 - DNA, 1221 bp, Bifidobacterium animalis subsp. lactis ATCC 27674; identical to SEQ ID NO: 41905

SEQ ID NO: 47305 - DNA, 1575 bp, Bifidobacterium animalis subsp. lactis ATCC 27673; identical to SEQ ID NO: 41902

SEQ ID NO: 47306 - DNA, 810 bp, Bifidobacterium animalis subsp. lactis ATCC 27673; identical to SEQ ID NO: 41925

SEQ ID NO: 47307 - DNA, 3498 bp, Bifidobacterium animalis subsp. lactis ATCC 27673
ttgagcgagacctccgacatctatgcctcgattgaactcatgccgccgcattgggcgcttgcctcgcggcaattggtgaattggggttcctacgacggctaccatgtattcgagccttccaccgccggaaacgatacggtgacgttgctcaccggccagagcgaatcgggaaaatccacactcgtcgatgcgcaggtctcgttgctctacccggcgaatgccgcattcaacaaggcctcgaacgccggacgctccgatcgcagcgactactcatacctgttggggctgaggggaatccgcaacaacaacgggcacgacgaaccggtctacctgcgcgggcgcagcgggaacggggagccgtacgcggtatggggtgcgatcgtcgaccactatgtcgacaccgccaacagcggcgcgttatggattgccaagttcatgtatctgcctgcggacggcgcgccggagagcatggtgaagctctacgtggtctccggctatgcaatcgacccgcggctcatggatgcacatcgcgaggagcgcttctcggtaccgcttatcaagcaggtgtacccaggtgtcaccgtgtataactacgcgaagcagttccacgaagacatctggaaacgattcggcctcactgagtccgcgtgccgtctgcttcaccgcatgcaggcctccgacgcgccctcccagctcgatgacatcttccgcaaaggtgtgctcaatgagccgcgcgccgttgagttcggcaagctcgccatcgatgattacgaacagttcgccgagaatttctcgagtatggagcgtacgcgcaagcgagtgcggcagctggaggcgattgcctccgagttcgccgagtatgagtccgccgaacgcggtgtgcgcgagctttccaccatcgcccccgagcagggcgatagcgcacggattcgcacccaatggcttgacgatcgcattcatgccgacatcaccgaagtcctgcccgaatatgagcagcatgccacggactgcagtgccagtgcacaggccgccaaagagcgggcggagcagatgcgggaacaggccgactcgctcaataggcagcttcagggtatgggaggcgacgagataagccgtctggaagaccgcattcgcgatgcacaacggcgccaacgcgaagtgttgggacgcagggagctgttggcctcccgattcagtgcctctggcgaagcattgccggaaagtcgcgggcagtgggatgcattggtggccgaatacacgcaattcgaatcggaataccagcagcgtaaaaccgaattgcacgggttgcagtacccattgatcgacgcccagaagaaagccgaacagcgaaccaaggcactcgagaaggacctggaacgcaaacgccagtcgaagacgcgcatctccagcgatatggacgaggcccgcaatatgattgcgcgcgccaccggcctgagcccgcaggagctgccttatgcggcggagctcatggacgtgggcgaggagaacgaggagtggcgcaccgccatgaacgtggcataccggtcgctcgcaacggtgattctggtcgacagttgccatgagaacggcttcgcagcgaaagtctcgcagattccccaggaggcgctcccacgacgcaactggcggttcgtcgacacgagcgtccatgtggaggctgaggagcgtgaagggtggctgtcgagcaagctcacgttcaacgtggaatctccgttcgccgattggcttcgtgcccgggtgaccgaggcgcggtacgacgcatggtgcgtggaggcgatcgacgacaccaatgagacgacgcgccaggtgcagcgcgacgggcagatcaaggaaggtcggaagggcagtcacggcaccaagaacatgcctgccgtcatcggattcgtcaccgatgcctatctgcgcgatctggaggcagacattgccgaggcgcgcaagacgcgggatgccgcaactcgcgatctcgaacagtacgacgtgcaactcaacgcgcttgagcaacgccatagtctggcccagacgctgcaggaccatgcatggaacgacatagacgcatatggtgtggaggaggaaatcgccagcctccaacaacgcgtcgacgaactcgagcagaaccccgaactggcacagctcaatgccacgctgaaagtccagcagcaggaaatggccaaggcgaacagtgcatgctatgccgcggaagacaaactcaagcgggcgaatgcggcggtgaggtcgacccggcagtggctggaagcgtatgaccggcgcacgcaatccgtggaacgccggcctttgaacgaggcatgcggtcggctgcttgaacggggatatctggcatacttcggcgagagcacacaatcggcgaacgaacgaatgggcagaatactcggtttggacgggcaatccggcacctcactgggcggccatgtacgcgagaacgaggcctgcgccaaacacgtacgcgaactgctcggcacactcgcccaaaccgtgggcaggcaggtgaaggaactggctacacagcgcgacaaccggaaacggtcatgcgaggcgagcatgcgctcgtacctcgaccagtatgcgtcaggcgacgaacgagtgagcgccgacgtggagaacgagcggtacttcaggaaagacctggaggagctcaaaccaggggtgatcggcgacgaggcgacgaacgtggaatacatgaactcgctcgacaagatgctccaggacctcgtgcagttgcagacgatgctcaaacttgaccagcagaggatcaccgaacagatcggcaaaatcaaccatctgcttgaacggtacccgttcggggcgcgaggcggtaggctgtcgatcgtcgtgcaggtgcacaggcccgatgcgaagttcaccacggcactcaccgggcaaatcggccgcatcaatgcgttcaaggcaaacgacgagcatgacgtggagaggtgccgaaagctgttcgccggccttgcgggactcatcgagatgctgcgcggcagcttcgacgaatatgcgggcaacggacgtggcaacgcgaacctcgacccacgcaaacgctcacggttcttcgggtcggtgacgaacccggatggcgtggtggaatcgatcaactccaccggcggcggctcgggcggctatttgcaggagctcacgtcgttcgcctacggcgcggcgctcatgtatctgctcgccaccgacaacgcaaccgaaccctcgtatgccaccgtcttcctcgacgaggcgctcatcaaagccgacggccagtacacgcgccgtgcattgagcgtgctgccgggactcggcttccaagtgatcgtttcggcaccggaatcgaagaccggcgagatcatgggttcggcttcgaaggtcattgtggcgcgcaaggaccaggccagcggcaggacgacgctgatgcagggagatctgctgggggacgctgatggcgatgagtcctcgatgggggagcggtccgagtga

SEQ ID NO: 47308 - DNA, 1221 bp, Bifidobacterium animalis subsp. lactis ATCC 27673; identical to SEQ ID NO: 44101

SEQ ID NO: 47309 - DNA, 1572 bp, Bifidobacterium animalis subsp. animalis ATCC 27672
atggcggatgtgcggagtgaattggcccagttgaggccggtgtatgagaccggcgtgctgcgcatgctgctgcataagtactccgacatctacatcgccatgctgcgcgtctgcttcgaccccctcaccgccgaagtcccgcaggagcgactgctggcgcgcatgcgcgaggcgattggcgagctcgccgtcgatggcacctacaccccgcgtgagggcgaggacgacatgatggccgcccggcgcatactgaaggagctcaaagccgaggacgccggagactacgcgtgggtggccgattcgatcgaccgccgccagcacaggctcatgtgccgcctgacccagcgtgcccatagagccatcgaggcgttggcgacgcttcagcaacgcacggtgtcgctgtccggtgcgcaggtgaattcgatcatcatggagatcgagagcgcgcgcaaacagctcaccgtgaatgtggaggagcgcattgatctgctcgaacgtgagattgaggaacggcagcaccagatcgacaatctcaaggcgcatggcattgggcagcggcccactcgcgagcaggtgtccgacatcatcaacgtcgtgtacaacacgctgcgcggtgtgcctgtcgatttgcgcgagctggtgatcaccgagcgtgacaatggcgatgcgttgcgtcggcgcatcgacgacggctcgatgagcagcaacgacatgctcacgttctaccacgaggaatacgagcgcacgtaccggctcagcgacgaggggcgccgcttcaacgatgcattccaggtgatgtatgccccgcagagccgcgaggagctcaacgaggcgctgcaagacatctcgaacagcgaatggctgcatggcgaggccgacgacctcatgagcgtggtcaatcgggagttcgaagacatctacgatggcatagacgatgtgcgtcaccagattcgtgtgaccgacgaaagcgtgaagcttctggtgaggcagcagaccgacatgcagttccgcacgatgtctcgccagctcgcgaagctgttcacccagttgggtgagtcgatgcatgcgaaagaccgctacgacattggcacggcgaccacctcgttgctcacgttgccgacccgtgcgcgtgaaacacccgtgaaaaccgtggctcccgaactgcagatgcaggcggacgacggcatcgcacaggtcgatctcaatggcatcgttgcggccggcggcccacgcattcaccatatgatcgagttggtggccgcgcacccggtgctcatcgacgatgccggcggtgcgctcgccgattccgtcatcgacattgccgccagcttcaacgaacttcccgccgacgagcgccgtgagagcgaaatcgtgggcttcctgagttacctgggttccacgtcgcccgatgccgctggcagtggcgacggcgggcagattcccgtgccccgcaagagcctgtggcattgcgtgaccaccggcggtcggactcgcgtatggcgcacctgcgcgttattcgtgcccaggcaggtgctgaaggattttctcgacgataccatggtggaggactga

SEQ ID NO: 47310 - DNA, 810 bp, Bifidobacterium animalis subsp. animalis ATCC 27672
atggcgatggacgacagcaccgggcagggaattgccggcgatgccaatctgggcatggtctcgaaggtgctcagtgccgagtatgaggaaggtgtggccgacgaggccggcatggccgatctggccaatgtgcatgcactgttcgatggtgacatcggtgacatgcccgcacccgcccgtgaggccgcgattgcgctgaaacgcaacaggtcgatcagcggcgacatgtaccaccaggcactcgactatatggaccacgtgcggcgttcgctcaacaacgacatgctcgtgccggtcatcgacacctactatgaggtgatgtatgcggagccgatcgctgccgatgaatacggcatacgatcgctcaagacccgtgccagcctgagtgcccgtgaggcggtgatactggcttcgctgcggcgcaaggtgctcgactacgagaatgtgggcgccgcggccgccgattggctcatttcgaaggaggagattgtcaacacgatgtccaccggcgcgggcccgcttgccggccgcaattcggaggaggcggtgcaggcgcaggtggaccgcctaatcggcagtgcgaagaacaacggcttcctggcgcctgtcgaagacgacgaaggcatgtatgtgatcaccaaactcgtgcccgtggtgctcaatccggagcgcatcgccgcatggctcggcgcggacgacgcatcgaccgcacagcccgaaccggagggaaccggtgacgattccgacggctccgggcataccgaccaagacgaataccccgaagatgacgatatggaggcgctgttttga

SEQ ID NO: 47311 - DNA, 3498 bp, Bifidobacterium animalis subsp. animalis ATCC 27672
ttgagcgagacttccgacatctatgcctcgattgaactcatgccgccgcattgggcgctcgcctcgcggcaattggtgaattggggttcctatgacggctaccatgtattcgaaccctccaccgccggcgacgatacggtgacgttgctcaccggccagagcgaatcgggaaaatccacactcgtcgacgcgcaggtctcgttgctctacccggcgaatgccgtattcaacaaggcctcgaacgccggacgctccgatcgcagcgactactcatacctgttgggactgaggggaatccgcaacaacaacgggcacaatgagccggtctacctgcgcggtcgcagcgggaacggggagccgtacgcggtctggggtgcgatcgtcgaccactatgtcgacaccgccaacagcggcgcgttatggattgccaagttcatgtatctgcctgcggagggcacgccggagagcatggtgaagctctatgtggtctccagctatgcaatcgacccgcggctcatggatgcacatcgcgaggagcgcttctcggtgccgctgatcaagcaggtgtacccgggcgtcaccgtgtacaactacgcgaagcagttccacgaagacatctggaaacgattcggcctcactgagtccgcgtgccgtctgctccaccgcatgcaggcctccgatgcgccctcccagctcgatgacatcttccgcaaaggtgtgctcaatgagccgcgcgccgttgagttcggcaagctcgccatcgacgattacgaacagttcgccgagaatttctcgagtatggagcgtacgcgtaagcgggtgcggcaactggaggcgatcgcctccgagttcgccgagtatgagtccgctgaacgcggtgtgcgcgagctttccgccatcgccccccagcagggcgatagcgcacggattcgcacccaatggcttgacgatcgcattcatgccgacatcaccgaagtcctgcccgaatatgagcagtatgccacggactgcagtgccagtgcacaggccgccaaagagcgggcggagcagatgcgggaacaggtcgactcgctcaataggcagcttcagggtatgggcggcgacgagataggccgtctggaagaccgcattcgcgatgcacagcggcgtcaacatgaagtgttgggacgcagggagctgttggcctcccgattcagtgcctctggcgaagcattgccggaaagtcgcaggcagtgggatgcattggtggccgaatacacgcaactcgaatcggaataccagcagcgtaaaaccgaattgcacgggttgcagtacccattgatcgacgcccagaagaaagccgaacagcgaatcaaggcactcgagaaggacttggaacgcaaacgccagtcgaagacgcgcatctccagcgatatggacgaggcccgcaatatgattgcgcgcgccaccggcctgagcccgcaggagctgccttatgcggcggagctcatggacgtgggcgaggagaacgaggagtggcgcaccgccatgaacgtggcataccggtcgctcgcaacggtgattctggtcgacagtcgccatgagaacggcttcgcagcgaaagtctcgcagattccccaggaggcgctcccacgacgcaactggcggttcgtcgacacgagcatccatgtggaggctgaggagcgtgaagggtggctatcgagcaagctcacgttcaacgcggaatctccgttcgtcgattggcttcgtgcccgggtgaccgaggcacggtacgacgcatggtgcgtggaggcgatcgacgacaccaatgagacgacgcgccaggtgcagcgcgacggacagatcaaggaaggtcggaagggcagccacggcaccaagaacatgcctgccgtcatcggattcgtcaccgatgcctacctgcacgatctggaggcagacattgccgaggcgcgcaagacgcgggatgccgcaactcgcgatctcgaacagtacgacgtgcaactcaacacgcttgagcaacgccatagtctggcccagacactgcaggaccatgcatggaacgacatagacgcatacggtgtggaagaggaaatcgccagcctccaacaacgcgtcgacgaactcgagcagaaccccgaactggcacagctcaacgccacgctgaaagtccagcagcaggaaatggccaaggcgaacagtgcatgctatgccgcggaagacaaactcaagcgggcgaatgcggcggtgaggtcgacccggcagtggctggaagcgtatgaccggcgcacgcaatccgtggaacgccgaccattgaacgaggcatgcggtcggctgcttgaacagggatatctggcatacttcggcgagagcacacaatcggcgaacgaacgaatgggcagaatactcggtctggacgggcaatccggcacctcactgggcggccatgtacgcgagaacgaggcctgcgccaaacacgtacgcgaactgctcaacacactcgcccaaaccgtaggcaggcaggtgaaggaactggtcgcacagcgcgacaaccggaaacagtcatgcgaggcaagcatgcgctcgtacctcgaccagtatgcgccaggcgacgaacgagtgaacgccgacgtggagaacgagcggtacttcaggaaagacctggaggagctcaaaccaggggtgatcggcgacgaggcgacgaacgtggaatacatgaactcgctcgacaagatgctccaggacctcgtgcagttgcagacgatgctcaaactcgaccagcagaggatcaccgaacagatcggcaaaatcaaccatctgctcgaacggtacccgttcggggcgcggggcggcagactgtcgatcgtcgtgcaggtgcacaggcccgatgcgaagttcaccacggcactcaccgggcaaatcggccgcatcaatgcgttcaaggccaacgacgagcatgacgtggagcggtgccgaaagctgttcgccggccttgcaggactcatcgagatgttgcgcggcagcttcgacgaatacgcgggcaacggacgtggcaacgcgaacctcgacccacgcaaacgctcacggttcttcgggtcggtgacgaacccggatggcgtggtggaatcgatcaactccaccggcggcggatcgggcggctacttgcaggagctcacgtcgttcgcctacggcgcggcgctcatgtacctgctcgccaacgacaacgcaaccgaaccctcgtatgccaccgtcttcctcgacgaggcgctcatcaaagccgacggccagtacacgcgccgcgcattgagcgtgctgccgggactcggcttccaagtgatcgtttcggcaccggaatcgaagaccggcgagatcatgggttcggcttcgaaggtcattgtggcacacaaggaccaggccagcggcaggacgacgctgatgcagggagatctgctgggggacgctgatggcgatgagtcttcgatgggggagcagtccgagtga

SEQ ID NO: 47312 - DNA, 1221 bp, Bifidobacterium animalis subsp. animalis ATCC 27672
gtgacggatacggcgacactcaagactccggcggatgtgcgcggcgatgtggcgcgcattgtacagcgcgagttgttcgccgacgagagtccatggccgcgcacgattcgcattccgtggcccaaggagacgcagctcgtcgccgatgtggccggcgtgcacgcgacgaataatgcgctgaaggagttcgcggcacgattcggctgccggaccgacttcatctcgcgcaaaatgggaacggccgtgccgcttgtcgcgtatatccatgtgcctgacgaggccacggcgctcgccattgcggggcctacgctgcgacgccctcgcgaacaggcgttggccagagcggcgcagctcgagcaacgatgccatgtcgaccatgcgctcgccatggacgtggtacgcaggttgaacaacgaatccgacgtcgatttcgggttgttcgtcgaagccgcgcagtggttcggccggcattgggccgaagtgccggggctcaccgctcgtgagatccccttgcccgggttttcggcgaaatggttggcaggttcacgatcccacaggcgcgcggcgatctgcacagtgctcggtgtgcatcggatgccgctgcgggaacgcccgggcgaggtgcggtaccggtacatggaccaacggttcgccgccgagcccgaccgtgtgacgacctcggtgcagtgcgttcccgaacgccccgtctcgctggccgtcattgtggagaacaaagacacctaccaagccatgggccccattgacggagccgtatgtgtgttcggcgccggattcgccgtgaaccgggtacccgaactgctgccttggcttgccaatgatgcggtgcgtgttgtgtattggggtgacatcgatgctgcgggatttgagattctcagtggactgcgggcttcgggggtcgcttgtgagagcatattgatggatcgcatgacctatgccgaatacgagcgtttcggcacgacgagggatgcgatgagccatgagattcgctgcggcgaaccgaagcatgggctgcatctcagttcggaggagtattcgctgtatcgtgacctgtgcacgggcgaacttgccgtgccgcgcatcgagcaggaacgcattccgatcgctgaattcatgcgcttgatcagcgcaggccggagcgatggaagtgacggtgcaagagccgaccaatgccatagccaatcgccgcgcacaccaaagtga

SEQ ID NO: 47313 - DNA, 1470 bp, Xanthomonas campestris
atgaagcaccaggcacgtatcgccggctatcgccaattgcgcgagcagccggtatggaaactgctggccgccgaccacgccccggagctgatcggcctgctgcagacggtgttgctggacggcgaacgccgcctgccctcggccgtgctgcacgagcgcctgcagcgccagctcgacgcactgcgcgccgacgaactctcgcgcgagttgccgcgtaccgcgcaggcctatctggcgcattggctggcgcagggctggctggaacgccgcctgcccgagggcgcggccgaagaagagtacgagctatcgcgcgcggccacccaggccatccgcttcatcgtcggcctgcgcgagagcagcagcagcgccaccgaaagccgcctgtcgctggtgatccagcagctggtgcagctggcgggccagaccgaagccgacccggagctgcgcctggccgccctgcgcgaagaacgcgcgcgcatcgatgccgagatcgaacgcgtggcctccggccgcgtggccgcgctggatggcaagcgcgcgctggagcgcgcccgcgacctgatccatctctccgacgagctggccgaagatttccatcgcgtgcgcgacgatttcgaacagctcaaccgccagttccgcgaacgcatcatcgacgacgagggcgcgcgcggcgatgtgctggagcagctgttcaacggcgtggacgtgatcgccgacagcgaggccgggcgcaccttcgaagcgttctggagcctgctcaacgacacccagcaaagcagccagctcgatcaggcgctggatgcgctgctggcacgcggtttcgcgcgcaagctggaccggcgcgagcgcgccttcctgcgcgggttgaccggcacgctgctggagcgtggcggcgaggtgcacacggtgatgcagcacttcgcccgcagcctgcgcggtttcgtgcagagccgcggctatctggagcagcgccggctcaatcaattgctcaagcaggcgcagggcgaagccttgcagctgcgcgacagcctgcacgccaccaccgccaccggctatacccaggcgttgagcgctgcccgcctgcgttcgctgtcgcaatggcgcctgcacgacccgcgcctgacccaggtcgatggccgcgtgcaggccgccgatgcggcagacatctcgctcgacagcgtgggcgatctggtcgcgcaatcggaaatcgacgtgcgcagcctgcgccgcgacctgcacgagctgctcggccagcgcccgcgcctgaccatcggcgatgcgctgcagcagcgcccggccgcgcagtgcctgggcagcgtgatcggttacctgtcgctgggcacgcgccacggcgtggtgatcgacggacagatggaaacggtgcaatgggaaggcggcgacggcgccctgcggcgcgcacgcattccgctggtgtggttcacccgggagaaacgcaatgaactggactga

SEQ ID NO: 47314 - DNA, 702 bp, Xanthomonas campestris; identical to SEQ ID NO: 47254

SEQ ID NO: 47315 - DNA, 4083 bp, Xanthomonas campestris; identical to SEQ ID NO: 47255

SEQ ID NO: 47316 - DNA, 1467 bp, Xanthomonas campestris; identical to SEQ ID NO: 47249

SEQ ID NO: 47317 - DNA, 660 bp, Xanthomonas campestris
atgaactccctggatgaccctggcgatgcagtcgtcgtcgacaagacgcttttcgttggcgacgcgggcacgctgcccgtggacgcgcggcgcgcgctctgcaagctgctctcgggcccatttctcgatgacacccacggcgcgtggcccgcgctactgcgcgaggaggcggtgcttcgaagccgcttgtctgatctgttcctggaactggtgatcgaccgggagcgcaaggtggccttcgcccggcaagccgataccggagaggtcgatgcgccggtgttgatgcgcgcccaggcgctctccttcatggagtcggtgctgctcctgcacctgcgccacgcccttgtggaggcggagggacaagatcagcgcgccgtcgtgtctcaaagcgacctgacggaggtgctgagcgtttacttggagcagggcgtgtccgatacggtcggcgccgcggcgaaggtgaactcggcaatcgagaagctcaggaccgctgggatcctccggattcttcggggcggcgagcgaagatttgaggtctcgccggtcctgcgcctcttgttcacggccgaagacgtcgaggcacttgggaagctctacgcatcgtcggcgcaggcaggcggggcacctgaggacatggaagaggagggggaggatgcatag

SEQ ID NO: 47318 - DNA, 3360 bp, Xanthomonas campestris; identical to SEQ ID NO: 47251

SEQ ID NO: 47319 - DNA, 1221 bp, Xanthomonas campestris; identical to SEQ ID NO: 47252

SEQ ID NO: 47320 - DNA, 1467 bp, Xanthomonas campestris; identical to SEQ ID NO: 47249

SEQ ID NO: 47321 - DNA, 660 bp, Xanthomonas campestris; identical to SEQ ID NO: 47317

SEQ ID NO: 47322 - DNA, 3360 bp, Xanthomonas campestris; identical to SEQ ID NO: 47251

SEQ ID NO: 47323 - DNA, 1221 bp, Xanthomonas campestris; identical to SEQ ID NO: 47252

SEQ ID NO: 47324 - DNA, 1470 bp, Xanthomonas campestris; identical to SEQ ID NO: 47313

SEQ ID NO: 47325 - DNA, 702 bp, Xanthomonas campestris; identical to SEQ ID NO: 47254

SEQ ID NO: 47326 - DNA, 4083 bp, Xanthomonas campestris; identical to SEQ ID NO: 47255

SEQ ID NO: 47327 - DNA, 1470 bp, Xanthomonas campestris; identical to SEQ ID NO: 47253

SEQ ID NO: 47328 - DNA, 702 bp, Xanthomonas campestris; identical to SEQ ID NO: 47254

SEQ ID NO: 47329 - DNA, 4083 bp, Xanthomonas campestris; identical to SEQ ID NO: 47255

SEQ ID NO: 47330 - DNA, 1467 bp, Xanthomonas campestris; identical to SEQ ID NO: 47249

SEQ ID NO: 47331 - DNA, 660 bp, Xanthomonas campestris; identical to SEQ ID NO: 47250

SEQ ID NO: 47332 - DNA, 3360 bp, Xanthomonas campestris; identical to SEQ ID NO: 47251

SEQ ID NO: 47333 - DNA, 1221 bp, Xanthomonas campestris; identical to SEQ ID NO: 47252

SEQ ID NO: 47334 - DNA, 1470 bp, Xanthomonas campestris; identical to SEQ ID NO: 47313

SEQ ID NO: 47335 - DNA, 702 bp, Xanthomonas campestris; identical to SEQ ID NO: 47254

SEQ ID NO: 47336 - DNA, 4083 bp, Xanthomonas campestris; identical to SEQ ID NO: 47255

SEQ ID NO: 47337 - DNA, 1467 bp, Xanthomonas campestris; identical to SEQ ID NO: 47249

SEQ ID NO: 47338 - DNA, 660 bp, Xanthomonas campestris; identical to SEQ ID NO: 47317

SEQ ID NO: 47339 - DNA, 3360 bp, Xanthomonas campestris; identical to SEQ ID NO: 47251

SEQ ID NO: 47340 - DNA, 1221 bp, Xanthomonas campestris; identical to SEQ ID NO: 47252

SEQ ID NO: 47341 - DNA, 1467 bp, Xanthomonas campestris; identical to SEQ ID NO: 47249

SEQ ID NO: 47342 - DNA, 660 bp, Xanthomonas campestris; identical to SEQ ID NO: 47250

SEQ ID NO: 47343 - DNA, 3360 bp, Xanthomonas campestris; identical to SEQ ID NO: 47251

SEQ ID NO: 47344 - DNA, 1221 bp, Xanthomonas campestris; identical to SEQ ID NO: 47252

SEQ ID NO: 47345 - DNA, 1470 bp, Xanthomonas campestris; identical to SEQ ID NO: 47253

SEQ ID NO: 47346 - DNA, 702 bp, Xanthomonas campestris; identical to SEQ ID NO: 47254

SEQ ID NO: 47347 - DNA, 4083 bp, Xanthomonas campestris; identical to SEQ ID NO: 47255

SEQ ID NO: 47348 - DNA, 1467 bp, Xanthomonas campestris; identical to SEQ ID NO: 47249

SEQ ID NO: 47349 - DNA, 660 bp, Xanthomonas campestris; identical to SEQ ID NO: 47317

SEQ ID NO: 47350 - DNA, 3360 bp, Xanthomonas campestris; identical to SEQ ID NO: 47251

SEQ ID NO: 47351 - DNA, 1221 bp, Xanthomonas campestris; identical to SEQ ID NO: 47252

SEQ ID NO: 47352 - DNA, 1470 bp, Xanthomonas campestris; identical to SEQ ID NO: 47313

SEQ ID NO: 47353 - DNA, 702 bp, Xanthomonas campestris; identical to SEQ ID NO: 47254

SEQ ID NO: 47354 - DNA, 4083 bp, Xanthomonas campestris; identical to SEQ ID NO: 47255

SEQ ID NO: 47355 - DNA, 1470 bp, Xanthomonas campestris; identical to SEQ ID NO: 47313

SEQ ID NO: 47356 - DNA, 702 bp, Xanthomonas campestris; identical to SEQ ID NO: 47254

SEQ ID NO: 47357 - DNA, 4083 bp, Xanthomonas campestris; identical to SEQ ID NO: 47255

SEQ ID NO: 47358 - DNA, 1467 bp, Xanthomonas campestris; identical to SEQ ID NO: 47249

SEQ ID NO: 47359 - DNA, 660 bp, Xanthomonas campestris; identical to SEQ ID NO: 47317

SEQ ID NO: 47360 - DNA, 3360 bp, Xanthomonas campestris; identical to SEQ ID NO: 47251

SEQ ID NO: 47361 - DNA, 1221 bp, Xanthomonas campestris; identical to SEQ ID NO: 47252

SEQ ID NO: 47362 - DNA, 1470 bp, Xanthomonas campestris; identical to SEQ ID NO: 47313

SEQ ID NO: 47363 - DNA, 702 bp, Xanthomonas campestris; identical to SEQ ID NO: 47254

SEQ ID NO: 47364 - DNA, 4083 bp, Xanthomonas campestris; identical to SEQ ID NO: 47255

SEQ ID NO: 47365 - DNA, 1467 bp, Xanthomonas campestris; identical to SEQ ID NO: 47249

SEQ ID NO: 47366 - DNA, 660 bp, Xanthomonas campestris; identical to SEQ ID NO: 47317

SEQ ID NO: 47367 - DNA, 3360 bp, Xanthomonas campestris; identical to SEQ ID NO: 47251

SEQ ID NO: 47368 - DNA, 1221 bp, Xanthomonas campestris; identical to SEQ ID NO: 47252

SEQ ID NO: 47369 - DNA, 1470 bp, Xanthomonas campestris; identical to SEQ ID NO: 47253

SEQ ID NO: 47370 - DNA, 702 bp, Xanthomonas campestris; identical to SEQ ID NO: 47254

SEQ ID NO: 47371 - DNA, 4083 bp, Xanthomonas campestris; identical to SEQ ID NO: 47255

SEQ ID NO: 47372 - DNA, 1467 bp, Xanthomonas campestris; identical to SEQ ID NO: 47249

SEQ ID NO: 47373 - DNA, 660 bp, Xanthomonas campestris; identical to SEQ ID NO: 47250

SEQ ID NO: 47374 - DNA, 3360 bp, Xanthomonas campestris; identical to SEQ ID NO: 47251

SEQ ID NO: 47375 - DNA, 1221 bp, Xanthomonas campestris; identical to SEQ ID NO: 47252

SEQ ID NO: 47376 - DNA, 1470 bp, Xanthomonas campestris; identical to SEQ ID NO: 47253

SEQ ID NO: 47377 - DNA, 702 bp, Xanthomonas campestris; identical to SEQ ID NO: 47254

SEQ ID NO: 47378 - DNA, 4083 bp, Xanthomonas campestris; identical to SEQ ID NO: 47255

SEQ ID NO: 47379 - DNA, 1467 bp, Xanthomonas campestris; identical to SEQ ID NO: 47249

SEQ ID NO: 47380 - DNA, 660 bp, Xanthomonas campestris; identical to SEQ ID NO: 47250

SEQ ID NO: 47381 - DNA, 3360 bp, Xanthomonas campestris; identical to SEQ ID NO: 47251

SEQ ID NO: 47382 - DNA, 1221 bp, Xanthomonas campestris; identical to SEQ ID NO: 47252

SEQ ID NO: 47383 - DNA, 1470 bp, Xanthomonas campestris; identical to SEQ ID NO: 47313

SEQ ID NO: 47384 - DNA, 702 bp, Xanthomonas campestris; identical to SEQ ID NO: 47254

SEQ ID NO: 47385 - DNA, 4083 bp, Xanthomonas campestris; identical to SEQ ID NO: 47255

SEQ ID NO: 47386 - DNA, 1467 bp, Xanthomonas campestris; identical to SEQ ID NO: 47249

SEQ ID NO: 47387 - DNA, 660 bp, Xanthomonas campestris; identical to SEQ ID NO: 47317

SEQ ID NO: 47388 - DNA, 3360 bp, Xanthomonas campestris; identical to SEQ ID NO: 47251

SEQ ID NO: 47389 - DNA, 1221 bp, Xanthomonas campestris; identical to SEQ ID NO: 47252

SEQ ID NO: 47390 - DNA, 1467 bp, Xanthomonas campestris; identical to SEQ ID NO: 47249

SEQ ID NO: 47391 - DNA, 3360 bp, Xanthomonas campestris; identical to SEQ ID NO: 47251

SEQ ID NO: 47392 - DNA, 1221 bp, Xanthomonas campestris; identical to SEQ ID NO: 47252

SEQ ID NO: 47393 - DNA, 1470 bp, Xanthomonas campestris; identical to SEQ ID NO: 47313

SEQ ID NO: 47394 - DNA, 702 bp, Xanthomonas campestris; identical to SEQ ID NO: 47254

SEQ ID NO: 47395 - DNA, 4083 bp, Xanthomonas campestris; identical to SEQ ID NO: 47255

SEQ ID NO: 47396 - DNA, 1470 bp, Xanthomonas campestris; identical to SEQ ID NO: 47253

SEQ ID NO: 47397 - DNA, 702 bp, Xanthomonas campestris; identical to SEQ ID NO: 47254

SEQ ID NO: 47398 - DNA, 4083 bp, Xanthomonas campestris; identical to SEQ ID NO: 47255

SEQ ID NO: 47399 - DNA, 1467 bp, Xanthomonas campestris; identical to SEQ ID NO: 47249

SEQ ID NO: 47400 - DNA, 660 bp, Xanthomonas campestris; identical to SEQ ID NO: 47250

SEQ ID NO: 47401 - DNA, 3360 bp, Xanthomonas campestris; identical to SEQ ID NO: 47251

SEQ ID NO: 47402 - DNA, 1221 bp, Xanthomonas campestris; identical to SEQ ID NO: 47252

SEQ ID NO: 47403 - DNA, 1464 bp, Microbacterium sp. CGR1
gtgactggatccagggctgaggccgcgtatgcgcgtgccgtcaccgcattcagcaccccgacactcgatctgctgcacggtcggttcgccccgttcgtggtcgcgtcgctcactcttctgttcaccgccgaccgggcgtctgtcgcggtcgcggatgcgcacgccgagctgggcgaggtgctcgacgaactccgagcggcggggtacgacgacgacaggcggcttccgtccgggagcggccgggacgtgtgccggaactgggtgcgcctcggctggctgatccagcagatcgacgacgacgtcgaggtctaccgcctgtctgcgcatgccgtcgcagcactcgagatatccggccgcaccggcggagggcgcacgcgcgtgtcgaactcccgcgtgcgcaccctcctcgacgcggtcgaccacctgtcggtgagcgcggaagtcgacccggtccggcggctggcgcggctgtatgacgaacgcgatctgctcgacgcagagatcgctcgcatccaggagaccgggcatgccgaccctgccgacgatgaggagctcctcgaggaggccgagaacgtcctgcacctggcacgcgaactgcccgccgatttcacgcgcgtcgccgagtcgctcaggtcgatgcaacgcgacgtcgtcgcccacctgcgcagggacgagagaccgacgagcgaagtgctccgcgagtatctgcagcgcgcccaggatgtgatgcagtcgacaccggaggggcgcgcgttcgcaggagccctgcgtctgatcggcgaccccgatcgcatcgatgccctcacagagcagcttcgcggactgctcggccggcccttcgcccgtatgctcgacggcgcgcagcgcgccgagctcgacgccatcggtcgacgcgtagagcagggggtggaggaggtgctggccgcgcagcgccgcgcttcgcacgtgatcaccggccaggtgaagacccacgatccgctgcgcgatcgtcagatcgacgacctcctgcgcgacgtcatcgccgggctccatgggtggtccggcccggcgacggtcgtcgacccggtgcgcagcatgccgctgatcgatctcgggcatctgcgtcagaccaccagcgatatccgcccgccgcgtgcaccggcgcccctcgccgacgccgatgacgtcgacttcctcgatcacgacacgcgcgcctggggtggtccgagatatgccgagctcgaggaatacgtcgccggactggggacggacttcgacctcgccgatgccttccggtcggtgcccgacgcggctcggcgccctgtcgatctgctcggtctgctcgagatcgcgcaccggaacggcctcaccgagggagatggcatctcgacggtcgaagcattgcgcccggacggcacgagcaggcgattcgcattcggcgccgtgaccgcccgcagcacgaaagaggattcagatgatgagtga

SEQ ID NO: 47404 - DNA, 660 bp, Microbacterium sp. CGR1
atgagtgacgacgacctcaccacagccggcgcggatgaggggttcatcgctccgacggcgatggaggacgacctcgaggcgcacttccccggcgatcgcggcacgctcgatcccgagatcagacgcgtgctcgtgcacctgctccagcggcgtttcatctcgatggagcgcaaccgacgtgagtggacgctgctgctcgagcaccagcaggtgatcgagtcgcggctcaacgacatctacctgcgtctgatcatcgatcacgccagagggttcgcgtacaagcagcagctgcgctctgacgaggtcgagatgcccgtgctgctgaaggactctccgtactcgcgcgccgagacgctcgttctcgtgcacctgcggaccgtctaccagcgcgagtccgcgtccggcgagggttcagtgcggatcgacatcgaggacgtcgagcagaccgtgctgagctacttcgcggacgtcgacggcggaaccgcgaagcagcagcgcgccatccgcagcgcattggatcggctggatcgagagggcatcgtgcaggaggagaccagcggacgctaccggatcaccgcgctcgtcgaggtggtgctcagtgcggagacgctcaaggagctgcgggagtggctgcgatcccaggcggtggtggcgcgatga

SEQ ID NO: 47405 - DNA, 3354 bp, Microbacterium sp. CGR1
atgacgatgatggacacgctcttcgggatgatccccgcgagctcacgcggtcagcagtgggtcgcggaggagctccagctcatcaactggggcggctacgacggcggtccccaccgcgtgcggttctcgcccgatgcgaccctgctgtgcggcggatcggggtcgggcaagtcgacgctcatggacggctacatcgcgctgatgatgccgcacacgacgcccttcaacggcgcgtccaacggcggcgtcacgggccgtccccgcggcgacgagcagcggaacatcctgtcgtacgggcgcggcaagatcgacgagtcccgcaccgaggaggggacgaagctccgcgtgctgcgcggcgacggcgaggacacctggagcgccgtctcgatgacgtggttggatcacgacggctcgcgcttcacggcggtgcgcgggtggtacatccccgcggacgcccgcaccctcgaggacaccacgcgattgcgggccacgatcgacggcgccttcgacctctcgcagctcgaacgcgctgcggtccagcgactcagtgacgcgtcggtgcgcgccgtcgggctggagcccgtggcgaccgaccgcgagttctcggctcgacttcacgccgtgctcggcatcggcgcggccggttcgggggcgaaggcgatcagtcttctcgcccgcatccaggccggtcagcagatcacgacggtcgacgacctctacaagaagctcgtgctcgaggagcccgagacgatggcgaccgcggacgcggtggtcgctcatttcgatgagttggagagcacccggacgcggatgctcgtcgccaagcagcaggtggcggctctcgagccgatccgcgagatctcgcagcgcatcgaggcggcgtcggcgcggatgagcgtcgtggacgaggtcggggtcttctcggagccgacctccctcgcgtccctgtggagcgccgagcgccgcctcgatctgctgcgcgaggtggaggcggatctgcgtgaccgcacccaggcgctgcagctggccgtccgcgagaagaacgcactgatcgccgccgccgaggtcgagcgggaggggctgctcgacgtcctgcggcagtccggaggcgaccgcctcgagaccgctcagcgcgagctgcggggtgtcgagcgccgactggaggacgtccagcgcgagcgggcgcgcttcgacagcgtcgccagggagctcggcgccgaggtgcgcaccgcatccgatttcgaggaactgctcgcccgcgtcggccgggagctcccgcagagcggactgcgcggagcccgcgccgccttcgccgatgcagagtcgtcgcgccgagcggtcgagagcgagctgagtcgcgcgcgtgccgagcaggaccgcacccgtgagctccgcgggagcattcccgcgcatctgcatgaggcgagaactctcctcgcccaggcggccgggctcaccccgacggatctgcccttcgtcggtgagctcatcgaggtgcgcaccgagttcgagccctggcgggacgcgttcaacctcgccctcggcgggttcgcgcggacattgctcgtcgatgtcgcggacctcgggcggttccgtgcggccatcgagtcggtgcgcatcgctgagcggatcagctacgaaggcgtcccgacgggcgtcgccgagtctcggacggcggacccccgcacgctccccggtcgtctcgatcaccgatcgacgccgttcaccggatggcttcagcagcgactccgtgagcggttcgagtacgtgtgcgtggactcgtcgaccgagctcgccgagcaccctcgcgcgctgacgctcgcggggcaggtgtcgcacggagaccgcgggtcccatggcgggcatggccgggcgaacatgctcggattctcgaacgcgcgccgtcttcgcgagctcgacgagcagatcagccagctcgagagccgccgcgatgctgcgactcaggccgctgcggacgccgaggccgacctcgactggatcgaggcgacgtccaaggcgcacgcgaagatcgaggacctcacctgggatcagatcgacgtcgaggccgtcacggcggagcgcgcgcgatgggtcgcagtggaggcggaggtcaccgacgagaacccgaagatcgccgagctgaagtcgcaggccgaggagctcagaaaacgggtcggccgtctgcgcgacgagagctcccgactcgggggagacctcacactcgctcaggaccgttgggtggaggtcaccgaccaggtcgacgactgtcagcggatcgtcgatgcggctgaggcggccgagatcgcgctggaggagcggcatcgttcgttcctcgacgcgcgcttcctcggagcagacgcggccgtcagcgtgacggcgtcggagcgcctcgctcacctcgacgccgcattgcgcacggccgcgaccagactgctcgaggaccgcacgtcggcagccgcggcgcacgccgagcagcgtgagcagatgcgacgcctgatgaccggtttcctcgagcgctgggatacgctcacgatcctccccgaccccgacgagtcggtcgcggagttcgagagcatcctcgtggcgctcgagaccaacggcctgcacgagctggaatccgaatggcgagacagcctcctcaagctctccggaaacgatctgacgagcctggattcgacgctgggtcgtgcactgcgcgagatcaagaaccgcatcgacccgatcaacaggatcatggaggagctgccgttctacgacgatgatcaccgtcttcagatcacaccgcgcgagaaccagtccgaggcgcgcaggcgattccgcaaggagcttcgcgaggtgcgcagcctcatcgacgcagcggagacggatgtcgatcgtgagagcgtctaccggaggatgagccgtctcatcggtcggatgcgacgcacagctcccgacttcgccgagctcatcgacgtgcgcaaccatgtgcgggtgagcgcggagcgggtccatgcgacgacccgggagcatgtcgcgctctacgaccacatcggcgagaaatcgggtggagagtcgcaggagctggtcgccttcatcgtgggcgcggcactgcgctaccagctcggcgacgcgggtgccgagcgtccgaggtatgcacccgtgttcatggacgaggccctgatcaaggcggacgcgcacttcacgaagcgtgcgatcggagcatggcggggtctcggcttccagctcgtgatcggtgcgccgaacgacaagtacagcgccatcgaaccgcatgtcgacgtggagtacgacatcctcaaggacacgcgcggccgctcctgggcacggccgaaggtcggtctgcccgccgagtga

SEQ ID NO: 47406 - DNA, 1497 bp, Marinobacter sp. CP1
atggacgaacaaacccacctgagaacccgctcctacctggtggcccgtcaccagcatccggcctggaagcttctgtctgccacccgcgggcccctggtacttagttgcctgcaggcactgatggaaacaaaccgggaagaaatcctgttcgaggatgcccagcaaatgctgacggatatcctgcgtgaacacgccaacagcgacgacctgaagctgtcccccgacgacccggcagccgatgccaggaaagaactacgctcctggattcgcaaagggctgatagtggaacgggacggccggctgatggccaccgatgccctgcaaaaagccctggcctttgttgagggcctcgatgaaaagatcatgacgtccaccgcctctcgcctcgccacggtacagcgggaaattgaaaacctggaaacccgtctgaacccgaatgcccaaagccgtgcggaccatatacgccgcaaaataagagacctggagcacgaactggccgacgtggaagccggtcgattcaaggtgctggagggggccgaagccgcagaaggcatccgcgaagtctacaatcttgccaccagtctgcgagcggactttcgccaggtggaggactcctatcgggacgcagaccgtcagttacgccaatccatcgtcagcgaacagcatcaccgtggcgaaatcgttgaccgcttgctggacggccacgacaccctgctggaaaccgccgagggcaaggtattccacaacttcagtgagcaacttagccgttccatcgagctggacaacatgaaacaccggttgcgtaccatcctgaagaatccggcaacccgccacgccctgtcccgacagcaacaggatgaattgcgctggctcgtgatccggctgatacaggagtccgctgctgtcatccgcgcccgggcccgcagcgaaaaagacgtcaaagggttcctgaaaaccgggctggccgccgagaaccacagagtcggcgaactgctcaatggtatactgaacaccgcacttaacatcgactggtccagccacaaggtccgcaaaggcgacacgcctctgccgccaattgccgtggcggtttccagcctgccgctggttgagcggctcagattcaagtccgccactgaagagcaggcacaaggcctcgagttgaccgatcagggcgtcaacctcgacgacgtcgacgaagagttctggcgggcatttgacggtcttgaccgggaagccctgtaccaggaaaccgtggaactgctgaaagtcaccgaccgccccatgagcatcggcgacctggcggctcacctgccgcccactcacgacctggaaaccattgccctgtggctggccatgtcccgtgaggcggaggtggaaatcaccgacgaccgggaagccgtggatattaccgacagcaacggacaccggctgcgcttccacgtgccgcaactggcgctaacccgacaagacgcagaagccatcgactgggagctgtaa

SEQ ID NO: 47407 - DNA, 663 bp, Marinobacter sp. CP1
ctggcccatgtcgatcagcaaacgcctctgacggaggccagccactacacgcccggcaatgtgaaagccaccgcccaggagctgctgaaatacgggttgctggaagcagaccgtaagcccaacctctaccaggttgccaccacccagaccgctgcgatcaaccagatcctggaaccgttcgacctgcgcctgaaagtggacgacgtacgtggactggctttccttgtcgtgtcagaccggctcttcagcgaaggccaagaaaacgacgacgagtggtcccaccccctggtgcgccgccagcgtctgaccatggaacagtccctgctggtggccatactacgccagcactttatcgcccacgaacaggaaaccggtctcggtgccggcgaagccactgtggaactggatgagctactgccccaactgcagctgtacctgggcgacaccggcagcgacacccgcgaccagaaacgcctgcgcagcctgctggacaacctcaagagccacggcattgtctcggacatcgacgccaacgaccaggtggtcgttcgccctatcatcacccacctggcgaacccggaaaatctgcagaacctgctccaccatttccgacaaatggccggccagtccgccccgcaagacgctgacggagaggatgtatga

SEQ ID NO: 47408 - DNA, 3324 bp, Marinobacter sp. CP1
atgagcctgccccagaccgacctctttgccgctgacatcctgccgcccacggcctatatcctgacccacctggacctgtataactgggggcccttcggtggacggcactgcgcggagatcgacccgaaaggcaccgccattatcggccccaccggcagcggcaagaccacgctggtggacgcgttgatgaccctgttgactcaccagccccggtacaacctggcctccactggcggccatgaaagcgaccgtgacctgatttcctatattcggggcgtatccggtgccggtaacaataccggcgacaacagccatatcgcacgcgctggtaaaaccgtaacagccgtgagcgcccgcttctccaacggtaacaacgctattcgcatcggggcgctgttctggatcgacggcagcagctctgccgccagcgacctgaaacgcctatggctgttttcagaaagggatgaccagagtctggacaactggctggccattcaccacgagggtggcgcccgggagctcaagcaacacgccggggataacccaggcttacaggccaacgacagtaagaaagcctacctggcccaagtacggcgattttttgaagtgggggaaaatgccttcactctgctcaaccgcgccgcgggcctgaagcagctcaacagcatcgacgaaatcttccgggaactggtgctggatgaccactcggcgttcgaccgggcggcagaggtggccagtgagtttgacgacctggccgcgatccacagcgaactggaaaccgcccgaaaacaacaccagtcgctgctacccatagcggaaacctacgaaaagcaccagagtgccaccagagagcttgaccagcagctgttattgaaagacatcctgccgatctggttcgcacaaaccggctacgagctgtggagcacccgcaaacaggacctggaacgtcagcttgataagggcagagaaaccctcgagtcattgagcagcaatgttaagcaactcaacagcaaagccgataccctgaaagacatatacctgcaggccggtggtgccagcatagagcagctaaaggagcagatctcccaacagaagcgctgggtaggagaacggggccgacacgccagggactaccagaccctgaccggcaagcttgacctggacagcacactgagctccgaagcactggcccggaaccgccagctcggtgagtcaaagctggccgaactgtccgaacttgcggacactcaggacgaattcctgctcgacctgcgttttcgtcacggtaagctcaatgaaaccctgacggaaatcaccgaagaaatcgaccgcatcaaggcccggcccgggtccaacatcgacggacgttaccaggaattccgcagcgaactggcccaggacctgaacctggacgaaagcattctgccgttcgtggcagaactggtggaagtcaaagccgaagaacgtgactggcgtggcgccattgaacgggctatcggcgggcaccgcctgcgcctgctcgtgccaccggccgccatgcaatcggccctggacagggtcaacagccgtgacaaccgccttcatgtgcgactgctggaagcccaggcaccccaggccacggcacagttcatgaaggatggcttcacccgcaagctgaacttcaaggaccatcctcaccgggaagccctgaaacaattgttggccgaaatcgaccgacactgcgtggactctcccgaaaccctgcgccagacaccccatggcatgacccaacagggcctgatgtccggcaagaagggctattttgaaaaacgggacaaccagcggctcgacaagggctggatgaccggcttcaacaaccgtgaccgtctctccgcgctcaacaacgaactgagcgaaacccgtaagaaagcggacgctctggggcggcaactcgaatcagcccgccgtaatctcagggacacaaatgatcagataaggctttacgaactcctgggcgaaaccgagttccgcaccatcaacctgcccagcgcacaacgtgaactcgatgccctgcaaagccggctggaagcactgaccgctccggactcggatgtggaaaaagcacggggggaatttgaagcggttcgccagcaactagaagaaggccgacaacagctgtcgaaccaggaaaccgccctcgccctgctgaaagaaaagcgcaaccaggccacggaccgctgcacagaactgctggaccggcttggcgatggcctcacagacgaccagcaaagcctggcaaccagacacttccgcaccccgaaagcggaccagtacgaacgactggaagccctggagcgggaccagcgagagcaactggacaaagtcattgggaagctgggcaaacagatccagagttttgaactcagcctgacccaactgatggaaaaggcgctcaccattgataccggggcgctgattgaaaccggcagtaatatccaggacattccggaatacctggaacgcctgcgggtactggaggaagaagcccttccccagaagctggagcgattcctcagctatctgaaccagtcgtcggatcagggcgtgacccaactgctggctcaaatacagaaccaggtggccatcattgaagaacgtatcgccgatctgaacgccacactgcggcgggtcgacttccaccctggccgctacctgcgcctggagccccgccgggttacccatgaatccctccgcaggttggaacgcgcacaacggcagctgcgggcggatgccctgaaaggcgaccagggcgaaagccatttcaaggctctgcaaaacatggtggccttgctgcgggacgcggcagacaacaagcgcaccgtgggtgcccgggctctgctggacccgcgctaccggctgcagttcgaagtttcggtgctggaacgcgagtccggctcggtgatcgagactcgcaccggctcccaggggggcagcggcggcgaaaaggaaatcatcgccagctacattcttaccgcctccctgagctatgcgctttgtccggacggcgccacccagccactgttcggaaccatcttgctggacgaggccttctccaagagctcccacgccgtagccggccgcatcatctcggctctcaacgagtttggcctgcacccactgttcgtcacgcccaacaaagagatgcgactgctacgggcccacacccgctctgccatcctggttcaccgcaaggacctgcgggccacccttacctcactgagctgggaagaactggaggcccacgcggagaaaatgacccggaaagcccatgaaatccccggctga

SEQ ID NO: 47409 - DNA, 1155 bp, Marinobacter sp. CP1
atgaaatccccggctgaactggcaagccgcctggcccgccaatggcagaacgcggacctgcgcgaacagcgcctgctccggcctcagagctggccattaaccctccccatcggcaagcccacgggcgcgacggtacgggagaaggtcacacaggtacgagaacacctgcggcaatggcgggaggtcaccaccgggcaggtccagtggcagctggtccgcttcaagagcaccagcgaagccatcgacattcccacccactggacactggacactcccagccagtgggtgcaggccgcgggcagcagtgaagtcaggcgggaatacgacacactcagccgtctcgcctctgttctggacccgcgatttcactcactggtcatacgccggcgcagcctggtcatggataagccggaaagcgacgttattcgcagcggcaaggttgcccttcagctccagccaggctgcgccgaaggaaaacccctcagggcactgtctattgccggcaccgacagcaagttcttcgagcgcaaccgccagcttgtaacgctgatgctggacattctgttcgacggccaggccagcgaaaccgggctggaagcctttctgggcgctgaagacgacggccaccactggttactggtcgccgaccttgatggctcgttgttgcccttcacgcaaatgcgggtccgggcccacgaactccaaagcacgcctttacctggcgaacggttgatactggttgaaaacgaacgctgccttcaccagttgcccagggtctccggtacggtctcggtacttgggtcgggcctgaacctgtcctggctcaacgcaacatggctgaaagatcgggcgaccgcctattggggcgacatcgatacctggggactgaccatgctggccagcgcccggaaacacctcccgcttctcacaccactgctgatggacaggattaccttcgacacgttcgccgacgcaagtggtgttgaagaaccacagcctgccccctcgatcactccgccaggattgaccggaagcgaggctaagctttaccaacgtctgagacaggcagaccggggccggctggagcaagagtttctgccggtctgtgttgttcatagggccattggcgactgggtcgatcgctccgcagaataa

SEQ ID NO: 47410 - DNA, 1458 bp, Moorella thermoacetica; identical to SEQ ID NO: 41721

SEQ ID NO: 47411 - DNA, 612 bp, Moorella thermoacetica; identical to SEQ ID NO: 41722

SEQ ID NO: 47412 - DNA, 3624 bp, Moorella thermoacetica
atgaagtggatgcgccgcctgcggttgattaactggcactatttttatgacgaaaccctggagttcggccgccagactctcatcgccggccgcaacagcgccggcaagtccaccatcatcgacgccctgcaggtcctcctggtggccaaccagcggcagatccgcttcaattcggcggcccacgacgaggccaggcgttccctgatcagctacctgcggggcaaaaccggcggggaagaaaggaagtatttgcgggaaggtgattttaccagctatatcgtcgccgagttttatgaccagcaaaagagggaaaactttgtcgtcggcgtggtgatggacgtctacggcgacgataccatcgacgacgaatactttatcctgtccggggttgagctggccgacctggatttttggagcccggcggaacgctggaaaaaccgggaggagtttcaccgctattgtcaaaacctgccgggacgccatatcttcgagcggagcaaaaccggctaccagaaggcccttttaaaccgcctggggcaggtaagcgagcgcttcttccctgtcttcgtcaaggccctttcctttaagcccatccagaacgtgcgggatttcgtctaccagtatatcctggatgagaaggagctgcagctggacctcctgcggcagaactttgaaatccacgagcgctaccaggcggagctggaagccctggaagagcgccgggagcagctggaggctatctgccgccagttcgacacttttgcccggctgcgggatacggtggctatccaggagtatgtcatccggggcctgaagcacacccgggaggtggagctgcgggaccgcctggaggaggagatacgcttcctgacagccgaggtcgaacggctgggccgggagctggatctggcgcgggccaagcagctggaggccgggcagaaggccagggaggcatatcaaaagtggcaaagccaccaggccaggcagcgggagcaggagttaaaggaaggcctggcccgtgtggataaggatttgcgggagcaggggcggctgctggcgatcctgcgccagaccctcgaacgggagaaggccctgctggccggcctgcaggagatggaagcggatgaatactggcagtggcagccgggggagcgggagcgcttgggacgggccctggagctgctgtccggattggttccggccggggacgctgattggttaccgggggaggataccgtggccgctgtgcgggatacgggtcttttcctggccggcctgcacagccgctgcgcccgggctgttggccgcctggaggaccggctggccctgctccagcaacaaaaagcggaactggaggggcagatccgcgacctggagaacaagaagcggccctaccccccgcacgtcctcaacttgaaaaggctcctggaagagcgcttgaacaggcgttcgccggtgtggatcttctgcgaagaaatggacctgaaggatgaaacctggcgggacgccgtggaggggtatttatacactcagcgcttcgacctgctggtggaaccccgggtctttgccgaagccctggccatttacgagagggaaaaagggaagcaccagatagaaggagtcggcctggtggatacggagaaggagcagaagtacctgggtacggcgcaggagggttccctggcggaggaaatggtaacgggcaacccggtcatccaggcccacatcgaccatctcctgggccgggtcatgaaggcccgggacgagcaggacctgcgccgttaccgcaccgccatcaccaggacctgcatgtcctatcacaacctggtggccaggcagctggaaaaacaccgctacgccgtaccctatatcggcgcccgggctattgcgcgccagttagaaatcaagcgccgggagctggcggagacgaaagaacagatagaggtactgaaggataagagggagaagctggcggcctggctggaacgcctggccgacaagaagtccctttacgccggcatcagcgagcagctggacctccccgcccgcatccggcgtttagaggaggagcgggctgccctggccgccgaactggagcggctggacctgggggaagtggagcggttaaaggaagaatattactactgggagcgccgcggcaaagagttgctggatgaagtcaccgaaatcagcggccttaaaaaaagccgcgagaacgagttaaaccagaagcagacggagctgcacctgcaggagacgagggtgcaggaagcccaggccttttggcagtcctggcgggagcagtatcctgtcgagctcctgccccgggccgaggaacgctggcgggaggcggcagggcaggaactgcctgtggccagcaagctcatcaactgggagaacagccagaagggcaatactaccaggcgggagcaggagttccagcgcctgcgcgacttgcgccacgagtacaacctgcgctacacctataacgccgatcccggagccccggataatgaagcctaccggcccctgctggcggaaatcgccacggtggatattccccgttaccgggaaaagctggccgaggccctgaagcagtcggaagaggaatttaaatcccattttatctttaagctccgcgaggccattgaagcagcgcggcgggatttcaacgagctcaactacgccctgaaaaactttcccttccacgaggaccgctaccactttgagattaaacccagcgagaggtacaggcgtttttacgacgtgatcatggaccccggggtgatggagcagggttcccttttcgagctgcccgaggacgaccggacggctgtccttcacgagctctttgagaagctcatccgcggcgaggccggggaattggaggagttcaccgactaccgcaactacctggatttcgatatcgtggtcaccagcggtgaacaccgctattccttctcccaggtgctgcgggaaaaatcgggcggcgaaacccagacgcccttttatgtcgccatcctggcctccttcaatcatctttatgacacgggcaagacagtacggctggtggtcttcgacgaggccttcaataaaatggacgaagagcgcatccagaccagcctccggctcatcaagcgcatgaacctgcagcttatagcagccgtgcccgacgagaaaatgcagcacatggcgccggaagtcgataccaccctgctggtgcaccgtaacggcttccactgttttgtggacatgatcagccgccaggaagtactggccggagatgaagtgccaaccggtgacgggcagccggccggccctggcgataccgacgggggccgggcaggagggcataaagaagcaggctacgggggcaccggtggtgaggactccggagatgccggcgatgatgctgatgatgccgggaatgatggcccgcctctaaatgatgccgcctctttatctcgccccgccgggggagaagacggtcaccggggccaggccggcggtagcggcggtgaagatagcggccggccgcggcgagggggtgtaaggaatggccgggacgggcagagacctgcaagcgcagtaccggtacaggattctctctttgctgatcagtaa

SEQ ID NO: 47413 - DNA, 1278 bp, Moorella thermoacetica; identical to SEQ ID NO: 41724

SEQ ID NO: 47414 - DNA, 1458 bp, Moorella thermoacetica; identical to SEQ ID NO: 41721

SEQ ID NO: 47415 - DNA, 612 bp, Moorella thermoacetica; identical to SEQ ID NO: 41722

SEQ ID NO: 47416 - DNA, 3624 bp, Moorella thermoacetica; identical to SEQ ID NO: 41723

SEQ ID NO: 47417 - DNA, 1278 bp, Moorella thermoacetica; identical to SEQ ID NO: 41724

SEQ ID NO: 47418 - DNA, 1368 bp, Limnohabitans planktonicus II-D5
ctggtttcagcctgtttacgtgcactgttcgagcggctgcacggccctgctgcagactatgtccacaacctgaatcgagaagccctcaaggagcttattgctcctgtggtgcgcgagcaccaaagcgaactcgataccgatgctgagcaggacgaattcaacacaacggacgcggtcgatccccagcagctcaccgtcacggtcattcgtgcgctactacgggacgggtggctggagcagtatccggaccgcaatggcttagtcaccgcattccgattctcgaggcctggcaaattgttcgccgaggccttctgggcgctccaccgtcccagtcgcagccggcaacgcaatatgcgcggctgccgtaatgcccttgaagccgcactgagcgaacgtggcgacgcgcatgacctggtagacgcctatgagtacgcagaaaaggtcatcgaagacctgaccgagggcatcgactacctgcaggaacgaatccgccacctcatgcaggaagccactgtgcactcccagtgggatgacttcgtagaattcttggaccggtttcaacgggactactccaagcaactgactgctgacagcgccacgcttaatcgacagggtattcggcaaaagattgaaatgcttcgggtcagtttagacagccaaaaatacaagcgcgttgaagagcagcttcaagacattgctcagtgggctgtcaaagaacatactggttcttcggtgttcgaatggctgctggaccgcattgatgacatcgtcaatgccgcctgcgacaccaagcagcccacgttcgtgcgtgccatggacacctacattcgacgtatcacgggccttgtgcagcagtccatgatgctgcgtaccgggcaaaaccgccatgcctacctcaatgccatctccaagctcgccgaacgcgacaaagccgggcaagacaagctattgcagaccattggggaacaaatttcttgcgtagaaatccgccttttggacccatccagcttcaagttgcggtctgctacacaacgacgcaaagccgccaccatttccatacaacctcgcgccagccgcgccgcgcgccttgaatcgttcatgaagcgcgccgaatctgaagcctttgcggtggctaacgaagagcttgcgagcaagttgcggggtgaccttcgattgtttcagcatccaattcacctgtcgtcattgcctccagagacggcgcgggacctcatcagcaacatgcaagccgttgaagccgtgcgcaataccaaaggacgtgacctggcggccacaaggctcccaggccgcgttgagaatgagttctacagcggctacgactacgaatttgatttcaagagagatttatga

SEQ ID NO: 47419 - DNA, 672 bp, Limnohabitans planktonicus II-D5
atgagcctcacaaccgaattgcgcgagaagctggcgaaaaccactgtcacgatggaacggtttcgtgaaatcgcaacccgtttgctgtcatacggcgtgctggtgcgagatgaagatcgtacagaacaggcgctgtacgacgaaactcgtcaggtggaatcgttgttgtcagagtacttcgaggtagtcgggatgtacctgcatcacgacgtcaacgcccagttctttcgcctctacgctcccggcgctgttgttgacgggatccgggaggacaccttttctccggtaccttcgttgaaggcacgggtgtctaccgacttcgttgctgcggccatagcactgcggttcctctatcaagaaaagttgaaccaagggctcatcgacacccaggccgaggcacttatcagcgttgacgaccttgcattgacgctgataacccagctcaagcggcaacttccggagcgcgatggtgagcgcatggggcttctggcagagctgaaaagacaccgccttctcaggtactcatccacgttcagcgtgagcgatgaagacgcctacctcgcgatacgaccaaccatcttgggcgttgtcagtaacgaagctttagctgttgcaatggatgccgacggtgaaatcgaacctgtcatgcaggttgaggagccacaagaatga

SEQ ID NO: 47420 - DNA, 3660 bp, Limnohabitans planktonicus II-D5
atgaaattagaccgattgattctcgtaaattggggacagctgcgccctggcaactttgaaatgggtgacatgacgctgttgaccggcgaaaccggttctggcaaatcgacgatgctcgacgccctgcagactgtgatgaccgctgcgaacaaaggcgtcatgaattacaaccccggccaagacgaagtgactcagggccagcgccgtggcaaaaccaagcgcacgctggaatcctacgttgtcggcgccgagtacaacaacttctcccgcaaggacggcgcacaaggctacatggctgcagttttccggcaaagcaagggtgaagaacacttgaagcccttcacggccctcgttgcggcatctgcacgggtggaaggctccaccgctgatacgcgccaagcgaagttggaaagcctgcagctcgtcatcgtggatgacgccgctttgactttcgaagatttcatgaaggacgttgagaccaatgagtgcattgctgtggaccgcatcgcgcggcaccttcagtccaaattcagccgagtccatgatttcaatgagaagaagatggactacttgtgcgcgctgtacgggcgctttcggggcaagtccagcgtaaccaaggatgaggcgaccaatgcagccaaggcttgggttcagtccattgcttaccgccctattggctctgtccatgaattggtacgagacgagattctggatttcgacgagaggcagctccagcaagacattgagcgcatcagtgggctcatgaagcaggtcagtaatctgcggcaggaaggcgtgcgtctaaaggatagcgttgtacggctcgcaactttgcaggcagccattgaccaaaccgccaaggcccacgaagcccacgtgatgcaaggcatgttggtcgcaaaactccagctgagcaacgacgatgtcgccatagaagccaagaagaagctgataagcaaggcagacgaagccatcaaggaagagaacgggaaaatcacttcgtggaacgcgcgactggcagtcattgacgaccagcgtgtgcaattgactgcccagcttcagggcatcccggtgcacaaccaaaagatggagcttgatagcaatctggccaaggctacggccactgcacgagctagtctggatgagctgtcactttccctgatagctgccggcctgttggaacagcgctcaaaagagttgatttcaaagccgattccggagtccttcaaggaattgcagaaagccgtagaccgggttgccaaggcttatgggcaagtcgacttcccccgtctggcagcttgccgtgacagcgtggcagaagcgacaaagggtgaagagttgaacgtctggaagttgtacagcgtggtttcggcgctgtccggaatcaaccaaggcatcgacaatttgcacgtagcactagttggcacggacgaaagcgtggccatggcgatttcagcggaggcgactacggtttcacagattaaaaccaaggccgacgataaggtgcgcgatttgggcagtcagaagtcccgacttttacaaggtaaggtctcgtatcccccctatgttcagcgggggctggacttgctccatgaacagttccgggatgccaatgcacaagtcttgtgtgacttggtcgagcccaagtcggaaacgtggcagacggctatcgaggggtacttggggaacgcgcgcttcaacatcattgtttctccagagtgggagcgcaggtgcgtggactttctcaagtcacgcgccatctctgcaaaaatcatccagggtgcaatgtgcctgaaggacgcagagggcaaggtactgccaaccgactccatcgtaagggagctgacggctgccaaccccatcgcatgggcgtacttggtcgagcagtacggtggcgttgtcaaggtcgccgataccgaagctttgcgatataccaagcgcggtatcaccttggacggcatcggctctggaagccgctccatgttcactgctgagaaaaagtcgaacaatgtctttggtatcaaggcgcgtgaacaagcacttgtcaaggtaacgaaagaattggaaatcgctgaagctgaggctcttgcattgggaaacacccaggcgttcttggattcgataaagtccgcgttgctaggtctcaaggcaccacgtttcgacgccaatgcgttgcgagatgcggccaatttgattgaaaagacgcgagcgtccctggaaaccctcgacatcacagaactcaatgtgatgcaagagacgctattgcggattcagggcgaaattcgcgacttctatttaagcatttcggctgcgaaccagcgggtcggcgagcacaacagcgccatggctaacgcggaagctgccatcaaagggattcaagcgagtaagcaggaccatttgaaggcgctggaggggcaaatccaaaagctcaagaagttagttgcgtccaaccccgcattcacctatccggcgctggtggccgggattgacgaaaggctttctcaagcaccggtaaccctggaagtagcaaagaatgcgcttggggacctggcagttaagcccggtaacttgttggtggacgcccgagaggcgctgacccactacaacagtcaggccaagccagacgagcggtttgtcgtcacacttaccgcctggcatgacacccagtcgtttgacgccacctactatgcattgatcgaaatggctaaggtggttgtcaagacattggacggactgcgtagtattggcttgtacaacaacagccgcgagctggataaggccgaaaaatctttccatgatgttttcacaaaacagttctgtgtggaaatcaagagccgtgtggacgacggtatccgcaccttgcgccagatgaatggtgagctcaaaaacttgaagttcggctccgacagcttcagcattgactggtcgcgttgggaacctgaattcgaggattacctcagttttttcggcgaggtgacgaagcttgccgattcggccgagtcgatggacctgtttggagacggcactttcagcgagcggcacgccaacatccgtgacaagctggtcaagctgctgctggatgacaaccaagagcgcgcgacaaaggatctcatgcgcattgccgactaccgcaattaccggcactacgacatcatcaacgacacctcgagcggtgggcgcgtaaagctctctgagtggggcaccggatccggcggccagctagaaacccctgcgtatatcgttcgcgcggcggtcgtcacgaaccggttgaagctctttgagaagagccccagcctgaaactgctggtgaacgatgagtcgtttgccaagatggacgagccacgtgcacgtgcggtcttgagtttcttgcgcgacaagctggacttacaaatcatcagtgctatgccgacaatgaaagctggcgctcttaaggacgaattcaatcgcgagtacagcttcacgcgactggctgttcccaatggggagctcgacttcatttccgaatgtgacgaacgcattttcaaggaagacaagatgcgtgacctgtgggagcggcagcgagtgctggcccgtgaaaaggcaaagcaactctttgacctcgctaacccagaggaagacactgatgacgcccctgacgaagtggccgtggtgggcaaatga

SEQ ID NO: 47421 - DNA, 708 bp, Limnohabitans planktonicus II-D5
atggctgaagtcgtggagcggttaaatgggctcagggccttggctgacacgcacatgctgctgcgggaagtgtccgcaaaactcttctggggtatgtccaaggtgctggacaacaggaccggcctagtagctgctttgttgggtgtggaggaatgccccttttcggagtctcctgttcagctgcaggtctacttgccgattggtggcttcagtggggttctgttcgtcgagaacttgatgagctttgagcaggcaatgcgctccaagggccaggccttctccaagctggctctggtgtatgcctcggggttcaagggcagcgcggcgcgtctgcgtaccccggaagcggtatcgctgttcttttcccacagaggggagcttggaggcgaccggattgactactttgatagttggctgtttggaaaggacatcgcccttcccgtttcgttttggggcgacctggactggtcaggcatgaggattctggcggccatgcgaaataattttccagtaatgcaagcctgggagcccggctatcagcccatgcttcaaagcctcttggctggtcaggggcactcgccggaggcttcggacaaaaagggacagcgaccgatggtggcttttggctgcccgtatgccgacgcccatttggtgcccgcacttactgcccatggccgatttgtagaccaggagcaattcacgctttag

SEQ ID NO: 47422 - DNA, 1701 bp, Cellulosimicrobium cellulans F16
gtgcagcacgacgacgtcgactccctgcgacggtcgagcgcggcgtggcggctcctgcgcgcggacacggcgccgctcgtgctgtcgttcctcggctcgctgttcgtcgaggacaacgtgcgcgcgatccccgagagcgagctcgtcgcgcggctcgacgaccacctgtgggcggtcgacggccgatccgcgcgggcctccggctcggaaccccgctacccgcgcgccccgcaggcgtacgtcgaccactgggcgcacccggaccagggctggctgcgcgcctggtacccgccgggctccggcgagccgcactacgacgcgacgcccgccgtcgagcaggcggtgcgctgggtcgcgtcggtgcgcgggcgcgggttcgtgggcacggagtcacggctcaacacggtgttcgagctcctgcgccagctcgccgtcgggacgcagaccgacccggcggagcgcctgcgcgagctcgaggagcggcgcgccgcgatcgacgaggagatcgcgcaggtgcgcgccgggcgcgtggccgtgctcgacgccgcggcgcagcgcgaccgctaccagcagctcacgcagaccgcggccgacctgctctccgacttccgcgaggtcgaggcgaacttccgctcgctcgaccgcgagctgcgcgagcgcatcaccggctgggacggcgccaagggcgagctgctggaggaggtcgtgcggtcgcgcacagccatcgccgagtccgaccagggccggtcgttccacgcgttctacgacttcctgctcgaccgccgccgccaggaggagttcgccgcgctcgtcgagcgcgtgcagtccctcgacgcgatcgcgcccgacgtcgtccgtccggccccgggggcccccggcccggtgccggacgccgccgcgacggacgcggcggcacgggagcaggagcaccgccggctgcggcgcgtccactacgactggctcgacgccggcgagcgcacgcaggcgaccgtgcggacgctctcggagcagctccgccgcttcctcgacgaccaggtctggctcgagaaccggcgggtcatggacatcctgcgcggggtcgaggcgaaggcgctcgcggcgcgcgacgtccgccacggaccgggcggcccgccgggcatggcgatcgacgccgtcgccccggacgtcgtgctgccgacggagcggccgctgttcacgccgcgacccacggcccggctcgactccgaccacgtcgaggccggcgacgacgacttcgaggtcgacgcgctctacgaccaggtgcacgtggaccccgagcggctcgcgcgcacggtccgggcgacgctcaccgccccgggcggaccgggggaggtcgcgctcgtcgacctgctcgaggcggcgccgctcgagcacggcctggccgagctcgtgacgtacctgtcgctcgaggacccgcgcttcgtcgtcgtgcacgacgacgagcgcaccgacgaggtgcgctgggagggcgaggccccgagcgggccggtcgccgacgacggtgcgccggacccggtggtgcgcgtcgcgcgcctgccccgcgtcacctacgcgcggcgcacgggggcgggcggcggggtcccgcccgcgccgcgcgaccctgtcccgcaccgcccgcccgcgaccccacgcgacgagcacctccacgacaccgccgaccccgccccggaggagaccccgtga

SEQ ID NO: 47423 - DNA, 765 bp, Cellulosimicrobium cellulans F16
gtgagcaccacccgcaccgcgcgcgacccggagctgtccgtcgtcgtgacgtcgctgctcaagggcgtcgtctaccgcgagtccggcgaggcgctgtggcgcgacctgctcgcgcgcgaggcccaggtgcgcgacaccgtcgcgatgatgggcctgcaggtcgtcgtcgacgagggcgacggctacgcctacctgcgttcgcagcccgagcacgagcgcgacgagcgcgttccccgcctgatcccgcgccgcgagctgccgttcgacgtgagcctgctgctcgcgctgctgcgcaagcggctcgcgcaggcggactccgagggcggcgagacgcgcctcgtgctcgcgcgcacggagatcgtcgacctgctgcgggtcttcctcgcgcaggacgccggcgccgccgccaacgaggcgcggctcgtcgaccgggtcgacggtctggtgcggcgcgtcgtggagctgggcttcctgcgtcccgcgggccgtcccgacccggacggtgcgcccgacggcggggccgccccggtcgaggacggcgacccggccgccggggacgcgcggcggtacgaggtgcgccgcatcctcaaggcgttcgtggacgcccagtggctcgcggacttcgacgcacgcctcgcgcagtacctggagctcgccgccgacggcggggcgcgcgggacggcgtcgggcacggcgggcaccggcacgagcacgggggcgagtgcagcgacgagtgcaggcacgacgacgaggacggtggcgtga

SEQ ID NO: 47424 - DNA, 3669 bp, Cellulosimicrobium cellulans F16
atggagggcctgttcagcgcggtcgagctgcacgacccggcggcggacctcgacgcccgggcgggcttccgcctcgagcggctcgaggtgctcaactggggcacgttcgaccagcgcgtgtgggcgttcgacctcgacggccgcaacgcgctcctcacgggcgacatcgggtcgggcaagtcgacgatcgtcgacgccgtcacgacgctgctcgtgccgtcgcaccgcatctcctacaacaaggcggcgggcgcgggcgcgcgcgagcggtccctgcgctcgtacgtcgcggggcactacaagtccgagcgcgacgaggccacgggcacgacgcgccacgtcggcctgcgcgagcgcggcacgtactcggtggtgctgggccggttctccaaccgggggttcgaccaagaggtcacgctcgtccaggtgttctggctcgccccggggcagtcgggccagccggaccggttcttcgtcacggccgaccggccgctgacgatcaccgaggacttcgccgggttcggcggcgacgtggcggcgctgcggcgccggctgcgcgagtccggagcccaggtgcgcgaccacttccccgagtacgggcgcgacttccgccgcctgctgggcatcccgtcggagcaggcgatggacctgttccaccagaccgtgtccatgaagtcggtcggcgacctcggcgagttcgtgcgcgagcacatgctcgagccgttcgacgcggaccgctggaccgaccggctcgtcgcgcacttcgacgacctcacgagcgcgcacgacgccgtcgtgcgcgccaccgcgcagatcgagcgcctcgcgccgctgctcgcggactgcgacgcgcacgacgcgctgggggagcggtccgcggcgctcgtggcccggcgcgacgcgctgcgcgcgttcacggcgtcgcgccgcgtggccgacctcgacgggctgatcggcgcgctcgacgagcgcgtggcggacggcgagtcccgccggcagcgcgtcggcgacgagctgggactcctcgcggccgagcgccagcggctcgagctcgatcgcgcggggcacggcggtgaccggctcgccgcgatcgagggcgaggtcgcccgccgcgaggtcgagcgcgccgcgcgggagcgacgcgtcacccagctcgcgggctacgccgccgcggcgggcctcacgctcggcggcgccgacggcgccgaacccggggttaccgccccccggggtgccgaacccggcgacgtccccgggttcggcggccgcggtgacgacgaccccgggttcggcggcggggcggcggccgtggccgccgcgctcgtcgacgccgaggcgttcgccgcgctgcggcgccgggccgacgacgccgcggtgcgcgtgcgcgacgacctcgcccgggcggaggagcgggtgagcgaggtcgccgcggagctgcgcgccgtcgagcaggagaccgccgacgtcaaggccgagctcgcgagcctcgccgaccgccgctccaacctgccgcgcacccacctggaggtccgtgaccggctgtgcgccgccgtcgggctcgcgccgggcgacgtgccgttcgtcggcgagctgctcgcggtgcgcccggagcacgccgactgggagggcgcggccgagcgcgtgctgcgcggcttcgcgctctcgctcctcgtgccggcggcgcactacgaggccgtcgccgcgtgggtcgaccgcgagcacctgggcctgcggctcgtgtaccaccgggtgcccgagcgcgtgccggccgcccggcccgcgccgcgcgacgacgtcccgctgctcgccgacctgctcgacgtgcgccgcctcgacgacgcgccgtcgctcacggcgtgggtcgaggccgagctggagcgccgcgcggaccacgcgtgcgcgcccgacctcgacgcgttccgccggctgccccgcgcgatcacgcgcgccggccaggtgaagcactcgcccgaccaccacgagaagaacgacacgcgtgcggtcgacgaccgtcgcggctacgtgctcgggtggtcgacgcaggccaagatcgacgcgctgctggagcaggcggccgaggtgaccgcgcggcgcgacacgctcgcgcggcgccgcgacgaggccgccgccgtgcgcggcgagctccaggcgcgctcggccgcgctcgggcggctcgacgtctaccgcgactgggacgagctcgaccgcggcgccgagacggcgcggatcgcggagctcgcggaggagaagcggcgcctcgagcaggcgagcgacgagctcggccggatcgcgggcctgctcgacgacaacgcgcgccgccacggcgagctggaggccgagcgcgaccgcgtcgtcgcgacgctcggcgccgaccggcacgcgctcgacgaggcgcgcaccgcgcgcgagcgggcacgggcggtgctcgacggcgcgggcgagacgctcgacgaggagacgacggcggcgctcgcggcggagttcgaccgcgagctcgcggcggtcggccccgccgacggggacggcgcgaccggcccgacgcgcgcggccgacctggacgccgtcgagaacgcggtgcgctcgcggctcacggccgaggcggagcaggcgcagcgcgagcgcgccgacctcgggacgcgcgtcgcggggcagatggcgtccttccgctcggcgtacccggtggagacggcggagctcgacgcggacgtgcggtcggccgacggctatcgcgagatccacgaccggctcgtccgcgacgacctgccgcgcttcgaggccgacttcaaggcgtacctcaacacgaacgcgatccgcgacatcgcgggctttgcggccgagctcgccaagcaggccgacgtcatccgcgaccggatcgacacgatcaacgactcgctgcgcgcgatcgactacaacccgggccggtacatccggctcgagatgtcgcggacgccgaacctcgaggtgcgcgagttccagcaggacctgcgcgcgtgcaccgacggggacgggatcctcgcggaggacgaccgcgcgctcgccgagggcgacgggtccgtcgcgggcgacaccgacgcgctgtcgtactcggaggaccggttcctgcgcgtcaaggcgctcgtcgagcggttccgcgggcgcgagggcatgaccgacctcgacgaggcctggcgccggcgcgtcacggacgtgcgcaactggttcgtgctctccgcctcggagcgctcgcgcgccgacgactccgagcacgagcactactccgactccggcggcaagtccggcgggcagaaggagaagctcgcgtacaccgtgctcgcggcgtcgctcgcctaccagttcaagctcgactggggcgcggtgcgctcgacggcgttccggttcgtcgtcatcgacgaggcgttcggccgggggtcggacgagtcgacccggttcgcgctcgagctgttccgccgtctggggctccagctgctcatcgtcacgccgctgcagaagatccacgtcatcgagccgtacatctcggccgtcgggttcgtggacaacccgtcgggccggtcgtcacgcctgcggaccctgtcgatcgccgcgtaccgcgacggtcgcacggccggcgaggcgccgccgtcggacgccggactcgagaccgcggcggagcccgagcccgccgcgaggtag

SEQ ID NO: 47425 - DNA, 1470 bp, Stenotrophomonas maltophilia
atgaagcatcgcgaacgcatttcccgttaccgccatctgcgcgaacagccgcagtggaagctgcttgcggccgaccacgccccggaaatcatcggcctgctgcaggggttgctgatggacggcgagcgcacgctgtcgtcgtcggtgctcaacgagcgcctgcaacgtgcgctggaccagctcaacggcgacgaactgtcgcgcgacctgccgcgtaccgcacaggcctacatcgcgcactggctggcccagggctggctggaacggcgcctgcccgagggtgccgaccaggagcagtacgagctgtccaccgccgcactgcaggcgatccgcttcgccgacggcctcgagcaggcccgcgtggccgccaccgaaagccgcctggcgctggtcatcgaacagctctcgcagctggcggcgcagaccgaatcggatccggatgcacgcctgtccgcgctgcgcgacgagcgtgaccgcatcgacgccgagatcgcccgcgtcggtgccggccgcgtgatcgcgctggatggcaagcgcgcgctggaacgtgcgcgccagatcatcggcctggccgacgaactgaccgaagacttccgccgcgtgcgcgacgacttcgagcagctcaaccgcgatttccgcgaacgcatcatcgatgacgagggcgagcgtggcgacgtgctgtcgcagctgttcgagggcgtggacgtgatcggcgagagcgatgccgggcgcagtttccaggccttctggcgcctgctcaacgacgccgaacagagcgcccagctcgatgccgcgctggaagcagtgctggcacgtggctttgcgcgccgcctggaccgcaacgaacgcaacttcctgcgcggcttcaccagcaccatgctcgagcgtggcggccaggtgcacgacgtgctgcagaacttcgcgcgcagcctgcgcggtttcgtgcagagccgtggctacctggaacagcgccgcctcaatcagttgttgaagcaggcgcagtccgaagcgctggcgttgcgcgatgagttccccgcacagcgcggcatcggccgcgacctgcagctgaccaccagccgcctgcgctcgtggtcgcagtggaagctgcacgatccgcgcagtgcccaggtcgatggcaacgtcgaatacaacgacgccgctgcgatcagcctggagagcgtgggtgatctggtggcatcgtccgaaatcgacttccgtaccctgcgccgtgacctgcacgacctgctcgatgcacagccgcggctcagcatcgcccaggccttgtcgcagcgcgaagcgccgcagggcctgggcagtgtcattggctacctgtcgctgggcacgcgcttcggcaacgtggtcgccggcgagcaggagctcgcgcaatggcgtggtggcgacggccaggtccgtcgcgcccgcatcccgctggtttggttcacccaggagagacgccatgagctggcatga

SEQ ID NO: 47426 - DNA, 702 bp, Stenotrophomonas maltophilia
atgagctggcatgaagatccgatcgacgcaccgcaggccgacgtggcggaagacgcctacgaggccgagccggtggcgaccgtggcgcagccccgccgtggcaacgacgtgtactacctgggcgacaccgggcgcctgccgctggatgcgcgccgcgcgctgtgccagctgctgatcggccccagcatcgaccagctgcgccacgccaagctgtggccggcgctgatccgcagcgaagccgccatccgctccgcgctggccgatctgttcctggaactggtgctggaccgcgacagcggcgtggccttcacccgccaggccgacaccgaagacgttgatgcaccggtactgctgcgcacctcgccgctgaccttcatcgactcggtgctgctgctgtacctgcgccagcagctggccgaggccgatgcgcgcggcaaccgcgcggtggtcgccgacgccgagatggccgaagcgctggccatctacgagaagaacctgtccaccgaccgcgccggcttcaaccgccgcgtcgcttcggcggtgcagaagatgaaggacaaccacatcctgacccgcctcagcggccaggaagaccgccacgaagtctcgccggcgctgaagctgctgttctccgccgaagacgtgtcccagctttcggcggtctaccgccagctgcgcgaaaccccggccgccgaggcctga

SEQ ID NO: 47427 - DNA, 3381 bp, Stenotrophomonas maltophilia
atggctatctccaagcacactcccgccctgttcaacgaaggcctgccggacccgcgcctgcagcagttccgcatgcgccgcctgcaggtgcacaactggggcaccttcaacggtttgaccgaagtaccgatcgccgagcgcggcttcctgttcgtcggccgttccggctcgggcaagtcgaccctgctcgatgccatgtccgcgctgctgacgccgccggccatcgtcgacttcaacgccgccgcgcgtgaagccgagcgcagcggccgcgaccgcaacctggtgtcctacgtgcgtggcgcgtgggccgaccagcaggacagcggcaccggcgaaatcgccacccagtacctgcgcaagggcgcgacctggaccgcgctggtgctggaataccgcgccggcgacggccgcgtggtcagcctggtgcgcctgctgtggatctccggcaacggcacctcggccggcgacgtgcgcaagcactacatgattgccgagcgtccgttcgacatcgccaaggatctcggcggtttcgacctggacctgcgcaagctcaagcagaagctgtccgacctgcaccatttcgacaccttctccggctatgccgagcgcttccgcgacctgctcggcatcgacaacgagatggcactgcgcctgctgcacaagacgcagtcggcgaagaacctgggcgacctcaacgtcttcctgcgcgacttcatgctcgacacgccgaagaccttcgacgccgccgagcgcctggtcagcgactttgccgagctcgatggcgcgcatcaggcggtggtcaccgcccgccgccaggtggaaaccctgctgccggcgcgcgcctactacaacgatctgaaggaaatgcaccgccagcgcggcgacgacgaagcgctgaagcttggcgtcgacagcttccgcgaaagccgccgccaggcgctgatcgaagcgcgcctgcgcgagatggatgtgcgtgaccgtggcctgctgggcgaggaagcccagcgccgcgccgcactcgacaaccacaccgagcgcctggccgaactggaactgcagcgccgccagcagggcggtgagcgcatcgaggaactggaacgcgagcagggccgtgccgaagccgagcgtgaccgccgccaggccaagcgtgaccaggcccaggaagctgctcagcaattgcaggccgaactgcccggcgatgcccacggtttcgcagagctggtcgagcgtgcgcagaacgaactgcaggaccgccagcgtgcctcggcggcactggatgatgcgatcagcgatcgcctcggtggcaagcgcgatgacgagcgccgcttcggcgaagtgcgcagcgagctggaggcgatgcagcgcacgccgtccaacatcccggcgccgatgcagaagctgcgcgcgcgcctggccgaggaaaccggcattgccgaagcggcgctgccgttcgtcggcgagctgattcaggtccgctcggaagagcagggctggcagggcgccatcgagcgcgtgctgggcggcttcgcgctgtcgctgctggtcgatgacaagcactacaacgacgtcgccgagtgggtgaaccgtacccacctgggcatgcgcttcacctactaccgcgtgcgccgcaacgatgatgcgtttgcccgagagccgtcggcgaagtcgctgctgcacaagctggaactgcgcgagcacgtgttcgaaagctggctgcgccgcgagctgggcaagcgcttcgactacgaatgcgtggacgccaagcagctgcgcaacgtcgaccgcggcatcacccgcgaaggccaggtcaagcatccgggcgatcgtttcgagaaggacgatcgcagcgccgtcggcgatcgccgccgctggatcctcggcttcaacaaccacgacaaggtgggtgccttcgagcgtgaagcgcaggaactggccaagcgcatcgccagctgcgaaaccgatatcgcgcgcctgcgcggccagcgtgaccgcgacaacgagcgtcgcctggcctgccacgaactggtcagcatcagctggaacgagatcgacatcgccgccccgcagcagcgcctgagcgatatcgaggccaccctgcgcgacctgcgcgaaggcaacgccgacctcgccaagctggccaagcagatcgacgccgtgcgcgccgacatcgagcagtcccgccgtacctatgaagacgtccgcgtcgagcgtggccagctggtaaaggaacgtgaccgcctcgaccgcgcgcgccagcagagccgtgcactggtgctgccgagcctggctcaggagcaggaggccggcctggccgagcgcctgcaggagcagggcccgctcagcctggaaacgctggaagcgcacatgcgccaggtcagcaatgcgctgaatgaacagttgtcgtcgtcgcagcaggacctgaaccgcatcgagaaccagctgatcggctgcttccgtcgcttcatccagcagtggccggaggagtcgggtgacttcaccgtgtcggtggcctcggccgaggatttcctcgcccgtctcgaacggctggagcgtgatggacttccgcagcacgaagaacgcttcttcgacctgctgcagaaccagagcaagaacaacctgctggccctgcagcggcacagtgcagaggcccgcaagtcgatcggccagcgcctggacgaagtgaatgccagcctggaacaggtgccgttcaaccgcggcacgctgctgaccatcgagctgagcgaccgccgcctgccggaagtcggcgagttccacctgcagctgcgcgaagtgctgtcgcaacagcagaccgagcagcgcgagctggccgaatcgcagttcaccgtgctgcgccagctggtcaaccgcctgggctcgcaggaaggcgaggacaagcgctggcgcgagctggtgctggacgtgcgcatgcacgtggagttcatcggcgtcgaactggatgcggaaacgcgccagcaggtcgagatctaccgcagcggcgccggcaagtccggtggccagcgccagaaactggccaccacctgcctggccgcagcactgcgctaccagctcggcggcgccgacagccagctgccgagctacgccgcggtggtgctcgacgaggccttcgacaaggccgacaacgagttcaccgcactggcgatgaacatcttcgacaatttcggcttccagatggtggtggccaccccgctgaagtcggtgatgacgctggaaccgttcatcggtggcgcctgcttcgtcgagatcagcggtcgccacgactccggcgtgttgctgatcgagtacgacgaagaaggcaagcggctgaagctgccggagcgcagccgccagcaggccaacgaaccggaagaagccgaggcctga

SEQ ID NO: 47428 - DNA, 1470 bp, Stenotrophomonas maltophilia
atgaagcatcgcgaacgcattgcccgttaccgccacctgcgcgaacagccccagtggaagctgcttgccgccgaccacgccccggaaatcatcggcctgctgcagggcctgctgatggacggcgagcgcacgttgccttcgtcggtgctcaacgagcgcctgcagcgcgcgctggaccagctggccggcgatgaactctcgcgcgagctgccgcgtaccgcgcaggcctacatcgcgcactggctggcccagggctggctggaacgccgtttgcccgaaggcgccgaccaggagcagtacgagctgtccactgctgcactgcaggcgatccgcttcgccgacggcctcgagcaggcccgcgtggccgccaccgaaagccgcctggcgctggtcattgagcagctctcggcgctggctgcgcagaccgaagccgatcctgatgcgcgcctgtccgcgctgcacgacgagcgcgaccgcatcgatgccgaaatcgcccgggtcggcactggccgcgtggttgcgctggacggcaagcgcgcgctggaacgcacccgccagatcatcggtctggccgacgagctgaccgaggacttccgccgtgtgcgcgatgacttcgagcagctcaatcgcgatttccgcgaacgcatcatcgacgacgagggcgagcgcggcgacgtgttgtcgcagctgttcgaaggcgtggatgtcatcggcgaaagtgacgccgggcgcagtttccaggcgttctggcgcctgctcaacgacgccgagcagagcgcccagctcgatgccgcgctggaagcggtgctggcgcgtggctttgcgcgccgcctggaccgcaacgaacgcaacttcctgcgcagcttcaccagcaccatgctcgaacgcggtggccaggtgcacgacgtgctgcagaacttcgcgcgcagcctgcgcggcttcgtgcagagccgtggctacctggaacagcgtcgcctcaaccagctgctgaagcaggcgcagtccgaagcgctggccctgcgcgacgaattccccgcacagcgtggcatcggccgtgacctgcagttgaccaccagccgcctgcgctcgtggtcgcagtggaggctgcacgatccgcgcagtgcccaggtcgatggcaatgtcgagtacaacgacgccgcggccatcagcctggaaagcgtcggtgatctggtcgcctcgtccgaaatcgatttccgtaccctgcgccgcgacctgcacgacctgctcgatgcacagccgcggctcagcatcgcccaggccctgtcgcagcgcgaagcgccgcagggcctcggcagcgtcatcggctacctgtcgctgggcacgcgcttcggcaacgtggttgccggcgagcaggagcttgcgcaatggcgtggtggcgacggccagatccgtcgcgcccgcatcccgctggtttggttcactcaggagagacgccatgagctggcatga

SEQ ID NO: 47429 - DNA, 702 bp, Stenotrophomonas maltophilia
atgagctggcatgaagatcccatcgacgcaccgcaggccgacgtggcggaagacgcctacgaggccgagccggtggcggccgtggcgcagccccgccgtggcaacgacgtgtactacctcggcgataccgggcgcctgccgctggatgcgcgccgcgcgctgtgccagctgctgatcggccccagcatcgaccagctgcgccacgccaaactgtggccggcgctgatccgcagcgaggcggccatccgctcgtcgctggcggacctgttcctggaactggtgctcgatcgtgacagcggcgtggcgttcacccgccaggccgataccgaagacgttgatgcgccggtgctgctgcgcacctcgccgctgaccttcatcgactccgtgctgctgctgtaccttcgccagcagctggccgaggccgatgcgcgcggcaaccgcgcggtggtcgccgatgccgagatggccgaagcgttggccatctacgaaaagaacctgtccaccgaccgcgccggcttcaaccgccgtgtcgcttcggcggtgcagaagatgaaggacaaccacatcctgacccgcctcagcggccaggaagaccgccacgaagtctcgccggcgctgaagctgctgttctccgccgaagacgtgtcccagctctcggcggtctaccgccagctgcgcgaaaccccggccgccgaggcctga

SEQ ID NO: 47430 - DNA, 3381 bp, Stenotrophomonas maltophilia
atggctatctccaagcacactcccgccctgttcaacgaaggcctgccggacccgcgcctgcagcagttccgcatgcgccgcctgcaggtgcacaactggggtaccttcaacggcctgaccgaagtgccgatcgccgagcgcggcttcctgttcgtcggccgttccggctcgggcaagtcgaccctgctcgatgccatgtccgcgctgctgacgccgccggccatcgtcgacttcaacgccgccgcgcgtgaagccgaacgcagtggccgcgaccgcaacctggtgtcctacgtgcgtggcgcgtgggccgaccagcaggacagcggtaccggcgaaatcgccacccagtacctgcgcaagggcgccacctggaccgcgctggtgctggaataccgcgccggcgatggccgcgtggtcagcctggtgcgcctgctgtggatctccggcaacggcacctcggctggcgatgtgcgcaagcactacatgatcgccgagcgcccgttcgacatcgccaaggatcttggtggtttcgacctggacctgcgcaagctcaagcagaagctgtccgacctgcaccacttcgacaccttctccggttacgccgagcgcttccgcgacctgctcggcatcgacaacgagatggcgctgcgcctgctgcacaagacgcagtcggcgaagaacctgggcgacctgaacgtcttcctgcgcgacttcatgctcgacacgccgaagaccttcgacgccgccgagcgcctggtcagcgacttcgccgagctcgatggcgcgcaccaggccgtggtcactgcgcgtcgccaggtggagaccctgctgccggcacgcgcctactacaacgacctgaaagaaatgcaccgccggcgcggcgacgacgaagccctcaagctcggcgtcgacagcttccgtgaaagccgccgccaggcgctgatcgaagcacgcctgcgcgagatggacgtgcgtgaccgtggcctgctcggggaagaagcccagcgccgtgctgcactcgacaaccacaccgagcgcctggccgaactggagctgcagcgccgccagcagggcggtgagcgcatcgaggaactggaacgcgagcagggccgtgctgaagccgagcgcgaccgccgccaggccaagcgcgagcaggcacgccaggcggcgcagcagctgcaggcggaactgccggacgacgcccacggcttcgccgagctggtcgagcgcgcgcagaacgagctgcaggaccgccagcgtgcctcttcggcgctggacgacgcgatcagcgatcgcctgggtggcaagcgcgatgacgagcgccgcttcggcgaagtccgtgcggaactcgaagcgatgcagcgcacgccgtccaacatcccggcgccgatgcagaagctgcgcgcgcgcctggccgaggaaacgggcatcgccgaagcagcgctgccgttcgttggcgaactgatccaggtccgctccgaagagcagggctggcagggtgccatcgagcgcgtgctgggcggtttcgcgctgtcgctgctggtcgatgacaagcattacaacgacgtcgccgagtgggtgaaccgcacccacctgggcatgcgcttcacctactaccgcgtgcgccgcaacgatgatgcgttcgcgcgcgagccgtcggcgaagtcgctgctgcacaagctggaactgcgcgagcacgtgttcgaaagctggctgcgccgtgagcttggcaagcgcttcgactacgagtgcgtcgatgccaagcagctgcgcaacgtcgatcgcggcatcacccgcgaaggccaggtcaagcatccgggcgaccgcttcgagaaggacgaccgcagtgcggtgggtgaccgccgtcgctggattctcggcttcaacaaccacgacaaggtcggcgccttcgagcgtgaagcacaggaactggccaagcgcatcgccggctgcgagaccgacatcgcgcgcctgcgtggccagcgtgatcgcgacaacgaacgccgcctggcctgccacgagctggtcagcatcagctggaacgagatcgatatcgccgccccgcagcagcgcctcagcgatatcgaagcgacgctgcgcgacctgcgcgaaggcaatgccgacctcgccaagctggccaagcagatcgatgcggtgcgcgcggacatcgaacagtcgcgccgcacctatgaagacgtgcgtgtcgagcgcggccagctggtcaaggagcgcgatcgccttgaccgcgcacgccagcagagccgtgcgctggtgctgccgagcctggcccaggagcaggaagccggcctcgccgagcgccttcaggagcagggcccgctcagcctggaaacgctggaagcgcacatgcgccaggtcagcaacgcgctgaacgagcagctgtcttcatcgcagcaggacctcaaccgcatcgagaaccagctgatcggctgcttccgtcgcttcatccagcagtggccggaggaatcgggcgacttcaccgtctcggtggcctcggccgaggacttcctcgcgcgcctcgaacgcctggaacgcgatggcctgccgcagcacgaagagcgcttcttcgatctgctgcagaaccagagcaagaacaacctgctggccctgcagcggcacagcgccgaggcccgcaagtcgatcggccagcgcctggacgaagtgaacgccagcctggaacaggtgccgttcaaccgaggcacgctgctgaccatcgaactgaacgaccgacgcctgccggaagtcggcgagttccatctgcagctgcgcgaagtgctgtcgcagcagcagaccgagcagcgcgagctggccgaatcgcagttcaccgtgctgcgccagctggtcaaccgcctgggctcgcaggaaggcgaggacaagcgttggcgcgagctggtgctggacgtgcgcatgcacgtggagttcatcggcgtcgagctggatgcggaaacgcgccagcaggtcgagatctaccgcagcggcgccggcaagtccggtggccagcgccagaagctggccacgacctgcctggcggccgcgctgcgctaccagctcggtggtgccgacagccagctgcccagctacgccgcagtggtgctcgacgaagccttcgacaaggccgataacgagttcaccgcgctggcgatgaacatcttcgacaacttcggcttccagatggtggtcgccaccccgctgaagtcggtgatgacgctggaaccgttcatcggcggcgcctgcttcgtcgagatcagcggccgccacgactccggcgtgctgctgatcgagtacgacgaagaaggcaagcgcctgaagctgcccgagcgcagccgccagcaggccaacgaaccggaagaagccgaggcctga

SEQ ID NO: 47431 - DNA, 1470 bp, Stenotrophomonas maltophilia; identical to SEQ ID NO: 47428

SEQ ID NO: 47432 - DNA, 702 bp, Stenotrophomonas maltophilia; identical to SEQ ID NO: 47429

SEQ ID NO: 47433 - DNA, 3381 bp, Stenotrophomonas maltophilia; identical to SEQ ID NO: 47430

SEQ ID NO: 47434 - DNA, 1470 bp, Stenotrophomonas maltophilia
atgaagcaccgcgaacgcatctcccgttaccgccatctgcgcgaacagccccagtggaagctgcttgccgccgaccacgccccggaaatcatcggcctgctgcaggggctgctgatggacggcgagcgcacgctgccgtcgtcggtgctcaacgagcgcctgcagcgtgcgctggaccagctcaacggcgacgaactgtcgcgtgagctgccgcgtaccgcgcaggcctacatcgcgcactggctggcccagggctggctggaacgccgcctgcccgaaggcgccgaccaggagcagtacgagctgtcgactgcggcactgcaggccatccgcttcgccgatggcctcgagcaggcccgcgtggccgccaccgaaagccgcctggcgctggtcatcgaacagctctcgcagttggccgcgcagaccgagtccgacccggatgcacgcctgtcagcactgcgcgacgagcgcgaccgcatcgacgccgagatcgcccgcgtcggtgccggacgtgtgatcgcgctggatggcaagcgcgcgctggagcgtgcgcgccagatcatcggcctggccgacgagctgaccgaggatttccgtcgggtgcgcgacgatttcgagcagctcaaccgcgacttccgcgaacgcatcatcgacgacgagggcgagcgcggcgatgtgctgtcgcagctgttcgaaggcgtggatgtgatcggcgagagcgatgccggtcgcagcttccaggccttctggcgcctgctcaacgacgccgaacagagcgcccagctcgatgccgcgctggaagcggtgctggcgcgtggcttcgcccgccgcctggaccgcaacgaacgcaacttcctgcgcggcttcaccagcaccatgctcgagcgcggtggccaggtgcacgacgtgctgcagaacttcgcgcgcagcctgcgtggcttcgtgcagagccgtggctatctggaacagcgccgcctcaaccagctgctgaagcaggcgcaatccgaagcgctgtcactgcgtgacgaattccccgcacaacgcggcatcggccgcgacctgcagctgaccaccagccgcctgcgctcgtggtcgcagtggaagctgcacgatccgcgcagcgcccaggtcgatggcaacgtcgagtacaacgacgccgcagccatcagcctggagagcgtcggtgatctggtcgcttcgtctgaaatcgacttccgcaccctgcgccgcgacctgcacgacctgctcgatgcacagccgcggctcagcatcgcccaggcactgtcgcagcgcgaagcaccgcagggtcttggcagcgtcatcggctacctgtcgctgggcacgcgcttcggcaacgtgatcgctggtgagcaggagcttgccgaatggcgtggtggcgacggccaggtccgtcgcgcccgcatcccgctggtttggttcacccaggagagacgccatgagctggcatga

SEQ ID NO: 47435 - DNA, 702 bp, Stenotrophomonas maltophilia
atgagctggcatgaagatcccatcgacgcaccgcaggccgacgtggcggaagacgcctacgaagccgaaccggtggcggccgtggcgcagccccgccgtggcaatgacgtgtattacctcggcgacaccgggcgcctgccgctggatgcacgccgcgcgctgtgccagctgctgatcggccccagcatcgaccagctgcgccacgccaagctgtggccggcactgatccgcagcgaggcggccatccgctcctcgctggcggacctgttcctggaactggtgctcgaccgtgacagcggcgtggccttcacccgccaggccgacaccgaagacgtggatgcgccggtgttgctgcgcacctcgccgctgaccttcatcgactcggtgctgctgctgtacctgcgccagcagctggccgaggccgatgcgcgcggcaaccgcgcggtggtcgccgacgccgagatggccgaagcgctggccatctacgaaaagaacctgtccaccgaccgcgccggcttcaatcgccgcgtcgcttcggcggtgcagaagatgaaggacaaccacatcctgacccgcctcagcggccaggaagaccgccacgaagtctcgccggcgctgaagctgctgttctccgccgaagacgtatcccagctttcggcggtctaccgccagctgcgtgaaaccccggccgccgaggcctga

SEQ ID NO: 47436 - DNA, 3381 bp, Stenotrophomonas maltophilia
atggctatctccaagcacactcccgccctgttcaacgaaggcctgccggacccgcgcctgcagcagttccgcatgcgtcgcctgcaggtacacaactggggcacgttcaacggactgaccgaagtaccgatcgccgagcgtggcttcctgttcgtcggccgttccggctcgggcaagtcgaccctgctcgatgccatgtccgcgctgctgacgccgccggccatcgtcgatttcaacgccgccgcgcgtgaagccgagcgcagtggccgcgaccgcaacctggtgtcctacgtgcgtggcgcgtgggccgaccagcaggacagcggcaccggcgaaatcgccacccagtaccttcgcaagggcgcgacctggactgcgctggtgctggagtaccgcgccggcgatggccgcgtggtcagcctggtgcgcctgctgtggatctccggtaacggaacctcggccggtgacgtgcgcaagcactacatgatcgccgagcgtccgttcgacatcgcgaaggatcttggcggctttgacctggacctgcgcaagctcaagcagaagctgtccgacctgcaccacttcgacaccttctccggctacgccgagcgcttccgcgacctgctcggcatcgacaacgagatggcgctgcgcctgctgcacaagacgcagtcggcgaagaacctgggcgacctcaacgtcttcctgcgcgacttcatgctcgacacgccgaagaccttcgacgccgccgagcgcctggtcagcgacttcgccgaactcgatggcgcgcaccaggccgtggtcaccgcccgccgccaggtggagaccctgctgccggcacgcgcctactacaacgacctgaaggaaatgcaccgccggcgcggcgacgacgaagccctcaagctcggcgtcgacagcttccgtgaaagccgccgccaggcgctgatcgaagcgcgcctgcgcgagatggacgtgcgtgaccgtggcctgctcggcgaagaagcccagcgccgtgccgcactggacaaccacaccgagcgcctggccgagctggaactgcagcgccgccagcagggcggtgagcgcatcgaggaactggagcgcgagcagggccgtgccgaagccgagcgcgaccgccgccaagccaagcgcgagcaggcaagcctggccgcgcagcagctgggggctgaacttccggacgacgcacacggcttcgccgagctggtcgagcgtgcgcagaacgaactgcaggaccgccagcgtgcctcttcggcgctggacgatgcgatcagcgatcgcctgggtggcaagcgcgatgacgagcgccgtttcggcgaagtccgtgcggaactcgaagcgatgcagcgcacgccctccaacatcccggcgccgatgcagaagctgcgcgcgcgcctggccgaggaaaccggcattgccgaggcggcgctgccgttcgtcggcgagctgatccaggtccgctcggaagagcagggctggcagggtgccatcgagcgtgtgctgggtggcttcgcgctgtcgctgctggtcgatgacaagcactacaacgacgtcgccgagtgggtgaatcgcactcacctgggcatgcgcttcacctactaccgtgtgcgccgcaacgatgatgcgttcgcgcgcgagccgtcggcgaagtcgctgctgcacaagctggagctgcgcgagcacgtattcgaaagctggctgcgccgtgagctcggcaagcgcttcgactacgagtgcgtggatgccaagcagctgcgcaacgtcgaccgcggcatcacccgcgaaggccaggtcaagcatcccggcgaccgcttcgagaaggacgaccgcagtgcggtgggcgaccgccgtcgctggatcctcggcttcaacaaccacgacaaggtgggcgccttcgagcgcgaagcccaggaactggccaagcgcatcgccagctgcgagaccgacatcgcgcgcctgcgtgggcagcgtgaccgcgacaacgaacgtcgcctggcctgccacgagctggtcagcatcagctggaacgagatcgacatcgccgccccgcagcagcgcctgaccgatatcgaggccaccctgcgcgacctgcgcgaaggcaatgccgacctggccaagctggccaagcagatcgacgccgtgcgcgccgacatcgagcaggctcgccgtacctatgaagacgtccgcgtcgagcgcgggcagctggtcaaggagcgcgatcgcctcgaccgcgcgcgacagcagagccgtgcgctggtgttgccgagcctggcccaggagcaggaagccggccttgccgagcgcctgcaggaacagggcccgctcagcctggaaacgctggaggcgcacatgcgccaggtcagcaacgcgctgaacgagcagctgtcgacctcgcagcaggacctcaaccgcatcgagaaccagctgatcggctgcttccgtcgcttcatccagcagtggccggaggaatcgggcgacttcaccgtatcggtggcctcggccgaggatttccttgcccgcctcgagcgcctggagcgcgacggcctgccgcagcacgaagagcgcttcttcgatctgctgcagaaccagagcaagaacaacctgctggccctgcagcgccacagcgccgaggcccgcaagtcgatcggccagcgcctggacgaagtgaacgccagcctggagcaggtgccgttcaaccgtggcacgctgctgaccatcgaactgagcgaccgccgcctgccggaagtcggcgagttccacctgcagctgcgcgaggtgctggcgcagcagcagaccgagcagcgcgagctggccgaatcgcagttcaccgtgctgcgccagctggtcaaccgcctgggttcgcaggaaggcgaggacaagcgctggcgcgagctggtgctggacgtacgcatgcacgtggagttcatcggcgtcgagctggatgcggaaacgcgccagcaggtcgagatctaccgcagtggcgcgggcaagtccggtggccagcgccagaaactggccaccacctgcctggctgcggcactgcgctaccagctcggcggcgccgacagccagctgcccagctacgccgccgtcgtgctcgacgaagccttcgacaaggccgacaacgagttcaccgcgctggcgatgaacatcttcgacaacttcggtttccagatggtggtcgccaccccgctgaagtcggtgatgacgctggagccgttcatcggtggcgcctgcttcgtcgagatcagcggccgccacgactccggcgtgctgctgatcgagtacgacgaagaaggcaagcgcctgaagctgcccgagcgcagccgccagcaggccaacgaaccggaagaagccgaagcctga

SEQ ID NO: 47437 - DNA, 1470 bp, Stenotrophomonas maltophilia
atgaagcatcgcgaacgcattgcccgttaccgtcacctgcgcgaacagccccagtggaagctgcttgccgccgaccatgccccggaaatcatcggcctgttgcagggcctgctgatggacggcgagcgcacgttgccttcgtcggtgctcaacgagcgcctgcagcgcgcgctggaccagctggccggcgatgaactctcgcgcgagctgccgcggaccgcgcaggcctacatcgcgcactggctggcccaaggctggttggagcgccgcctgcccgaaggcgccgaccaggaacagtacgagctgtccaccgcagcgctacaggcgatccgcttcgccgacggcctcgagcaggctcgcgtggccgccaccgagagccgcctggcactggtcatcgaacagctctcgcagctggccgcgcagaccgagtccgaccccgatgcccgcctctcggcgctgcgcgacgagcgcgaccgcatcgacgccgagatcgcccgtgtcggcgccggccgtgtgatcgcgctggacggcaagcgcgcgctggaacgtgcgcgccagatcatcggcctggccgacgagctgaccgaggacttccgccgcgtgcgcgacgacttcgagcagctcaaccgcgagttccgcgaacgcatcatcgacgacgagggcgagcgcggcgatgtgctgtcgcagctgttcgaaggcgtggacgtgattggcgaaagtgatgccgggcgtagcttccaggccttctggcgcctgctcaacgacgccgagcagagcgcccagctcgatgccgcgctggaagcggtgctggcgcgtggcttcgcccgccgcctggaccgcaacgaacgcaacttcctgcgcggcttcaccagcaccatgctcgagcgcggtggccaggtgcacgatgtgctgcagaacttcgcgcgcagcctgcgcggcttcgtgcagagccgtggctatctggaacagcgtcgcctcaaccagctgctcaagcaggcgcagtccgaagcgctcgctctgcgcgacgagttccccgcacaacgcggcatcggccgcgacctgcagctgaccaccagccgcctgcgctcgtggtcgcaatggaaactgcacgatccgcgcagcgcccaggtcgatggcaacgtcgaatacaacgacgcagccgcgatcagcctggaaagcgttggcgatctggtcgcttcgtccgaaatcgacttccgtaccctgcgccgcgacctgcacgaccttctcgatgcgcagccgcggctcagcatcgcccaggccctttcgcagcgcgaagcgccgcagggtcttggcagcgtcatcggctacctgtcgctgggcacgcgcttcggcaacgtgatcgccggcgagcaggagcttgcgcagtggcgtggtggcgacggccagatccgtcgcgcccgcatcccgctggtttggttcacccaggagagacgccatgagctggcatga

SEQ ID NO: 47438 - DNA, 702 bp, Stenotrophomonas maltophilia
atgagctggcatgaagatcccatcgacgcagcgcaggccgacgtggcggaagacgcctacgaggccgagccggtggcggccgtggcgcagccccgccgtggcaacgacgtgtactacctcggcgataccgggcgcctgccgctggatgcgcgccgcgcgctgtgccagctgctgatcggccccagcatcgaccagctgcgccacgccaagctgtggccggcactgatccgcagcgaagcggccatccgctcgtcgctggcggacctgttcctggaactggtgctcgaccgtgacagcggcgtggcgttcacccgccaggccgataccgaagacgtcgacgcgccggtgctgctgcgcacctcgccgctgaccttcatcgactcggtgctgttgctgtacctgcgccagcagctggccgaagccgatgcgcgcggcaaccgcgcggtggtcgccgatgccgaaatggccgaagcactggccatctacgaaaagaacctgtccaccgaccgcgccggcttcaaccgccgcgtcgcctcggcggtgcagaagatgaaggacaaccacatcctgacccgcctcagcggccaggaagaccgccacgaagtctcgccggcgctgaagctgctgttctccgccgaagacgtgtcccagctctcggcggtctaccgccagctgcgcgaaaccccggccgccgaggcctga

SEQ ID NO: 47439 - DNA, 3381 bp, Stenotrophomonas maltophilia
atggctatctccaagcacactcccgccctgttcaacgaaggcctgccggacccgcgcctgcagcagttccgcatgcgccgcctgcaggtgcacaactggggcaccttcaacggcctgaccgaagtaccgatcgccgagcgcggcttcctgttcgtcggacgttccggctcgggcaagtcgacactgctcgatgccatgtccgcgctgctgacgccgccggccatcgtcgacttcaacgctgctgcgcgtgaagccgagcgcagtggccgcgaccgcaacctggtgtcctacgtgcgtggcgcgtgggctgaccagcaggacagcggcaccggcgaaatcgccacccagtacctgcgcaagggcgccacctggaccgcactggtgctggaataccgcgccggcgatggccgcgtggtcagcctggtgcgcctgctgtggatctccggcaacggcacctcggccggtgacgtgcgcaagcactacatgattgccgagcgcccgttcgacatcgccaaggatcttggtgggttcgacctggacctgcgcaagctcaagcagaagctgtccgacctgcaccacttcgacaccttctccggctacgccgagcgcttccgcgacctgctcggcatcgacaacgagatggcgctgcgcctgctgcacaagacgcagtcggcgaagaacctgggcgacctcaacgtcttcctgcgcgacttcatgctcgacacgccgaagaccttcgacgccgccgagcgcctggtcagcgacttcgccgagctcgatggcgcgcaccaggcggtggtcaccgcccgtcgccaggtggagaccctgctgccggcacgcgcctactacaacgacctgaaggaaatgcaccgccggcgcggcgacgacgaagccctcaagctcggcgtcgacagcttccgtgaaagccgccgccaggcgctgatcgaagcgcgcctgcgcgagatggacgtgcgtgaccgtggcctgctcggcgaagaagcccagcgccgtgccgcactggacaatcacaccgagcgcctggccgaactggaactgcagcgccgccagcagggcggtgagcgcatcgaagaactggaacgcgagcagggccgcgccgaagccgagcgcgaccgccgccaggccaagcgcgagcaggcaagcctggccgcgcagcagctgggggccgaactgccggacgacgcacacggcttcgccgaactggtcgagcgcgcacagaacgagctgcaggaccgccagcgcgcctcttcggcgctggacgatgcgatcagcgatcgcctgggtggcaagcgcgatgacgagcgccgcttcggcgaagtccgtgcggaactcgaagcgatgcagcgcacgccctccaacatcccggcgccgatgcagaagctgcgcgcgcgcctggccgaggaaaccggcatcgctgaagcggcgctgccgttcgtcggtgaactgatccaggtccgctcggaagagcagggctggcagggtgccatcgagcgcgtgctgggtggcttcgcgctgtcgctgctggtcgacgacaagcattacaacgacgtcgccgagtgggtgaaccgtacccacctgggcatgcgcttcacctactaccgcgtgcgccgcaacgatgatgcgttcgcccgtgagccgtcggcgaagtcgctgctgcacaagctggaactgcgcgaacacgtgttcgaaagctggctgcgccgcgagctcggcaagcgattcgactacgagtgcgtggacgccaagcagctgcgcaacgtcgaccgtggcatcacccgcgaaggccaggtcaagcatccgggcgaccgtttcgagaaggatgaccgcagtgcggtgggcgaccgccgtcgctggatcctcggtttcaacaaccacgacaaggtgggcgccttcgagcgcgaagctcaggaactggccaagcgcatcgccagctgcgagaccgacatcgcgcgcctgcgtgggcagcgtgaccgcgacaacgaacgccgcctggcctgccacgagctggtcagcatcagctggaacgagatcgacatcgccgccccgcagcagcgcctgagcgacatcgaggccacgctgcgcgacctgcgcgaaggcaatgccgacctcgccaagctggccaggcagatcgacgccgtgcgtgccgacatcgagcaggcccgccgcacctatgaagacgtccgcgtcgagcgcgggcagctggtcaaggaacgcgatcgcctggaccgcgcgcgccagcagagccgtgcgctggtgctgccgagcctggcccaggagcaggaagccggccttgccgagcgcctgcaggagcagggtccgctcagtctggaaacgctggaagcgcacatgcgtcaggtcagcaacgcgctgaacgagcagctgtcgtcctcgcaacaggacctcaaccgcatcgagaaccagctgatcggctgcttccgtcgcttcatccagcaatggccggaggaatcgggcgacttcaccgtgtcggtggcctcggccgaggacttcctcgcacgcctcgaacgactggagcgcgatggcctgccgcagcacgaagagcgcttcttcgatctgctgcagaaccagagcaagaacaacctgctggccctgcagcgccacagcgccgaggcccgcaagtcgatcggccagcgcctggatgaagtgaacgccagcctggaacaggtgccgttcaaccgcggtacgctgctgaccatcgagctgagcgaccgccgcctgccggaagtgggcgagttccagctgcagctgcgcgaagtgctgtcgcagcagcagaccgagcagcgcgagctggccgaatcgcagttcaccgtgctgcgccagctggtcaaccgcctgggctcgcaggaaggcgaggacaagcgttggcgggagctggtgctggacgtgcgcatgcacgtggagttcatcggcgtcgagctggatgcggaaacgcgccagcaggtcgagatctaccgcagcggcgccggcaagtccggtggccagcgccagaaactggccaccacctgcctggccgcggcactgcgctaccagctcggcggtgctgacagccagctgcccagctacgccgcagtggtgctcgacgaagccttcgacaaggccgacaacgagttcaccgcactggcaatgaacatcttcgacaacttcggcttccagatggtggttgccaccccgctgaagtcggtgatgacgctggaaccgttcatcggcggcgcctgcttcgtcgaaatcagcggtcgccacgattccggcgtgctgctgatcgagtatgacgaggaaggcaagcgcctgaagctgcccgagcgcagccggcagcaggccaacgaaccggaagaagccgaggcctga

SEQ ID NO: 47440 - DNA, 1470 bp, Stenotrophomonas maltophilia
atgaagcatcgcgaacgcatctcccgttaccgccatctgcgcgaacagccccagtggaagctgcttgccgccgaccacgctccggaaatcatcggcctgctgcagggcctgttgatggatggcgagcgcacgctgccctcttcggtgctcaacgagcgcctgcaacgggcgctggaccagctcaatggcgatgaactgtcgcgcgagctgccgcgtaccgcgcaggcctacatcgcgcactggctggcgcagggctggctggagcgccgcctgcccgaaggcgccgaccaggaacagtacgagctgtcgaccgcagcgctgcaggcgatccgcttcgccgacggcctcgagcaggcccgcgtggccgccaccgagagccgcctggcactggtcatcgagcagctctcgcagctggccgcgcagaccgagtccgaccccgacgcccgcctgtcggcgctgcgcgacgagcgcgaccgcatcgatgccgagatcgcccgcgtcggcgccggccgcgtcaccgcgctggacggcaagcgcgcgctggaacgtgcgcgccagatcatcggcctggccgacgagctgaccgaggatttccgtcgcgtgcgcgacgacttcgagcagctcaaccgcgagttccgcgaacgcatcatcgacgatgaaggcgagcgcggcgacgtgctgtcgcagctgttcgaaggcgtggatgtgatcggcgaaagcgatgccgggcgcagtttccaggccttctggcgcctgctcaacgatgccgagcagagcgcccagctcgatgccgccctggaagcggtgctggcgcgtggcttcgcccgccgtctggaccgcaacgaacgcaacttcctgcgcggcttcaccagcaccatgcttgagcgtggcggccaggtacacgatgtgctgcagaacttcgcgcgcagcctgcgcggcttcgtgcagagccgtggctatctggaacagcgccgcctcaaccagctgctgaagcaggcgcagtccgaggcgctggcactgcgtgacgagttccccgcacaacgcggcatcggccgtgacctgcagctgaccaccagccgcctgcgctcgtggtcgcaatggaagctgcacgatccgcgcagcgcccaggtcgatggcaacgtcgagtacaacgatgccgctgccatcagcctggaaagcgtcggcgatctggtcgcttcgtccgaaatcgacttccgtaccctgcgccgcgacctgcacgacctgctcgacgcacagccgcggctcagcatcgcccaggccctgtcgcagcgcgaagcgccgcagggcctcggcagcgtcatcggctacctgtcgctgggcacgcgttttggcaacgtggttgccggcgagcaggagcttgcgcaatggcgaggcggcgacggccagatccgtcgcgcccgcatcccgctggtttggttcacccaggagagacgccatgagctggcatga

SEQ ID NO: 47441 - DNA, 702 bp, Stenotrophomonas maltophilia
atgagctggcatgaagatcccatcgaagcaccgcaggccgaggcggcggaagacgcctacgacgccgaaccggtggcgaccgtggcgcagccccgccgtggcaacgacgtgtattacctgggcgacaccgggcgcctgccgctggatgcgcgccgcgcgctgtgccagttgctgatcggccccagcatcgaccagctgcgccacgccaagctgtggcccgcgctgatccgcagcgaggcggccatccgctcgtcactggcggacctgttcctggaactggtgctcgaccgcgacagcggcgtggcgttcacccgccaggccgacaccgaagacgttgatgcgccggtgctgctgcgcacctcgccgctgaccttcatcgactcggtgctgctgctgtacctgcgccagcagctggccgaggccgatgcgcgcggcaaccgcgcggtggtggccgacgccgagatggccgaagcgctggccatctacgaaaagaacctgtccaccgaccgcgccggtttcaaccgccgcgttgcatcggcggtgcagaagatgaaggacaaccacatcctgacccgcctcagcggccaggacgaccgccacgaagtctcgccggcgctgaagctgctgttctccgccgaagacgtgtcccagctttcggcggtctaccgccagctgcgcgaaaccccggccgccgaggcctga

SEQ ID NO: 47442 - DNA, 3381 bp, Stenotrophomonas maltophilia
atggctatctccaagcacactcccgccctgttcaacgaaggcctgccggacccgcgcctgcagcagttccgcatgcgccgcctgcaggtgcacaactggggcaccttcaacggcctgaccgaagtgccgatcgccgagcgcggcttcctgttcgtcggccgctcaggctcgggcaagtcgaccctgctcgatgccatgtccgcgctgctgacgccgccggccatcgtcgacttcaacgccgctgcgcgtgaagccgagcgcagcggccgcgaccgcaacctggtgtcctacgtgcgtggcgcctgggccgaccagcaggacagcggcaccggcgagatcgccacccagtacctgcgcaagggtgccacctggaccgcactggtgctggaataccgcgccggcgatggtcgcgtggtcagcctggtgcgcctgctgtggatctccggcaacggcacctcggccggcgatgtgcgcaagcactacatgatcgccgaacgtccgttcgacatcgccaaggatctcggcggcttcgacctggacctgcgcaagctcaagcagaagctgcccgacctgcaccacttcgacaccttctccggctacgccgagcgcttccgcgacctgctcggcatcgacaacgagatggcgctgcgcctgctgcacaagacgcagtcggcgaagaacctgggcgacctgaacgtcttcctgcgcgacttcatgctcgacacgccgaagaccttcgacgccgccgagcgcctggtcagcgactttgccgagctcgatggcgcgcaccaggcggtggtcaccgcccgccgccaggtggaaaccctgctgccggcgcgtgcctactacaacgacctgaaggaaatgcaccgccgtcgcggtgacgacgaagcgctgaagctgggtgtcgacagcttccgcgaaagccgccgccaggcgctgatcgaagcgcgcctgcgcgagatggatgtacgtgatcgcggcctgctgggcgaagaagcccagcgccgcgcggcgctcgacaaccacaccgaacggctggccgaactggaactgcagcgccgccagcagggcggcgaacgcatcgaggaactggaacgcgagcagggccgtgcggaagcggagcgcgatcgccgccaggccaagcgcgaacaggcccgccaggccgcccagcagctggggtctgaactgccggacgacgcacacggcttcgccgagcttgtcgagcgcgcgcagaacgaactgcaggatcgccagcgtgcctcttcggcactggacgatgcgatcagcgagcgcctgggcggcaagcgcgatgacgagcgccgtttcggcgaagtccgtgccgaactcgaagcgatgcagcgcacgccctccaacatcccggcaccgatgcagaagctgcgcgcgcgcctggccgaggaaaccggcattgccgaggcggcgctgccgttcgtcggcgagctgatccaggtccgctcggaagagcagggctggcagggtgcgatcgagcgcgtgctgggcggcttcgcgctgtcgttgctggtcgatgacaagcactacaacgaagttgccgagtgggtgaaccggacccacctcggcatgcgcttcacgtactaccgtgtccgccgcaacgatgaagcgttcgcgcgcgagccgtcggcgaagtcgctgctgcacaagctggaactgcgcgagcacgtgttcgaaagctggctgcgccgcgagctgggcaagcggtttgactacgagtgcgtggatgccaagcagctgcgcaacgtcgaccgcggcattacccgcgaaggccaggtcaagcatccgggtgaccgcttcgaaaaggacgaccgcagcgcggtgggcgaccgccggcgctggatcctcggcttcaacaaccacgacaaggtcggcgccttcgagcgcgaagcccaggaactggccaagcgaatcgccagctgcgagaccgatatcgcgcgcctgcgcggccagcgtgaccgcgacaacgaacgccgcctggcctgccacgaactggtcagcatcagctggaacgagatcgacgtcgccgcaccgcagcagcgcctgaccgatatcgaggccaccctgcgcgacctgcgcgaaggcaacgccgatcttgccaggctggccaagcagatcgacgccgtgcgcgccgacatcgagcaggcccgccgcacgtacgaagacgtccgcgtcgagcgtggccagctggtcagggagcgtgatcgcctcgaccgcgcacgccagcagagccgtgcgctggtgctgccgaccctggcccaggagcaggaggccggcctcgccgagcgcctgcaggagcagggcccgctcagcctggaaacgctcgaagcgcacatgcgccaggtcagcaacgcgctgaacgagcagctgtcgtcctcgcagcaggacctcaaccgcatcgagaaccagctgatcggctgcttccgccgcttcatccagcagtggccggaggaatcgggcgacttcaccgcatcggtggcctcggccgaggacttcctcgcccgcctcgagcggctggagcgcgatggcctgccgcagcacgaggagcgcttcttcgatctgctgcagaaccagagcaagaacaacctgctggctctgcagcggcacagcgcagaggcacgcaagtcgatcggccagcgcctggatgaagtgaacgccagcctggaacaggtaccgttcaaccgcggcacgctgctgaccatcgaactgagcgaccgccgcctgccggaagtggtcgagttccatcagcagctgcgcgaagtgctgtcgcagcagcagaccgagcagcgcgagctggccgaatcgcagttcaccgtgctgcgccagctggtcaaccgcctgggctcgcaggaaggcgaggacaagcgctggcgcgaactggtgctggacgtacgcatgcacgtggagttcattggcgtcgagctggatgcggaaacgcgccagcaggtcgagatctaccgcagcggcgcgggcaagtccggtggccagcgccagaagctggccaccacctgcctggccgcagcgctgcgctaccagctcggcggcgccgacagccagctgcccagctatgccgccgtggtactcgacgaagccttcgacaaggccgacaacgagttcaccgcactggcgatgaacatcttcgacaacttcggcttccagatggtggtcgcgaccccgctgaagtcggtgatgacgctggaaccgttcatcggcggcgcctgctttgtcgagatcagcggccgccacgactccggcgtgctgttgatcgagtacgacgaagaaggcaagcgcctgaagctgcccgagcgcagccgccagcaggcaaacgaaccggaagaagccgaggcctga

SEQ ID NO: 47443 - DNA, 1419 bp, Burkholderia pseudomallei
gtgttcttcgacgccgagcggcagaggttttttcgtccgctcaatagctccaggcgtgaattagtagcggcatgcttgcgtgcactttatgaccgcctccatgggcccgcagccgactatgcgcaccaccttactcgagacgtccttcgcgaactactgctgccggttgttcggcaataccagactacgctggcggatgacggctccgacgatgaattcagcgccgtcgatgcgagcgaccctcaactgctggtcgccatggtcattcgggcgctcgtcgcagacggttggctagagcagttcgctgaccggactggcttggttgcagcttttcgtttttcgcgtcccggcaagcttttttcggaggcgctttgggcattggaccgcccaagccgaagccggcagcgcaacatgcgcgggtgccgcaatgcgctcgaggctgcgttgtccgaacgaggcgacgcacatgacttggtggatgcctacgaatacgccgagaaggttatcgaggacctcgcggacggcatcgattactttcaagaactggtccggcacttgatgcaagccgcgtctgctcatacgcaatggaacgaattcgttgactttctcgacagattccagcgggactactccaagcaacttacagcggataacgcgacgctgaaccgccaagccattcggcaaaagcttgagaaactccgggccgttccggaggcgaagttcaatcgaatggatgcgcagttgcgcgatatcgcgcactggatggcgaaggagtacaccggaagctcgctctatgattggctgctcggtcgtattgaagacatcgtagacgcggcgtgcgagtctaagcagccgggctttctcaaggccatggagacttatctgaagcgtgtgaacggcctcgctttgcagtcgatgatgctacgctcggggcagactcggcatgcctacttagcagccgttcagaaagtggccgagtctcccaagttggaacaggaccgcttgctgaagcttgttggccagttcctcgcaccagcggaggtgcgcgtcctagacccagctagcttcaagctgaagactgcaacgcagcgccgcaaagcagtaaccgtgtctattcgaccgcgcccgacaagggaagagcggctcgctgcggcgatggcgcgagcagaggccgaagtgttctcaataccgaacgaggatgtcgcgcaggggctgcgtgcggacctgcgactcttccaacatccaatccgcgtttccgcaatgcctacggcaagtgcccgcgacgtcattcgcgcaatgcaagcggtggaagccgcgcgaagcgccatcggcggggacctcatcgtcaagaagctgccgacccgtttggagaatgagttctacggggccaacgactacgaaatcgacctgaaaaaatga

SEQ ID NO: 47444 - DNA, 672 bp, Burkholderia pseudomallei; identical to SEQ ID NO: 44291

SEQ ID NO: 47445 - DNA, 3633 bp, Burkholderia pseudomallei; identical to SEQ ID NO: 44944

SEQ ID NO: 47446 - DNA, 693 bp, Burkholderia pseudomallei
atgacggaggtcgtggagcagttgaaccggcttccggcgctggccgagaaatcgatgctgctgcgcgaggtgtcatcgcagttattctgggggatgtccaaggtcctcgacaagcgccaaggattggttgcggccattctaggtatggacgattgcccattcccagagtctcccatccaattgcacgtgttcttgcctgccggcggccatcgtggagtgctcttcattgagaattcggtgagcttcgaatgcgcaatgcgcgagccccgcggagtgttcggtgagttggctttggtctacgcgtccggctttaaagggagtgcgcagcggctgcgcaccacggaggggtgctcgctgttttacgcggcaggcggcggtctcgaacgggacttgcgtgcaacgtttgaaggttggttgttcggccggcaagagataccgtcgtacttttggggcgacctcgacttcgcgggaatgcgcatactcgcggctatgcgggcgaccttttcggggctgacagcctgggtgccgggttatgcgccgatgctaaccgtgctaaagggtggcggagggcacccccctgaggccgccgacaaacaagggcagaagccaatcgcatcgacagggtgcgagtacgccgatgagcaactaatgccagccctgcagaccttccggcgtttcgtagaccaggaatag

SEQ ID NO: 47447 - DNA, 1632 bp, Bifidobacterium longum subsp. longum; identical to SEQ ID NO: 42278

SEQ ID NO: 47448 - DNA, 675 bp, Bifidobacterium longum subsp. longum; identical to SEQ ID NO: 42279

SEQ ID NO: 47449 - DNA, 3546 bp, Bifidobacterium longum subsp. longum
atgcaggcgacagacgtgcagatgatcgcggaccggtggatgctggaatcccgccgactcatcaactggggctcctatgagggctaccacgaattccgcccctccacggaccacaagctgccggtgaccctgctcgccggcgccagcgaatccggcaaatccacgctggtcgacgcgcagatctccctgctgtacccaaccggtacgccgttcaacaaggcctcgaactccggccgctccgaacgcagcgactacacctacctgcgcggcatggtcggcgtgggcagcaccgaaaccggcgacgagccgctctacctgcgcggccgcgacgagaacggcgcaccgcaacccgtgtggggcgccatcgtggacacctatcgcaaccagaccaccggccaggtgctctcctgcgccaaattcctctacctgatgcccggcgacggccgcggcgacgtgcgccgacagtacgtggtctggggcaagcccgtggaccccaggcgcatggaccaataccgtgacgccccgttcacgccggcccagctcaaagccacctaccccgactgcctcacattccccagcgccgaagcgttccacacacacatctggagcgcaatgggcctgagcgaggccgcctgtcgactgctgcacaagatccagtccgccgacgcgccctcccggctcgacgacatcttcaaacaaggcgtgctcggcgtgcccgaagccctggacctggcccgcaccacggtcgaggactacgaacgttacgacgagaacttccacgccatggacgagaagacccgccgcatggacacgctgcgcggcatccaacaggcctacggcgaatacgccgccgcacgcggcaaggcccgcgccttcgaaccggtcaagccggccgtcgacggcacggtaccggccgtgctgcgcgactgggcattggcccgcatgcgcggcgaagtcgccgtccaactgcccgccgaccgcgccgaacaacagaacagcgaggcggaagccaagctgctgcgccgccgaaccgaagacctgcacacccgtctcgacatgatccgaggccagatgcagggtctggacggcggcaacctgacccgactcgaactcgaactcgaccaggcccgccgcaccctcgaagacgtgcaagccaaccgaacacgaatcgaacaaacgttcgcatccatcggcgagacgctgcccggcgacgaacaagcctggaacgaacgccgcatcaacgccgtgaacttcaaacgcgaatacaacaaacgagacggcgaatgcgaggaagccctcaccgccgccatcaacgcgcgggccggcgcacgcggcgacctcgaacgactgcaacgcgacttcgaccggcaacgctcccagcgcacccgcatctcccagcagatggacgaaacccgcgccatgctctgccgcgccaccggactcacccccgccgaactgccgtacgtggccgaactcatggacgtgaacgaacacgaggaagactggcgtctcgccatgaacgtcgcctacgcgcccatcgcccagaccatcctcgtcgacaagcgccacgaacagggcttcgccgccaaagtcagcaccatcgacccgcgcaccatgccccgacgcacctggcagttcgtggacaccgcacgccactacgacgacaccggcgcgcacgcgaacatactcaccggagaacaggacggcgactggctgtccggcaaactgcgctaccgcgacgactcgcccttcgccgactggctgcgctcgcagacccaggacgaacgattcgacgccctatgcgtcaccgccatcgacgacaccgaccgcaccaaccgtcaggtgcaggccgacggtcagatcaaatccggcgcacgcggccagcacggcaccaaagaccgcgcccaggtcatcggattcgtcaacgaaacctacctcaacgcgctcgcagcgcaggtcgacgccgcccgcaacgcgctcagccaagccgacaccgactacacggccgccaaaacacagtccgataacctccaccgcgaactcgaactggccaaccagctcgcctacacgtcctgggagcgcatcgacatcgccggcgcgcaacggaccatcacggacacgcaggacgccatcgcatccatcaaaaacgatcccaagctcgccgaactcgccaaacagcgcgacgaactgaacgccgaactcgaccgtgtggaacgccagcgcatcgaatccgaccaggccgcggcccgcgccggcagcgccgtcgaagcggcgctcatctggctgcgcgaccatgccgacaccggcacgacggacgccgccggtgccaccgccgacaatgacgatgacgccgcgtccggcccgctgccggacgaagtcacggcggcgctcgccgaatcctacgacaaccgattcgccggactggcggacgccgccatgcgcgcgcacatgatcatcggcgcgggcgcggcaggaacgcaggcaccgggggagagcttccccgaacgcaccatcgccggcatcggcaaggacatggcctcccgcatcaacctgctgaacggccaggccgatgccgcacgcaccggcgtcgaatcgaaaatgagcacctacatcgcgctctacgcggccgacgatgattcgctgaccgccagcgtggaggactaccggtactatctcgacgaactcgccagcctcacccagctggccgcggttgccgccaccgacgccgaataccggcgctgcctcgaacagctgctcaggagcttcctgaccatcaaacgcgccatcgacacggatgccagcgacatccacgaccagcttgaccgcatcaacgccatgctcaaaggccagcagttcggtcccaagcacggcagcctgtccctgcacgcggacgtgcgccgtcccgagcgcaccttctgggcgcagctcatccgcgtcatcggcaccctgaacgattggaaatccgccgacgtcaacgattccgacgcctcgcgcaaggctttcgcggcctgcgcgccgatggtcgggctgctgcgcgccgaactcgcgcaggtcaaggacgcgaacggcgtgaaaagctacggcgcccgcaacctcgacccgcgctgccgctcgtccttctacgccatcgtgcatcatgccgacggcccggatgaacgcatcacctccaccggcggccgttcgggcggcgccttgcaggagcttacctcattcgtatacggcgcggcgctcatctacctgctcggcggcggcctgaccagcgagccctcgtacaccacgctgttcctcgacgaggcgctcatcaaggccgacggccgttacacgcagcgcgccctcacggtgctgccgcgcctcggattccaggtcatcgtctccgccccggaaagcaagaccggcgaaatcctcgaggtctccaccaaggcctacgtgacctacaaggaccccgacaccggcctcacctccctgcgcgaggccgtgctgcatcagaatgacatggacgatgaatcatcgtcggatatattgaaggatgacggggttgccgaatga

SEQ ID NO: 47450 - DNA, 1047 bp, Bifidobacterium longum subsp. longum
atgcgattgcggtgcatgacaacaactgagatacggcaatgggcaagcaagaatggttgcgaaatcataaccaagcatcgcaccataggcacctctgtcgagctgatctccaaagtcgtcgttcctgacgaatcaatagccatgcgtgtggttggtcgtacgctggcggcggaatgtcgcgaagcgcgccgccgcatagcatgtctggttgctgcttgtgacgttgctccggaaacaatcgaatcggccgctcgcatgacaggccatgaacagcctgacgacttcgatctgcttgtcagcgcagttcgatatttcaggcatcatgacgtgaccggtatgacgccgcgacagattccactgacaggattcagcggcaaatggctgaatgagtcaaaaaccaatcgtcgtaaggccatttgccgactgctcggtgtcgaaacgttgggtctgtcaaaacggccgaccgaactgcggttccgttatctcgatccggtccgcgacgatgctgagctcgaacgcatcatatggtgtccgtgggaaggcgaagcgttatccggcattaaatatgctgtcatcgttgagaacaaagacacgtatcagactatgccgccgattgcgcagggcatctgcatatggggttctggtcgcgctgtaagcgatgctgtacctgcggttcctgcactgcgtgacatgcgtatcgtgtattggggtgatatggatgcggatggactggaaatactttcgacattacgtgaatcaggtatcgaatgcgactccatcctgatggattgcgatgcatacgatcggtaccacagatttggtaccgatcgtactgaacgcagcgcgaagattgttatgcgggagcctaagccgacgcccggccttcaatcggcggagcgacgtctttatgaacgactgtgtgctgacaaaacaatcgcttatcggcgtatcgaacaggaacgcattcccatgcgtgatgcagttgacgaattacgcaagcttggcatccccgtggagtccattgaaaatcaggatttgccgatttag

SEQ ID NO: 47451 - DNA, 1464 bp, Achromobacter xylosoxidans
atgagctcgctcaagaaaattgcacaactgcggcaattgcgggagcagcctttgtggaagctgctggcatcagacaaggcacctttggttctgggggtcctgcaggatttgctgctgggcgatgaaaaggtgatccctgcctcggtcctccttgagaagcttcagcgcgaactgcaggacctcaggcagtctggcgaggaaatggcacagactgcgcaggcatacgtggctctgtggctatcggaaggatggcttactcggcgattgccacccggcgctcaggaggagttgtacgagctcacgacggattcgctcaccgccatccgttttctgcaagggatactgcaaccccgcgcgatggccacggaaagccggttggccaccgtcatgcagcaactcatgaagctggcggaggacaccaattctgatcccaccagtcggcgagccgctttagtggcagagcgtgctcgcattgaccgggaacttgagcaagtcggtcgaggggtggttgaaatcctgccgcctgagcgtgcattggagcgggctagagacattatcggcttggccgacgaactggtggccgatttccgccgggtgagggaagactttgaccaactcaaccgtcaattgagagccgacctattgaataatgagggaagccggggacaggtcctggagcaactatttgccggcatggacctaatcggcgaaacgccagccggcaagacattctatgcgttctggcggctgctcacggacattgagcagtcgaccattttctcggaatcgttgagcgaggtggtcgcgcgggacttcgccagtcagctcggaattacagagaggcgctttttgcgcaatctcacgagccgcctgctggaagaaggcggcaatgtacatgaagtgctgcagacattctcacgtagcttgcggaccttcgtccagagccgggaataccttgaacagcgccgattcaacgccgtgcttcgggagtcgcaacgtgaggctctagccatcaaggagcagttgcggcccaatcaggacgtcgggttttcgctctggatacccaatgcgcaactgcgctccgcatcccagtggcgactgttcgacgtggctggccaggctccgccaggaggtatggaggatgcacctgagtcgagtatgagcctggaggccatcgcaagcatggtgcgcaactccgaaatcgactttggtagcctgcgtcagaatatctacgagcgtcttcagcactctcaggtggtaggcatcgaggaactgctgcgaatctatcctgcaactcaaggtttaggttcgattgtcggctacatttacttggctttgcgacacgggcacatcacatctaacaacgtgcaagtgaactggacagggatggattccgtggcccgtagtgcagttgttcctgcagtgtactttctgaaggaaaaagaacgtgaatttgcccgttga

SEQ ID NO: 47452 - DNA, 657 bp, Achromobacter xylosoxidans
ttggacagcagttccgaagatcagggcgatgctgctctggagagcgaggcccggtttgcaggtgataccggaacgttgccggttcccgcccgccgcgttcttgtacggctgttacagggaccctcacttgacgcgcggcgtcacgagaagctgtgggaggtgttcaagcggtatgagaaggacctcaagtctcgcctccacgacatcttccttgaacttgtggtggacaatgaggccaaggtggccttcactcgccaagtcgtctccgatgaagtggacgtgccgattttgttgcgcaagcagagtttgagtttcatagaatcggtgctgctattgttcttgcgccagaaactcacccactcggatgcgcaggccgaacgagccgtcgttgatctgatggagatgacggagtacctcaaagcctacgagcgtagcgacaacgttgatatgtcccggtttgggaggcagatggagggggcgatcgaaaaggccaagaaactcggggtgcttctcaagctgtctggggcagatgaccgcttcgaaatctctcccagcttgcggttgttgtttcctgctgaggaaatccaggcgctaactgaagcctttcgtcggcacttgcctgtggacgtgttacccgggcaggaggaggatcactga

SEQ ID NO: 47453 - DNA, 3453 bp, Achromobacter xylosoxidans
atggatgcaaccaatattgcagcgacctctgagccggggggggctcgtcagactattctcgctgcccggcctgggcgggagctccaattccaattacgccgcatccagacgtacaactggggcacctttgacaagttgcgggaaattcacatcgccgcggaggggcacttagtgctggggccttctgggtcgggaaagtccacccttcttgacggccacacctcgctcttgacgccgccacgatggctcgacttcaataccgcggcccgaaactcagagaagggtgctggggaccgtagtcttgccacatacgttcggggcgcctgggcgacgcagaccggagatgagggtgaaaaggtcaaacgatacctgcgcgctggtaccacgtggtcagccctttctgagacttatcaggacggagcaggccgcacggtcgtccttggtcgtgttctctggataaagggtaacggttccgcggaatctgacgttcaccgactcttttttatcgccgagcgtgacttcaaacttcgcgagctcgagttcttccaggacgaggggtctggattcgaagtccgtcggctgaaagcaaagctcgcagacgtgcatttcaccgacgagttcagtgcgtatcagacccgtttcacgcgtctgtttgacatcaagagcgaccgggcgctgcggctgttgcataagacgcagtcggcaaaggatctgggcgacctgaacaagttcttgcgcgattttatgctggacccgccagaaactttcgcagtcgccgagacgttggttaacgagttccaagtactaaacggagcgcatgaggctgttttgacagcgcgtaatcagattgaggccctccgacccgtccgcgaccggttgaccgaatatgaccagactcaatcgctcttgtccctgctggctgaggaaaaggtcggcgttgactattggcgtgaacaaaatcgccgagacctgctacaggcatacatcgctgaactcgcgatgagggccgagggcctggctgcaagaatcgaggagcttaagacaaaggaagagcgggaagcgcgcgaatttaactccttgctcgccattcgcgccggtgcgggcggcaatgtgctcgcagacctgcaggctcaagttgaacgcgccgagcgggtacggctccctgacgcgtcggcgaacaactcgcgcttagtaagtagttgcaaagcgctgggatgggccttgcctgcttcccctgaggcgttcgcgcagatccaagcagaagcacgaatcatctttgacgatcgtgattcgatggcggaacgccacgaaaagctcttggataggctgaaggatgagaagcgcgcgttggatgatcgctttgccgcattgcttaaggaaatacgggcaatggaggggcgaacatccaatatgccatcgcgtctcctggaaatccgcgaacgcatgtgtcgcgacctgggcattgtcgaagacgagttaccctttgtcggcgagctgttgcaggtcaaggccaaagaaggtcagtggactggagccatcgagcgtgttcttgggggcttcgcccgtgacctgctcgtcgaggagcgctattaccgggaagtggctgcctgggtagatcagacgcacttggggctgcgccttggctatcgccgcatgacgaccagggcgaatcagagtgccgcaacccaacctgctaccaactcacttctacgaaagttggacgtcgcgccaagacacaaggattgggtgtccgaggaactgcgtcggttcgactacgcgtgtgtcgacagctccgatgatttgcgcttggtggagcgcggcgtcacgttggctggccaagtcaagcacaaccgcagcttgcacgagaaaaacgattcgcgccgagtggatgatcggggaaattgggtcttaggcttttcgaatgcggagaagttgcagacatataaggtcgaatttgaaacactccaggtagctgtcgccaaggcagaaaaggcacttgaacaggcgcgggaaatgacgcggaacgaaagccgccaagtcgaacattgccaaaacctcgtgaacgtcacttgggagaacagcaacgttgccgccttgcttgatgatattcagtcgctcaaggaccgcatcgcgcaggaactccggtccaggccgcagctttccgaactggacaataaggttgaccgacaacgcaagacgtgggaccgagcggttgatgcgagacagacggctcagggcgaggcggcagatatggaccgtgagcgttcgaaagcgcagaagcgccttgatgaactgcccccggaacagcttcggtttccgctgtcgcctacgcagaaggagcgacttgccgcgcggttcgaggctaccgggaaaaagatgacggtggagcaacttgattctgcctgcatggcgatggttcgagccatcggtgatgaggagaacgcagcaacgagtaagactgccgagatcaagcagaaaattgaacacggcttgtttgtcttttgtcagaggtggccagcggaggcgcaggggttggaccccaagatggactccgcgcctgatttcatggccaagctagcgagactggaaaccgacggcctgcacgaatacgttgcgcgcttcaaagcgctactgcgtgagcagagcgaccagaaccttgctgtactgcatgccaagttggaccaagaacgccgcaatatcggcgagcggatggagcaggtcaatgacagtcttcgccgctgtgcgttcaacgagaacacgtacctggaaatcaactacgatgaccgaccgacccaggaggtagtcgagttccgcagcttgctcaaggctgccttaagtcacagctttaaggaggacgacgacgaggaaatggagcggcgcttctctgtcttgaacgctgttgttcaacgacttggtagtcaacaacctgcggatgtgaagtggcgcagcctagtgttggacgtgcgccagcacgttgtcttctccgccacggaatttgacgacactagcatcgaagttgagacttatgacagtggagcgggtaagtccggtgggcagaggcagaagctcaccacgactgttcttgcagctgcgttgcgctaccagcttgccggcgaggagggggtctggccgacctattcgaccgtggtcatggacgaggccttcgatcgggcggacaacgaattcaccgcgatggtgatgaacatcttcaagagcttcggtttccaggtcgtggctgccacgcctgtgaagaatgtgatggcgttggaaccgttcatcggaggcggcacgttcgtcagcattagggacagaaaacactcggaagcgttggccatcacgtacgtggaccagactggacgactcgatctgccgcgggaggctcacgaggttcttgccgaggagctggcagccgacaccaccggaacggcagagggaggactgcagagtgaatga

SEQ ID NO: 47454 - DNA, 1212 bp, Achromobacter xylosoxidans
gtgaatgagccgaagcgactgacgcagcagcaggttcggactttggtgcgaaagaaatgggatacataccatgccagctggcttgtttcgcctcatgaggcaacttggccgttcgttgtagtccttcacaacatgaccgaaaggaacgtgttctccagcctgggaagcacccgcgagtgggtgcagacttggcgagcttgggatcctgggtgctgcgaggtcgagtgggccatccgaaagtggccttccggagatcaagagttacccatgcgactcattgttccatctgcggatgctgctgcggcgatgctgggtgaacgaatggcttgggagcgggcgaagaaacgatacgctcagtggtgtgaacgatttccgcaccttgaaggatctcgagcggccgcccgtcaatgtgacgctgtgcttgtcgattactctgaagaggatttcgagcgattcggcagtctcttgcaatggctcctcgaaaacccgcgctcagggctgtatttgcggcagttgccagtacccgacgttgatacgaagtgggtagaaagacgccgcggcgctgttacggatttcgctcgtcacttgcttggcgcgtcacagggggctagtctgcacgagacctgtgggctgcggacggaaccttcgcgcatgcgtatacgtatcctgtgcccgcttctgagggctcaagttggcgggctgtgtgacatcgaagcgccgggcggtgagctcgcgctgcttcccatccggccttgcctctgcattattgtcgagaaccagaacaccggaattgcactgcctgacatcgaaggagctgtagttttcatgcggctcggacttgccgtggagcagttggaggctattgggtggatacgcgaggcagcgttgcaagtgtattggggcgacctggacacgcatggattcgcggccctggcgcgggcgaggcggcgcttcccatcgatgatttcggttctgatggaccaagatacattgctttcgcaccgttccatgtgggttcgagaagaaaagcctagcaaggtggaatcgctggaaaacctcacggctgcggaattcgatgtctacgacggtatccggggcaaccgttggggcgtccaggtacggctcgagcaggaacgcgtggcatggccgatcgcgctgcagcacttgcagtcagtatgcggcgtgcgcactgaattagtttcgagtcgatag

SEQ ID NO: 47455 - DNA, 1464 bp, Achromobacter xylosoxidans; identical to SEQ ID NO: 47451

SEQ ID NO: 47456 - DNA, 657 bp, Achromobacter xylosoxidans; identical to SEQ ID NO: 47452

SEQ ID NO: 47457 - DNA, 3076 bp, Achromobacter xylosoxidans
atggatgcaaccaatattgcagcgacctctgagccggggggggctcgtcagactattctcgctgcccggcctgggcgggagctccaattccaattacgccgcatccagacgtacaactggggcacctttgacaagttgcgggaaattcacatcgccgcggaggggcacttagtgctggggccttctgggtcgggaaagtccacccttcttgacggccacacctcgctcttgacgccgccacgatggctcgacttcaataccgcggcccgaaactcagagaagggtgctggggaccgtagtcttgccacatacgttcggggcgcctgggcgacgcagaccggagatgagggtgaaaaggtcaaacgatacctgcgcgctggtaccacgtggtcagccctttctgagacttatcaggacggagcaggccgcacggtcgtccttggtcgtgttctctggataaagggtaacggttccgcggaatctgacgttcaccgactcttttttatcgccgagcgtgacttcaaacttcgcgagctcgagttcttccaggacgaggggtctggattcgaagtccgtcggctgaaagcaaagctcgcagacgtgcatttcaccgacgagttcagtgcgtatcagacccgtttcacgcgtctgtttgacatcaagagcgaccgggcgctgcggctgttgcataagacgcagtcggcaaaggatctgggcgacctgaacaagttcttgcgcgattttatgctggacccgccagaaactttcgcagtcgccgagacgttggttaacgagttccaagtactaaacggagcgcatgaggctgttttgacagcgcgtaatcagattgaggccctccgacccgtccgcgaccggttgaccgaatatgaccagactcaatcgctcttgtccctgctggctgaggaaaaggtcggcgttgactattggcgtgaacaaaatcgccgagacctgctacaggcatacatcgctgaactcgcgatgagggccgagggcctggctgcaagaatcgaggagcttaagacaaaggaagagcgggaagcgcgcgaatttaactccttgctcgccattcgcgccggtgcgggcggcaatgtgctcgcagacctgcaggctcaagttgaacgcgccgagcgggtacggctccctgacgcgtcggcgaacaactcgcgcttagtaagtagttgcaaagcgctgggatgggccttgcctgcttcccctgaggcgttcgcgcagatccaagcagaagcacgaatcatctttgacgatcgtgattcgatggcggaacgccacgaaaagctcttggataggctgaaggatgagaagcgcgcgttggatgatcgctttgccgcattgcttaaggaaatacgggcaatggaggggcgaacatccaatatgccatcgcgtctcctggaaatccgcgaacgcatgtgtcgcgacctgggcattgtcgaagacgagttaccctttgtcggcgagctgttgcaggtcaaggccaaagaaggtcagtggactggagccatcgagcgtgttcttgggggcttcgcccgtgacctgctcgtcgaggagcgctattaccgggaagtggctgcctgggtagatcagacgcacttggggctgcgccttggctatcgccgcatgacgaccagggcgaatcagagtgccgcaacccaacctgctaccaactcacttctacgaaagttggacgtcgcgccaagacacaaggattgggtgtccgaggaactgcgtcggttcgactacgcgtgtgtcgacagctccgatgatttgcgcttggtggagcgcggcgtcacgttggctggccaagtcaagcacaaccgcagcttgcacgagaaaaacgattcgcgccgagtggatgatcggggaaattgggtcttaggcttttcgaatgcggagaagttgcagacatataaggtcgaatttgaaacactccaggtagctgtcgccaaggcagaaaaggcacttgaacaggcgcgggaaatgacgcggaacgaaagccgccaagtcgaacattgccaaaacctcgtgaacgtcacttgggagaacagcaacgttgccgccttgcttgatgatattcagtcgctcaaggaccgcatcgcgcaggaactccggtccaggccgcagctttccgaactggacaataaggttgaccgacaacgcaagacgtgggaccgagcggttgatgcgagacagacggctcagggcgaggcggcagatatggaccgtgagcgttcgaaagcgcagaagcgccttgatgaactgcccccggaacagcttcggtttccgctgtcgcctacgcagaaggagcgacttgccgcgcggttcgaggctaccgggaaaaagatgacggtggagcaacttgattctgcctgcatggcgatggttcgagccatcggtgatgaggagaacgcagcaacgagtaagactgccgagatcaagcagaaaattgaacacggcttgtttgtcttttgtcagaggtggccagcggaggcgcaggggttggaccccaagatggactccgcgcctgatttcatggccaagctagcgagactggaaaccgacggcctgcacgaatacgttgcgcgcttcaaagcgctactgcgtgagcagagcgaccagaaccttgctgtactgcatgccaagttggaccaagaacgccgcaatatcggcgagcggatggagcaggtcaatgacagtcttcgccgctgtgcgttcaacgagaacacgtacctggaaatcaactacgatgaccgaccgacccaggaggtagtcgagttccgcagcttgctcaaggctgccttaagtcacagctttaaggaggacgacgacgaggaaatggagcggcgcttctctgtcttgaacgctgttgttcaacgacttggtagtcaacaacctgcggatgtgaagtggcgcagcctagtgttggacgtgcgccagcacgttgtcttctccgccacggaatttgacgacactagcatcgaagttgagacttatgacagtggagcgggtaagtccggtgggcagaggcagaagctcaccacga

SEQ ID NO: 47458 - DNA, 1464 bp, Achromobacter xylosoxidans; identical to SEQ ID NO: 47451

SEQ ID NO: 47459 - DNA, 657 bp, Achromobacter xylosoxidans; identical to SEQ ID NO: 47452

SEQ ID NO: 47460 - DNA, 3453 bp, Achromobacter xylosoxidans; identical to SEQ ID NO: 47453

SEQ ID NO: 47461 - DNA, 1212 bp, Achromobacter xylosoxidans; identical to SEQ ID NO: 47454

SEQ ID NO: 47462 - DNA, 1464 bp, Achromobacter xylosoxidans; identical to SEQ ID NO: 47451

SEQ ID NO: 47463 - DNA, 657 bp, Achromobacter xylosoxidans; identical to SEQ ID NO: 47452

SEQ ID NO: 47464 - DNA, 3453 bp, Achromobacter xylosoxidans; identical to SEQ ID NO: 47453

SEQ ID NO: 47465 - DNA, 1212 bp, Achromobacter xylosoxidans; identical to SEQ ID NO: 47454

SEQ ID NO: 47466 - DNA, 1464 bp, Achromobacter xylosoxidans; identical to SEQ ID NO: 47451

SEQ ID NO: 47467 - DNA, 657 bp, Achromobacter xylosoxidans; identical to SEQ ID NO: 47452

SEQ ID NO: 47468 - DNA, 3453 bp, Achromobacter xylosoxidans; identical to SEQ ID NO: 47453

SEQ ID NO: 47469 - DNA, 1212 bp, Achromobacter xylosoxidans; identical to SEQ ID NO: 47454

SEQ ID NO: 47470 - DNA, 1464 bp, Achromobacter xylosoxidans; identical to SEQ ID NO: 47451

SEQ ID NO: 47471 - DNA, 657 bp, Achromobacter xylosoxidans; identical to SEQ ID NO: 47452

SEQ ID NO: 47472 - DNA, 3453 bp, Achromobacter xylosoxidans; identical to SEQ ID NO: 47453

SEQ ID NO: 47473 - DNA, 1212 bp, Achromobacter xylosoxidans; identical to SEQ ID NO: 47454

SEQ ID NO: 47474 - DNA, 1470 bp, Stenotrophomonas maltophilia
atgaagcatcgcgaacgcatctcacgttaccgccatctgcgcgaacagccccagtggaagctgcttgccgccgaccacgctccggaaatcatcggcctgctgcagggcctgttgatggatggcgagcgcacgctgccctcttcggtgctcaacgagcgcctgcaacgggcgctggaccagctcaatggcgatgaactgtcgcgcgagctgccgcgtaccgcgcaggcctacatcgcgcactggctggcgcagggctggctggagcgccgcctgcccgaaggcgccgaccaggaacagtacgagctgtcgaccgcagcgctgcaggcgatccgcttcgccgacggcctcgagcaggcccgcgtggccgccaccgagagccgcctggcactggtcatcgagcagctctcgcagctggccgcgcagaccgagtccgaccccgacgcccgcctgtcggcgctgcgcgacgagcgcgaccgcatcgatgccgagatcgcccgcgtcggcgccggccgcgtcaccgcgctggacggcaagcgcgcgctggaacgtgcgcgccagatcatcggcctggccgacgagctgaccgaggatttccgtcgcgtgcgcgacgacttcgagcagctcaaccgcgagttccgcgaacgcatcatcgacgatgaaggcgagcgcggcgacgtgctgtcgcagctgttcgaaggcgtggatgtgatcggcgaaagcgatgccgggcgcagtttccaggccttctggcgcctgctcaacgatgccgagcagagcgcccagctcgatgccgccctggaagcggtgctggcgcgtggcttcgcccgccgcctggaccgcaacgaacgcaacttcctgcgcggcttcaccagcaccatgcttgagcgtggcggccaggtacacgatgtgctgcagaacttcgcgcgcagcctgcgcggtttcgtgcagagccgtggctatctggaacagcgccgcctcaaccagctgctgaagcaggcgcagtccgaggcgctggcactgcgtgacgagttccccgcacaacgcggcatcggccgtgacctgcagctgaccaccagccgcctgcgctcgtggtcgcaatggaagctgcacgatccgcgcagcgcccaggtcgatggcaacgtcgagtacaacgatgccgctgccatcagcctggaaagcgtcggcgatctggtcgcttcgtccgaaatcgacttccgtaccctgcgccgcgacctgcacgacctgctcgacgcacagccgcggctcagcatcgcccaggccctgtcgcagcgcgaagcgccgcagggcctcggcagcgtcatcggctacctgtcgctgggcacgcgttttggcaacgtggttgccggcgagcaggagcttgcgcaatggcgaggcggcgacggccagatccgtcgcgcccgcatcccgctggtttggttcacccaggagagacgccatgagctggcatga

SEQ ID NO: 47475 - DNA, 702 bp, Stenotrophomonas maltophilia; identical to SEQ ID NO: 47441

SEQ ID NO: 47476 - DNA, 3381 bp, Stenotrophomonas maltophilia
atggctatctccaagcacactcccgccctgttcaacgaaggcctgccggacccgcgcctgcagcagttccgcatgcgccgcctgcaggtgcacaactggggcaccttcaacggcctgaccgaagtgccgattgccgagcgcggcttcctgttcgtcggccgctccggctcgggcaagtcgaccctgctcgatgccatgtccgcgctgctgacgccgccggccatcgtcgacttcaacgccgctgcgcgtgaagccgagcgcagcggccgcgaccgcaacctggtgtcctacgtgcgtggcgcctgggccgaccagcaggacagcggcaccggcgagatcgccacccagtacctgcgcaagggtgccacctggaccgcactggtgctggaataccgcgccggcgatggtcgcgtggtcagcctggtgcgcctgctgtggatctccggcaacggcacctcggccggcgatgtgcgcaagcactacatgatcgccgaacgtccgttcgacatcgccaaggatctcggcggcttcgacctggacctgcgcaagctcaagcagaagctgcccgacctgcaccacttcgacaccttctccggctacgccgagcgcttccgcgacctgctcggcatcgacaacgagatggcgctgcgcctgctgcacaagacgcagtcggcgaagaacctgggcgacctgaacgtcttcctgcgcgacttcatgctcgacacgccgaagaccttcgacgccgccgagcgcctggtcagcgactttgccgagctcgatggcgcgcaccaggcggtggtcaccgcccgccgccaggtggaaaccctgctgccggcgcgtgcctactacaacgacctgaaggaaatgcaccgccgtcgcggtgacgacgaagcgctgaagctgggtgtcgacagcttccgcgaaagccgccgccaggcgctgatcgaagcgcgcctgcgcgagatggatgtacgtgatcgcggcctgctgggcgaagaagcccagcgccgcgcggcgctcgacaaccacaccgaacggctggccgaactggaactgcagcgccgccagcagggcggcgaacgcatcgaggaactggaacgcgagcagggccgtgcggaagcggagcgcgatcgccgccaggccaagcgcgaacaggcccgccaggccgcccagcagctgcaggcggaactgcccgacgacgcccatggatttgccgaactggtcgagcgcgcgcagaacgaactgcaggatcgccagcgtgcctcttcggcactggacgatgcgatcagcgagcgcctcggcggcaagcgcgatgacgagcgccgtttcggcgaagtccgtgccgaactcgaagcgatgcagcgcacgccctccaacatcccggcaccgatgcagaagctgcgcgcgcgcctggccgaggaaaccggcattgccgaggcggcgctgccgttcgtcggcgagctgatccaggtccgctcggaagagcagggctggcagggtgcgatcgagcgcgtgctgggcggcttcgcgctgtcgttgctggtcgatgacaagcactacaacgaagttgccgagtgggtgaaccggacccacctcggcatgcgcttcacgtactaccgtgtccgccgcaacgatgaagcgttcgcgcgcgagccgtcggcgaagtcgctgctgcacaagctggaactgcgcgagcacgtgttcgaaagctggctgcgccgcgagctgggcaagcggtttgactacgagtgcgtggatgccaagcagctgcgcaacgtcgaccgcggcattacccgcgaaggccaggtcaagcatccgggtgaccgcttcgaaaaggacgaccgcagcgcggtgggcgaccgccggcgctggatcctcggcttcaacaaccacgacaaggtcggcgccttcgagcgcgaagcccaggaactggccaagcgaatcgccagctgcgagaccgatatcgcgcgcctgcgcggccagcgtgaccgcgacaacgaacgccgcctggcctgccacgaactggtcagcatcagctggaacgagatcgacgtcgccgcaccgcagcagcgcctgaccgatatcgaggccaccctgcgcgacctgcgcgaaggcaacgccgatcttgccaggctggccaagcagatcgacgccgtgcgcgccgacatcgagcaggcccgccgcacgtacgaagacgtccgcgtcgagcgtggccagctggtcagggagcgtgatcgcctcgaccgcgcacgccagcagagccgtgcgctggtgctgccgaccctggcccaggagcaggaggccggcctcgccgagcgcctgcaggagcagggcccgctcagcctggaaacgctcgaagcgcacatgcgccaggtcagcaacgcgctgaacgagcagctgtcgtcctcgcagcaggacctcaaccgcatcgagaaccagctgatcggctgcttccgccgcttcatccagcagtggccggaggaatcgggcgacttcaccgcatcggtggcctcggccgaggacttcctcgcccgcctcgagcggctggagcgcgatggcctgccgcagcacgaggagcgcttcttcgatctgctgcagaaccagagcaagaacaacctgctggccctgcagcggcacagcgcagaggcacgcaagtcgatcggccagcgcctggatgaagtgaacgccagcctggaacaggtaccgttcaaccgcggcacgctgctgaccatcgaactgagcgaccgccgcctgccggaagtggccgagttccatcagcagctgcgcgaagtgctgtcgcagcagcagaccgagcagcgcgagctggccgaatcgcagttcaccgtgctgcgccagctggtcaaccgcctgggctcgcaggaaggcgaggacaagcgctggcgcgaactggtgctggacgtacgcatgcacgtggagttcattggcgtcgagctggatgcggaaacgcgccagcaggtcgagatctaccgcagcggcgcgggcaagtccggtggccagcgccagaagctggccaccacctgcctggccgcggcgctgcgctaccagctcggcggcgccgacagccagctgcccagctatgccgccgtggtactcgacgaagccttcgacaaggccgacaacgagttcaccgcactggcgatgaacatcttcgacaacttcggcttccagatggtggtcgcgaccccgctgaagtcggtgatgacgctggaaccgttcatcggcggcgcctgctttgtcgagatcagcggccgccacgactccggcgtgctgttgatcgagtacgacgacgaaggcaagcgcctgaagctgcccgagcgcagccgccagcaggccaacgaaccggaagaagccgaggcctga

SEQ ID NO: 47477 - DNA, 1470 bp, Stenotrophomonas maltophilia
atgaagcaccgcgaacgcatctcccgttaccgccatctgcgcgaacagccccagtggaagctgcttgccgccgaccacgccccggaaatcatcggcctgctgcaggggctgctgatggacggcgagcgcacgctgccgtcgtcggtgctcaacgagcgcctgcagcgtgcgctggaccagctcaacggcgacgaactgtcgcgtgagctgccgcgtaccgcgcaggcctacatcgcgcactggctggcccagggctggctggaacgccgcctgcccgaaggcgccgaccaggagcagtacgagctgtcgactgcggcactgcaggccatccgcttcgccgatggtcttgagcaggcccgcgtggccgccaccgaaagccgcctggcgctggtcatcgaacagctctcgcagttggccgcgcagaccgagtccgacccggatgcacgcctgtcagcactgcgcgacgagcgcgaccgcatcgacgccgagatcgcccgcgtcggtgccggccgcgtggtcgcgctggatggcaagcgcgcgctggagcgtgcgcgccagatcatcggcctggccgacgagctgaccgaggatttccgtcgcgtgcgcgacgatttcgagcagctcaaccgcgacttccgcgaacgcatcatcgacgacgagggcgagcgcggcgatgtgctgtcgcagctgttcgaaggcgtggatgtgatcggcgagagcgatgccggtcgcagcttccaggccttctggcgcctgctcaacgacgccgaacagagcgcccagctcgatgccgcgctggaagcggtgctggcgcgtggcttcgcccgccgcctggaccgcaatgaacgcaacttcctgcgtggcttcaccagcaccatgctcgagcgcggtggccaggtgcacgacgtgctgcagaatttcgcgcgcagcctgcgtggcttcgtgcagagccgtggctatctggaacagcgccgcctcaaccagctgctgaagcaggcgcagtccgaagcgctggccctgcgcgacgaattccccgcacaacgcggcatcggccgcgacctgcagctgaccaccagccgcctgcgctcgtggtcgcagtggaagctgcacgatccgcgcagcgcccaggtcgatggcaacgtcgagtacaacgacgccgcagccatcagcctggagagcgtcggtgatctggtcgcttcgtctgaaatcgacttccgcaccctgcgccgcgacctgcacgacctgctcgatgcacagccgcggctcagcatcgcccaggcactgtcgcagcgcgaagcaccgcaggggctcggcagcgtcatcggctacctgtcgctgggcacgcgcttcggcaacgtgatcgctggtgagcaggagcttgccgaatggcgtggtggcgacggccaggtccgtcgcgcccgcatcccgctggtttggttcacccaggagagacgccatgagctggcatga

SEQ ID NO: 47478 - DNA, 702 bp, Stenotrophomonas maltophilia
atgagctggcatgaagatcccatcgacgcaccgcaggccgacgtggcggaagacgcctacgaagccgaaccggtggcggccgtggcgcagccccgccgtggcaatgacgtgtattacctcggcgacaccgggcgcctgccgctggatgcacgccgcgcgctgtgccagctgctgatcggccccagcatcgaccagctgcgccacgccaagctgtggccggcactgatccgcagcgaggcggccatccgctcctcgctggcggacctgttcctggaactggtgctcgaccgtgacagcggcgtggccttcacccgccaggccgataccgaagacgtggatgcgccggtgctgctgcgcacctcgccgctgaccttcatcgattcggtgctgctgctgtacctgcgccagcagctggccgaggccgatgcgcgcggcaaccgggcggtggtcgccgacgccgagatggccgaagcgctggccatctacgaaaagaacctgtccaccgaccgcgccggcttcaatcgccgcgtcgcttcggcggtgcagaagatgaaggacaaccacatcctgacccgcctcagcggccaggaagaccgccacgaagtctcgccggcgctgaagctgctgttctccgccgaagacgtatcccagctttcggcggtctaccgccagctgcgtgaaaccccggccgccgaggcctga

SEQ ID NO: 47479 - DNA, 3381 bp, Stenotrophomonas maltophilia
atggctatctccaagcacactcccgccctgttcaacgaaggcctgccggacccgcgcctgcagcagttccgcatgcgtcgcctgcaggtgcacaactggggcacgttcaacggcctgaccgaagtaccgatcgccgagcgtggcttcctgttcgtcggccgttccggctcgggcaagtcgaccctgctcgatgccatgtccgcgctgctgacgccgccggccatcgtcgatttcaacgccgccgcgcgtgaagccgagcgcagtggccgcgaccgcaacctggtgtcctacgtgcgtggcgcgtgggccgaccagcaggacagcggcaccggcgaaatcgccacccagtacctgcgcaagggcgcgacctggactgcgctggtgctggagtaccgcgccggcgatggccgcgtggtcagcctggtgcgcctgctgtggatctccggtaacggaacctcggccggtgacgtgcgcaagcactacatgatcgccgagcgtccgttcgacatcgccaaggatcttggcggcttcgacctggacctgcgcaagctcaagcagaagctgtccgacctgcaccacttcgacaccttctccggctacgccgagcgcttccgcgacctgctcggcatcgacaacgagatggcgctgcgcctgctgcacaagacgcagtcggcgaagaacctgggcgacctcaacgtcttcctgcgcgacttcatgctcgacacgccgaagaccttcgacgccgccgagcgcctggtcagcgacttcgccgaactcgatggcgcgcaccaggccgtggtcaccgcccgccgccaggtggagaccctgctgccggcacgcgcctactacaacgacctgaaggaaatgcaccgccggcgcggcgacgacgaagccctcaagctcggcgtcgacagcttccgtgaaagccgccgccaggcgctgatcgaagcgcgcctgcgcgagatggacgtgcgtgaccgtggcctgctcggggaagaagcccagcgccgtgccgcactggacaaccacaccgagcgcctggccgagctggaactgcagcgccgccagcagggcggtgagcgcatcgaggaactggaacgcgagcagggccgcgccgaagccgagcgtgaccgccgccaagccaagcgcgagcaggcaagcctggccgcgcagcagctgggggctgaacttccggacgacgcacacggcttcgccgagctggtcgagcgtgcgcagaacgaactgcaggaccgccagcgcgcctcctcggcgctggacgatgcgatcagcgatcgcctgggtggcaagcgcgatgacgagcgccgtttcggcgaagtccgtgcggaactcgaagcgatgcagcgcacgccctccaacatcccggcgccgatgcagaagctgcgcgcgcgcctggccgaggaaaccggcattgccgaggcggcgctgccgtttgtcggcgagctgatccaggtccgctcggaagagcagggctggcagggtgccatcgagcgtgtgctgggtggcttcgcgctgtcgctgctggtcgatgacaagcactacaacgacgtcgccgagtgggtgaatcgcactcacctgggcatgcgcttcacctactaccgtgtgcgccgcaacgatgatgcgttcgcgcgcgagccgtcggcgaagtcgctgctgcacaagctggagctgcgcgagcacgtattcgaaagctggctgcgccgtgagctcggcaagcgcttcgactacgagtgcgtggatgccaagcagctgcgcaacgtcgaccgcggcatcacccgagaaggccaggtcaagcatcccggcgaccgcttcgagaaggacgaccgcagtgcggtgggcgaccgccgtcgctggatcctcggcttcaacaaccacgacaaggtgggcgccttcgagcgcgaagcccaggaactggccaagcgcatcgccagctgcgagaccgacatcgcgcgcctgcgtgggcagcgtgaccgcgacaacgaacgtcgcctggcctgccacgagctggtcagcatcagctggaacgagatcgacatcgccgccccgcagcagcgcctgaccgatatcgaggccaccctgcgcgacctgcgcgaaggcaatgccgacctggccaagctggccaagcagatcgacgccgtgcgcgccgacatcgagcaggcccgccgtacctatgaagacgtccgcgtcgagcgcgggcagctggtcaaggagcgcgatcgcctcgaccgcgcgcgacagcagagccgtgcgctggtgttgccgagcctggcccaggagcaggaagccggccttgccgagcgcctgcaggaacagggcccgctcagcctggaaacgctggaggcgcacatgcgccaggtcagcaacgcgctgaacgagcagctgtcgacctcgcagcaggacctcaaccgcatcgagaaccagctgatcggttgcttccgtcgcttcatccagcagtggccggaggaatcgggcgacttcaccgtatcggtggcctcggccgaggatttccttgcccgcctcgagcgcctggagcgcgacggcctgccgcagcacgaagagcgcttcttcgatctgctgcagaaccagagcaagaacaacctgctggccctgcagcgccacagcgccgaggcccgcaagtcgatcggccagcgcctggacgaagtgaacgccagcctggagcaggtgccgttcaaccgtggcacgctgctgaccatcgaactgagcgaccgccgcctgccggaagtcggcgagttccacctgcagctgcgcgaggtgctggcgcagcagcagaccgagcagcgcgagctggccgaatcgcagttcaccgtgctgcgccagctggtcaaccgcctgggttcgcaggaaggcgaggacaagcgctggcgcgagctggtgctggacgtacgcatgcacgtggagttcatcggcgtcgagctggatgcggaaacgcgccagcaggtcgagatctaccgtagtggcgcgggcaagtccggtggccagcgccagaaactggccaccacctgcctggctgcggcactgcgctaccagctcggcggcgccgacagccagctgcccagctacgccgccgtcgtgctcgacgaagccttcgacaaggccgacaacgagttcaccgcgctggcgatgaacatcttcgacaacttcggtttccagatggtggtcgccaccccgctgaagtcggtgatgacgctggagccgttcatcggtggcgcctgcttcgtcgagatcagcggccgccacgactccggcgtgctgctgatcgagtacgacgaagaaggcaagcgcctgaagctgcccgagcgcagccgccagcaggccaacgaaccggaagaagccgaagcctga

SEQ ID NO: 47480 - DNA, 1464 bp, Achromobacter xylosoxidans; identical to SEQ ID NO: 47451

SEQ ID NO: 47481 - DNA, 657 bp, Achromobacter xylosoxidans; identical to SEQ ID NO: 47452

SEQ ID NO: 47482 - DNA, 3453 bp, Achromobacter xylosoxidans; identical to SEQ ID NO: 47453

SEQ ID NO: 47483 - DNA, 1212 bp, Achromobacter xylosoxidans; identical to SEQ ID NO: 47454

SEQ ID NO: 47484 - DNA, 1470 bp, Stenotrophomonas maltophilia
atgaagcatcgcgaacgcatctcccgttaccgccatctgcgcgaacagccccagtggaagctgctcgccgccgaccacgctccggaaatcatcggcctgctgcaggggctgttgatggacggcgagcgcaccctgccttcgtcggtgctcaacgagcgcctgcagcgtgcgctggatcagctcaatagcgacgaactgtcgcgcgagctgccgcgtaccgcgcaggcctacatcgcgcactggctggcccagggctggctggaacgccgcctgcccgagggcgccgaccaggagcagtacgagctgtcgaccgcggcgcttcaggcgatccgctttgccgacggcctcgagcaggcccgtgtggccgccaccgagagccggctggcgctggtcatcgaacagctctcgcagctggccgcgcagaccgaatccgatccggacgcccgcctgtcggcgctgcgcgacgagcgcgaccggatcgacgccgagatcgcccgtgtcggcgccggccgtgtgatcgcgctggacggcaagcgcgcgctggaacgtgcgcgccagatcatcggcctggccgacgagctgaccgaggacttccgccgcgtgcgcgacgacttcgagcagctcaaccgcgagttccgcgaacgcatcatcgacgacgagggcgagcgcggcgatgtgctgtcgcagctgttcgaaggcgtggacgtgattggcgaaagtgatgccgggcgtagcttccaggccttctggcgcctgctcaacgacgccgagcagagcgcccagctcgatgccgcgctggaagcggtgctggcgcgtggcttcgcccgccgcctggaccgcaacgaacgcaacttcctgcgcggcttcaccagcaccatgctcgagcgcggtggccaggtgcacgatgtgctgcagaacttcgcgcgcagcctgcgcggcttcgtgcagagccgtggctatctggaacagcgtcgcctcaaccagctgctcaagcaggcgcagtccgaagcgctcgctctgcgcgacgagttccccgcacaacgcggcatcggccgcgacctgcagctgaccaccagccgcctgcgctcgtggtcgcaatggaaactgcacgatccgcgcagcgcccaggtcgatggcaacgtcgaatacaacgacgcagccgcgatcagcctggaaagcgttggcgatctggtcgcttcgtccgaaatcgacttccgtaccctgcgccgcgacctgcatgacctgctcgatgcacagccgcggctcagcatcgcccaggccctttcgcagcgcgaagcgccgcagggtcttggcagcgtcatcggctacctgtcgctgggcacgcgcttcggcaacgtgatcgccggcgagcaggagcttgcgcaatggcgtggtggcgacggccagatccgtcgcgcccgcatcccgctggtttggttcacccaggagagacgccatgagctggcatga

SEQ ID NO: 47485 - DNA, 702 bp, Stenotrophomonas maltophilia
atgagctggcatgaagatcccatcgacgcaccgcaggccgacgtggcggaagacgcctacgaggccgagccggtggcggccgtggcgcagccccgccgtggcaacgacgtgtactacctcggcgataccgggcgcctgccgctggatgcgcgccgtgcgctgtgccagctgctgatcggccccagcatcgaccagctgcgccacgccaagctgtggccggcgctgatccgcagcgaggcggccatccgctcgtcgctggccgacctgttcctggaactggtgctcgaccgcgacagtggcgtggcgttcacccgccaggccgataccgaagacgtcgatgcgccggtgctgctgcgcacctcgccgctgaccttcatcgactcggtgctgctgctgtacctgcgccagcagctggccgaggccgatgctcgcggcaaccgcgcggtggtcgccgacgccgagatggccgaagcgctggccatctacgaaaagaacctgtccaccgaccgcgccggcttcaaccgtcgcgtcgcatcggcggtgcagaagatgaaggacaaccacatcctgacccgcctcagcggccaggaagaccgccacgaagtctcgccggcgctgaagctgctgttctccgccgaagacgtgtcccagctttcggcggtctaccgccagctgcgtgaaaccccggccgccgaggcctga

SEQ ID NO: 47486 - DNA, 3381 bp, Stenotrophomonas maltophilia
atggctatctccaagcacactcccgccctgttcaacgaaggcctgccggacccgcgcctgcagcagttccgcatgcgccgcctgcaggtgcacaactggggtaccttcaacggcctgaccgaagtaccgatcgccgagcgcggcttcctgttcgtcggccgctccggctcgggcaagtcgaccctgctcgatgccatgtccgcgctgctgacgccaccggccatcgtcgacttcaacgccgctgcacgtgaagccgagcgcagtggccgcgaccgcaacctggtatcctacgtgcgcggcgcgtgggccgaccagcaggacagcggcaccggcgaaatcgccacccagtacctgcgcaagggcgcgacctggaccgcgctggtgctggaataccgcgccggcgatggccgcgtggtcagcctggtgcgcctgctgtggatctccggcaacggcacctcggccggcgatgtgcgcaagcactacatgatcgccgagcgcccgttcgacatcgccaaggacctcggcggcttcgacctggacctgcgcaagctgaagcagaaactgcccgacctgcaccacttcgacacgttctccggctacgccgagcgtttccgcgacctgctcggcatcgacaacgagatggcgctgcgcctgctgcacaagacgcagtcggcgaagaacctgggcgacctcaacgtcttcctgcgcgacttcatgctcgacacgccgaagaccttcgacgccgccgagcgcctggtcagcgacttcgccgagcttgatggcgcgcaccaggcggtggtcactgcccgccgtcaggtggaaaccctgttgccggcgcgcgcctactacaacgatctgaaggaaatgcaccgccgtcgtggcgacgacgaagcgctgaagctcggtgttgacagcttccgcgaaagccggcgccaagcgctgatcgaggcgcgcctgcgcgagatggacgtgcgtgaccgcggcctgcttggcgaagaagcgcagcgccgtgccgcactggacaatcacaccgagcgcctggccgaactggagctgcagcgccgccagcagggcggtgagcgcatcgaggaactggaacgcgagcagggtcgtgccgaagctgagcgcgaccgccgtcaggccaagcgcgagcaggcacgccaggcggcgcagcagctgggggccgaactgccggacgacgcccatggcttcgccgaactggtcgagcgcgcacagaacgagctgcaggaccgccagcgtgcctcctcggcactggacgacgcgatcagtgaccgcctgggcggcaagcgcgatgacgagcgccgcttcggcgaggtccgtgccgaacttgaagcgatgcagcgcacgccctccaacatcccggcgccgatgcagaagctgcgcgcgcgcctggccgaggaaaccggcatcgccgaggcggcactgcccttcgtcggcgaactgatccaggtccgctcggaagagcagggttggcagggtgccatcgagcgcgtgctgggtggcttcgcgctgtcgctgctggtcgacgacaagcattacaacgacgtcgccgaatgggtgaaccgtacccaccttggcatgcgcttcacctactaccgcgtgcgccgcaacgatgatgcattcgcccgtgagccgtcggcgaagtcgctgctgcacaagcttgaactgcgcgagcatgtattcgaaagctggctgcgccgcgagctgggcaagcgcttcgactacgaatgcgtggatgccaagcagctgcgcaacgtcgaccgcggcatcacccgcgaaggccaggtcaagcatcccggcgaccgtttcgagaaggacgaccgcagtgcggtgggcgaccgccgtcgctggatcctcggcttcaacaaccacgacaaggtgggcgccttcgagcgcgaagcacaggaactggccaagcgcatcgccagctgcgagaccgacatcgcgcgcctgcgcgggcagcgtgatcgcgacaacgaacgccgcctggcatgccacgagctggtcagcatcagctggaacgagatcgacatcgccgctccgcagcagcgcctgagcgatatcgaagccaccctgcgcgacctgcgcgaaggcaacgccgatctcgccaagctggccaagcagatcgacgccgtgcgcgccgacatcgagcagtcccgccgcacctatgaagacgtccgcgtcgagcgcggccagctggtcaaggaacgtgatcgccttgaccgcgcgcgccagcagagccgcgcactggtgctgccgagcctggcccaggagcaggaagccggcctcgccgagcgcctgcaggaacaggggccgctcagcctggaaacgctcgaagcgcacatgcgccaggtcagcaacgcgctgaacgagcagttgtcgtcctcgcagcaggacctcaaccgcatcgagaaccagttgatcggctgcttccgtcgcttcatccagcagtggccggaggagtcgggcgacttcaccgtgtcggtggcctcggccgaggacttcctcgcacgcctcgaacggctggaacgcgacggcctgccacagcacgaagagcgcttcttcgacctgctgcagaaccagagcaagaacaacctgctggccctgcagcgccacagcgcagaggcccgcaagtcgatcggccagcgcctggacgaggtgaacgccagcctggagcaggtgccgttcaaccgtggcacgctgctgaccatcgaactgagcgaccgccgcctgccggaggtcgctgagttccacctgcagctgcgcgaggtgctgtcgcagcagcagaccgagcagcgcgagctggccgagtcgcagttcaccgtgctgcgccagctggtcaaccgcctcggctcgcaggaaggcgaggacaagcgctggcgcgagctggtgctggacgtgcgcatgcacgtggagttcatcggcgtcgagctggatgcggaaacgcgccagcaggtcgagatctaccgcagcggcgccggcaaatccggtggccagcgccagaagctggccacgacctgcctggcggctgcgctgcgctaccagctcggcggcgccgacagccagctgcccagctacgccgcggtcgtgctcgacgaggccttcgacaaggccgacaacgagttcaccgcactggcaatgaacatcttcgacaacttcggcttccagatggtggttgccaccccgctgaagtcggtgatgacgctggaaccgttcatcggcggcgcctgcttcgtcgaaatcagcggccgtcacgactccggcgtgctgctgatcgagtacgacgaagagggcaagcgcctgaagctgcccgagcgcagccgccagcaggccaacgaaccggaagaagccgaggcctga

SEQ ID NO: 47487 - DNA, 1470 bp, Stenotrophomonas maltophilia
atgaagcatcgcgaacgcatctcccgctaccgtcacctgcgcgaacagccccaatggaagctgcttgccgccgaccacgcgcccgaaatcatcggtctgctgcagagcctgctgatggacggcgaacgcaccttgccgtcctcggtgctcaacgagcgcctgcagcgcgcgctggaccagctcaatggggacgaactggcccgtgacctgccgcgcacggcgcaggcctacatcgcacactggctgtcccagggctggctggagcggcggttgcccgagggtgccgaccaggagcagtacgaactgtcgacccaggccctgcaggcgatccgcttcgccgacagcctcgagcaggcgcgcgtggccgccaccgagagccgcctggcactggtcatcgaacagctctcgcagctggctgcacagaccgaatccgaccccgacgcacgcctgtctgcgctgcgcgacgagcgcgaccgcatcgacgccgagatcgcgcgggtcagcgccggtcgtgtggtcgccctggacggcaagcgtgcactggagcgcgcccgccagatcatcggtctcgccgacgagctgaccgaagacttccgccgggtgcgcgacggcttcgagcagctcaaccgggagttccgcgagcgcatcatcgatgacgaaggcgaacgtggcgatgtgctgtcgcagctgttcgagggtgtggacgtgatcggcgaaagcgatgccggccgcagcttccaggcattctggcgcctgctcaatgatgccgagcagagcgcgcagctcgatgccgcgctggaagccgtgctggcacgcggctttgcacgccgcctggatcgcaacgagcgcaacttcctgcgcagcttcaccagcaccatgcttgaacgcggcggccaggtacacgatgtcctgcagaatttcgcgcgcagcctgcgtggcttcgtgcagagccgcggctatcttgaacagcgtcgcctcaatcagctgctgaagcaggcccagtccgaagcgctggctctgcgcgacgagttcccggcccagcgcacgatcggtcgtgacctgcagttgacgaccagccggctgcgttcgtggtcgcagtggaagctgcacgacccccgcagcgcccaggtcgatggcaatgtcgagtacaacgacgcggccagcatcagcctggagagcgtcggtgatctggtggcctcgtccgaaatcgatttccgcaccctgcgccgcgacctgcacgacctgctcgatgcacagccgcggctcagcatcgcccaggcgctgtcgcagcgcgaagcgccgcagggcctgggcagcgtcatcggctacctgtcgctgggcacgcgcttcggcagcgtagtcgctggcgaacaggagctcgccgaatggcgtggcggcgacggccaactgcgccgcgcacgcatcccgctggtttggttcacccaggagagacgccatgagctggcatga

SEQ ID NO: 47488 - DNA, 702 bp, Stenotrophomonas maltophilia
atgagctggcatgaagaccccatcgaagcaccgtctgccgaccaggccgaggacgcctacgaggccgagccggcgatgctcgaagcgcagccacggcgcggcaacagcgtgtactacctgggtgataccggccgcctgccgctggatgcccggcgcgcgctgtgccagctgctgatcggtcccagcatcgaccagctgcgccacgccaagctgtggccggcactggtgcgcagcgaggcgggcatccgttcagcgctgtccgacctgttcctggaactggtgctcgaccgcgaaagcggtgtggcattcacccgccaggccgacaccgaagacgtcgatgcaccggtactgctgcggacctcgccgctgaccttcatcgactcggtgctgttgttgttcctgcgccagcagctggctgaggccgacgcgcgcggcaaccgcgcggtggtcgccgacgccgagatggccgaagcactggccatctacgagaagaacctgtccaccgaccgcgccggcttcaatcgccgcgttgcatcggccgtgcagaaaatgaaggacaaccacatcctgacccgtctgagcggccaggacgaccgccacgaagtctcgccggcgctgaagctgctgttctccgccgaagacgtgtcccagctttcggcagtgtaccgccagctgcgcgaaaccccggccgccgaagcctga

SEQ ID NO: 47489 - DNA, 3381 bp, Stenotrophomonas maltophilia
atggccatttccaagcacacccccgccctgttcaatgaaggcctgccggacccccgcctgcagcagttccgcatgcgccgcctgcaggtgcacaactggggcaccttcaacggcctgaccgaagtaccgatcgccgagcgcggcttcctgttcgtcggccgttccggctcgggcaagtcgaccctgctcgatgccatgtccgcgctgctgacgccgccggccatcgtcgacttcaacgcggctgcacgcgaagccgagcgcagtggccgcgaccgcaacctggtgtcctacgtgcgtggcgcgtgggccgaccagcaggacagtggcaccggcgagattgccacccagtacctgcgcaagggtgcgacctggaccgcactggtgctggagtaccgcgccggcgacggccgcgtggtcagcctggtgcgcctgttgtggatctccggcaacggcacctcggccggcgacgtgcgcaagcactacatgatcgccgagcgtccgttcgacatcgccaaggatctgggcggcttcgatctggacctgcgcaagctcaagcagaagctggccgacgtccaccacttcgacaccttctccggctatgccgagcgcttccgcgacctgctcggcatcgacaacgagatggcgctgcgcctgctgcacaagacgcaatcagcgaagaacctgggtgatctcaacgtcttcctgcgcgacttcatgctcgacacgccgaagacgttcgacgccgccgagcgcctggtgagtgatttcgccgagcttgacggggcccatcaggcggtggtcaccgcccgtcgccaggtggagacgctgttgccggcgcgcgcctattacgccgatctgaaggaaatgcaccggcagcgcggtgacgacgaggcgctcaagctgggcgtcgacagtttccgcgagagccgccgtcaggcgctgatcgaagcgcgcctgcgcgagatggacgtgcgtgaccgtggcctgctcggggaagaggcgcagcgccgcgctgcgctggacaaccacagcgaacgcctggccgagctggaactgcagcggcgtcagcagggcggcgagcgcatcgaagagctggagcgcgagcagggccgcgccgaagccgagcgcgatcgccgcaaggccaagcgcgaccaggcgcaggaagccgcacggaaactgcaggccgaactgcccgacgatgcccatggcttcgccgaactggtcgagcgtgcgcagaacgaactgcaggatcgccagcgcgcttcggcctcgatggacgatgccatcagcgagcgcctcggtggcaagcgcgatgacgagcgtcgcttcgctgaagtacgcctcgaacttgacgcgatgcagcgcacgccctccaacattccggcgccgatgcagaagctgcgtgcacggttggcggaagagaccggcatttccgaagtggcgttgccgttcgtcggcgagctgatccaggtccgctccgaggaacagggctggcagggtgcgatcgaacgcgtgctgggtggcttcgcgctgtcgctgctggttgacgacaagcactacaacgcggttgccgactgggtgaaccgcacccacctcggcatgcgcttcacctactaccgcgtgcgccgcaacgacgaggcgttcgcccgcgaaccatcggcgaagtcgctgctgcacaagctggagctgcgcgaccacgtgttcgagagctggctgcggcgtgagctgggcaagcgattcgactacgaatgcgtggatgccagacagctgcgcaacgtcgaccgcggcatcacccgcgaaggccaggtcaagcatccgggcgaccgcttcgagaaggacgaccgcagtgccgtgggcgatcgccgtcgctggattctcggcttcaacaatcacgacaaggtcggtgcgttcgaacgtgaggcgcaggaactggccaagcgcatcgccagctgcgagaccgatatcgcgagcctgcgtggccagcgcgatcgtgacaacgagcgccgcctggcctgccacgagctcgcgggtatccaatggaacgagatcgacgtcgccgcgccccagcagcgcctgaccgacatcgaagccagcttgcgcgacctgcgcgaaggcaatgccgacctggccaggctggcacagcagatcgacgccgtgcgcgccgacatcgagcaggcccgccgcacctatgaggatgtccgcgtcgagcgcggccagctggtccgggaacgtgaccgcctcgaccgcgcgcgccagcagagccgcgcgctggtgttgccaacgctggccgaagcgcaggagagcggcctggcagagcggttgcagcaacagggcccgctcagcctggaaacgctggaagcgcacatgcgccaggtcagcaacgcgctgaacgaacagttgtcgtcctcgcagcaggacctcaaccgtatcgaaaaccagctggtcggctgcttccgccgcttcatccagcagtggccggaagaatccggcgacttcaccgcatcggtggcgtctgccgaggacttcctcgcccgcctcgaccgtctcgaacgcgatggcctgccgcagcatgaggaacgcttcttcgatctgctgcagaaccagagcaagaacaacctgctggccctgcagcgccacagcgccgaggcccgcaagtcgatcggccagcgcctggacgaagtcaacgccagcctggagcaggtgccgttcaaccggggcaccctgctgaccatcgaattgagcgaccgccggctgccggaagtgctggagttccagctgcagctgcgcgaagtgctgtcgcagcagcagaccgagcagcgtgaactggcggagtcacagttcaccgtgctgcgccagctggtcaaccgcctgggatcgcaggaaggtgaggacaagcgctggcgcgagctggttttggacgtgcgcatgcacgtggagttcatcggcgtcgaactcgatgcggaaacgcgccagcaggtcgaaatctaccgcagcggcgccggcaagtccggtggccagcggcagaagctcgccaccacctgcctggccgcagcgttgcgttaccagctcggcggcgctgacagccagctgcccagttacgcggcggtcgtgctcgacgaggccttcgacaaggccgacaacgagttcaccgcgctggcgatgaacatcttcgacaacttcggtttccagatggtggtcgccacgccgctgaagtcggtgatgacgctggagcctttcatcggtggtgcctgcttcgtcgagatcagtggccgccacgattcgggcgtgctgctgatcgagtacgacgaagaaggaaggcgcctgaagctgcccgagcgcagccgccagcaggccaatgaaccggaggaagccgaagcctga

SEQ ID NO: 47490 - DNA, 1470 bp, Stenotrophomonas maltophilia
atgaagcatcgcgaacgcatctcccgttaccgtcatctgcgcgaacagccccaatggaagctgctcgccgctgaccacgccccggaaatcatcggcctgctgcaggggctgctgatggacggcgagcgcacgctgtcgtcgtcggtgctcaacgagcgcctgcaacgcgcgctggaccagctcaacggcgacgaactgtcgcgcgacctgccgcgtaccgcgcaggcctacatcgcgcactggctggcccagggctggctggaacgccgcctgcccgagggcgccgaccaggagcagtacgagctgtccaccgcggcactgcaggcgatccgtttcgccgatggcctcgagcaggcccgcgtggccgccactgaaagtcgcctggcgctggtcatcgaacagctctcgcagctggccgcgcagaccgaatccgatccggacgcgcgcctgtcggcgctgcgcgacgagcgtgaccgcatcgacgccgagatcgcccgcgttggtgccggccgtgtgatcgcgctggatggcaagcgcgcgctggagcgtgcccgccagatcatcggcctggccgacgaactgaccgaagacttccgccgcgtgcgcgacgacttcgagcagctcaaccgcgatttccgcgaacgcatcatcgatgatgaaggcgaacgtggcgacgtgctgtcgcagctgttcgagggcgtggacgtgatcggcgagagcgatgccgggcgcagtttccaggccttctggcgcctgctcaacgacgccgaacagagcgcccagctcgatgccgcgctggaagcagtgctggcacgcggcttcgcgcgccgcctggaccgcaacgaacgcaacttcctgcgtggcttcaccagcaccatgctggaacgcggcggccaggtgcacgatgtgctgcagaacttcgcgcgcagcctgcgcggcttcgtgcagagccgtggctacctggaacagcgccgcctcaaccagctgctgaagcaggcgcagtccgaagcgctggcgctgcgcgacgagttccccgcacagcgcggcatcggccgtgacctgcagctgaccaccagccgcctgcgctcgtggtcgcagtggaagctgcatgatccgcgcagtgcccaggtcgatggcaacgtcgagtacaacgacgccgccgcgatcagcctggagagcgtcggcgacctggtcgcttcgtccgaaatcgacttccgcaccctgcgccgcgacctgcacgacctgctcgatgcacagccgcggctgagcatcgcccaggccctgtcgcagcgcgaggcgccgcagggtcttggcagtgtcatcggctacctctcgctgggcacgcgcttcggcaacgtggtcgccggcgagcaggagcttgcgcaatggcgtggtggcgacggccaggtccgtcgcgcccgcatcccgctggtttggttcacccaggagagacgccatgagctggcatga

SEQ ID NO: 47491 - DNA, 702 bp, Stenotrophomonas maltophilia
atgagctggcatgaagatccgatcgacgcaccgcaggccgacgtggcggaagacgcctacgaggccgagccggtggcgagcgtggcgcagccccgccgtggcaacgacgtgtactacctgggcgacaccgggcgcctgccgctggatgcgcgccgcgcgctgtgccagctgctgatcggccccagcatcgaccagctgcgccacgccaagctgtggccggcgctgatccgcagtgaagccgccattcgctccgcgctggccgatctgttcctggaactggtgctggaccgcgacagcggcgtggccttcacacgccaggccgacaccgaagacgttgatgcaccggtactgctgcgcacctcgccgctgaccttcatcgactcggtgctgctgctgtacctgcgccagcagctggccgaggccgacgcgcgcggcaaccgcgcggtggtcgccgacgccgagatggccgaagcgctggccatctacgaaaagaacctgtccaccgaccgcgccggcttcaatcgccgcgtcgcctcggcggtgcagaagatgaaggacaaccacatcctgacccgcctcagcggccaggaagaccgccacgaagtctcgccggcgctgaagctgctgttctccgccgaagacgtgtcccagctttcggcggtctaccgccagctgcgcgaaaccccggccgccgaggcctga

SEQ ID NO: 47492 - DNA, 3381 bp, Stenotrophomonas maltophilia
atggctatctccaagcacactcccgccctgttcaacgaaggcctgccggacccgcgcctgcagcagttccgcatgcgccgcctgcaggtgcacaactggggcaccttcaacggcctgaccgaggtaccgatcgccgagcgcggcttcctgttcgtcggccgctccggctcgggcaagtcgaccctgctcgatgccatgtccgcgctgctgacgccgccggccatcgtcgacttcaacgccgccgcgcgtgaagccgagcgcagtggccgcgaccgcaacctggtgtcctacgtgcgtggcgcgtgggccgaccagcaggacagcggcaccggcgaaatcgccactcagtacctgcgcaagggcgcgacctggaccgcgctggtgctggagtaccgcgccggcgatggccgcgtggtcagcctggtgcgcctgctgtggatctccggcaacggcacctcggccggcgacgtgcgcaagcactacatgatcgccgagcgtccgttcgacatcgccaaggatctcggtgggttcgacctggacctgcgcaagctcaagcagaagctgtccgacctgcaccacttcgacaccttctccggctacgccgagcgcttccgcgacctgctcggcatcgacaacgagatggcactgcgcctgctgcacaagacgcagtcggcgaagaacctgggcgacctcaacgtcttcctgcgcgacttcatgctcgacacgccgaagaccttcgacgccgccgagcgcctggtcagcgactttgccgagctcgatggcgcgcaccaggcggtggtcaccgcccgccgccaggtggaaaccctgctgccggcgcgcgcctactacaacgatctgaaggaaatgcaccgccagcgcggcgacgacgaagcgctgaagcttggcgtcgacagcttccgtgaaagccgccgccaggcgctgatcgaagcgcgcctgcgcgaaatggatgtgcgtgaccgtggcctgctgggcgaggaagcccagcgccgcgccgcgctggacaaccacaccgagcgcctggccgaactggaactgcagcgccgccagcagggcggtgagcgcatcgaggaactggaacgcgagcagggccgtgccgaagccgagcgtgaccgccgccaggccaagcgtgaccaggcccaggaagcggctcagcaattgcaggccgaactgcccggcgatgcccacggtttcgcagagctggtcgagcgtgcgcagaacgaactgcaggaccgccagcgtgcctcggcggcactggatgatgcgatcagcgatcgcctcggtggcaagcgcgatgacgagcgccgcttcggcgaagtgcgcagcgagctggaggcgatgcagcgcacgccgtccaacatcccggcgccgatgcagaagctgcgcgcgcgcctggccgaggaaaccggcattgccgaagcggcgctgccgttcgtcggcgagctgattcaggtccgctcggaagagcagggctggcagggcgccatcgagcgcgtgctgggcggcttcgcgctgtcgctgctggtcgatgacaagcactacaacgacgtcgccgagtgggtgaaccgtacccacctgggcatgcgcttcacctactaccgcgtgcgccgcaacgatgatgcgtttgctcgagagccgtcggcgaagtcgctgctgcacaagctggaactgcgcgagcacgtgttcgaaagctggctgcgccgcgagctgggcaagcgcttcgactacgaatgcgtggacgccaagcagctgcgcaacgtcgaccgcggcatcacccgcgaaggccaggtcaagcatccgggcgatcgtttcgagaaggacgatcgcagcgccgtcggcgatcgccgccgctggatcctcggcttcaacaaccacgacaaggtgggtgccttcgagcgtgaagcccaggaactggccaagcgcatcgccagctgcgaaaccgatatcgcgcgcctgcgcggccagcgtgaccgcgacaacgagcgtcgcctggcctgccacgaactggtgagcatcagctggaacgagatcgacatcgccgccccgcagcagcgcctgagcgatatcgaggccaccctgcgcgacctgcgcgaaggcaacgccgacctcgccaagctggccaagcagatcgacgccgtgcgcgccgacatcgagcagtcccgccgtacctatgaagacgtccgcgtcgagcgtggccagctggtaaaggaacgtgaccgcctcgaccgcgcgcgccagcagagccgtgcactggtgctgccgagcctggctcaggagcaggaggccggcctggccgagcgcctgcaggagcagggcccgctcagcctggaaacgctggaagcgcacatgcgccaggtcagcaatgcgctgaatgaacagttgtcgtcgtcgcagcaggacctgaaccgcatcgagaaccagctgatcggctgcttccgtcgcttcatccagcagtggccggaggagtcgggtgacttcaccgtgtcggtggcctcggccgaggatttcctcgcccgtctcgaacgcctggagcgtgatggacttccgcagcacgaggaacgcttcttcgacctgctgcagaaccagagcaagaacaacctgctggccctgcagcggcacagtgcagaggcccgcaagtcgatcggccagcgcctggacgaagtgaatgccagcctggaacaggtgccgttcaaccgcggcacgctgctgaccatcgagctgagcgaccgccgcctgccggaagtcggcgagttccacctgcagctgcgcgaagtgctgtcgcaacagcagaccgagcagcgcgagctggccgaatcgcagttcaccgtgctgcgccagctggtcaaccgcctgggctcgcaggaaggcgaggacaagcgctggcgcgagctggtgctggacgtgcgcatgcacgtggagttcatcggcgtcgaactggatgcggaaacgcgccagcaggtcgagatctaccgcagcggcgccggcaagtccggtggccagcgccagaaactggccaccacctgcctggccgcagcactgcgctaccagctcggcggcgccgacagccagctgccgagctacgccgcggtggtgctcgacgaggccttcgacaaggccgacaacgagttcaccgcactggcgatgaacatcttcgacaatttcggcttccagatggtggtggctaccccgctgaagtcggtgatgacgctggaaccgttcatcggtggcgcctgcttcgtcgagatcagcggtcgccacgactccggcgtgttgctgatcgagtacgacgaagaaggcaagcggctgaagctgccggagcgcagccgccagcaggccaacgaaccggaagaagccgaggcctga

SEQ ID NO: 47493 - DNA, 1437 bp, Pseudomonas stutzeri; identical to SEQ ID NO: 41737

SEQ ID NO: 47494 - DNA, 591 bp, Pseudomonas stutzeri; identical to SEQ ID NO: 41738

SEQ ID NO: 47495 - DNA, 3384 bp, Pseudomonas stutzeri; identical to SEQ ID NO: 41739

SEQ ID NO: 47496 - DNA, 1185 bp, Pseudomonas stutzeri; identical to SEQ ID NO: 41740

SEQ ID NO: 47497 - DNA, 1473 bp, Xanthomonas campestris
atgaaacaccgtgcccgtatcgcccgctatcgcgtcctgcgcgagcagccgctgtggaaactgctggcggccgatcagtcgccggaagtgatcggcctgctgcagacgttgttgctcgacagcgagcgcggtttgcctgcggcggtcctgcatgaacgcctgcagcgcatgcttgacgatctcaatatcgatcagctctcgcgcgagctgccgcgcactgcgcaggcctatgtagcgcactggctggcgcagggctggctggaacggcgcctgcccgagggcgcgcagcaggagcagtacgagttgtctacccaggcgatgcaggcgattcgctttgccgatggtctggagcaggcgcgtggtgccgcgaccgagagccggcttgcgctggtgatgcagcagttgtcgcagttggccgcgttgaccgaaaccaatcccgatgcacggctgtcggcgctgcgcgacgagcgtgatcgcattgatgcggagatcgcgcgggtggctgccggcaaggtcgcctcgttggatggcaaacgcgcgctggaacgtgcgcggcaggtgatcgcgctggccgacgagctgaccgaggattttcgccgggtacgcgacgatttcgagcagctcaatcgccagttccgtgagcgcatcatcgacgacgagggcgagcgtggcgaggtgttgacgcggctgttcgagggcgtggacgtgatcggcgacagcgaggccggacgcagttttcaagcgttctgggcgctgctcaacgatgccgaacaaagcgcgcagctggatgcggcgctggagacggtgttggcgcgggcgttcgcacgcaagctcgaccgccgcgagcgcagcttcctgcgcggcttgaccggcaccatgctcgaacgcggcggtcaggtgcacgatgtgatgcagcatttcgcccgcagcctgcgcggcttcgtccaaagccgtggctatctggaacaacgccggctcaatcaattgctcaagcaggcacaggccgaggcgttggggctgcgcgagcatctgcgtgcgcagcgctcggtcgggcacgacctcaacctgaccaccagccgcttacgctcgctgtcgcaatggcgtctgcacgatccgcgtcagacccaggtcgatggcagcatccagcgcaacgacgcagcggcgatctcgctggacagcgtcggcgatctggtcgcgcagtcggaaatcgacttccgcagcctgcgccgcgatctgtacgaactgctcggcgaacacgcacagctgtccatcgcgcaggtgctggcgcaacggcaggcagagcaggggctcggcagtgtgatcggctacctgtcgctgggcacgcggcatgggcaggtggatgcgcaacgcagcgagatcgcgcgatggcgtggcggcgatggccagtggcgcggcgcacgtattccgttagtgtggttcagccaggagaaacgcaatgaattggcaggctga

SEQ ID NO: 47498 - DNA, 699 bp, Xanthomonas campestris
atgaattggcaggctgacaacgccgaaaccgacgcgcacgcgccgagcgcccacgccgatgcggctgcgcccgaggcggacgccgcgacaggcctgtttcccggcgatagcggtgcgttgccggtggatgcgcggcgcgtgctgtgccaattgctcgccggccccagcgtggacgtgcagcgccacagcaagttgtggccagcgttgctgcgccatgaagcggccgtgcgcagccgcctggccgatctgttcctggaattggtgctcgaccgcgacgccggcgtcgccttcacccgccaggccgacaccggcgagctcgaagcgccggtgctgctgcgctctctgccgctgaccttcatcgattcggtgttgctgctgcatctgcgtcagcaactggccgaagccgatgcgcggggcgtgcgtgcggtggtcgaagatgcgccgttgagcgaagccctggccgtctacgagaagaatctgtccaccgaccgtgccggcttcatgcgtcgggttggcaacgccattcagaagatgaaggacaaccacgtgctcacgcgcctgcgtggcgaagacaaccgctacgaggtttcgcccacgctcaagctgctgttctcggccgaggatgtgtccgcgctggcgcagatctatcgccagctgcgcgagcagcccggcaccgtaggcgatgcagagcgcgcctga

SEQ ID NO: 47499 - DNA, 3432 bp, Xanthomonas campestris
atgaaatcttcttcctccagcctgtttgccgacgatctgcccgacccgcgcgtgcagcagttccgcatgcgccgcctgcaggtccataactggggcacgttcaacggcttgaccgacgtgccgatcgccgcgaagggcttcttgttcgtcggccgttccggttcgggcaaatccacgctgctggatgccatgtccgctctgttgaccccgcccaatctggtcgacttcaatgccgccgcgcgcgaggccgagcgcactggccgcgatcgcaacctggtgtcgtatgtgcgcggcgcctgggccgaccagcaggacagcgcctccggcgaaatcgccacgcaatatctgcgcaagggcagcacctggaccgcgctggtgctggaataccgcaacggcgagggacgggtgatcagcctgatacggctgttctggatcgccggcagcggtgcggcggcagccgacgtgcgcaagcattacatggtggccgagcgcagtttcgatatcgccagcgaactggtcggcttcgatctggatttgcgcaagctcaaggcgcgtctgggcgacgacatcgcccacttcgacaatttctccggctatgccgagcgcttacgccatcagttgggcatcgccaacgagatggcgttacggctgctgcacaaaacccagtccgcgaagaatctcggcgatctcaatgtgttcctgcgcggcttcatgctcgaggcgcccaagaccttcgacgccagcgagcggctggtgggcgacttcgccgaactcgatggagcgcatcgggcggtggtcaccgcacggcggcaggtcgaaacgctgctgccggcgcgtgcgcattacgacgacttgcagtcggtgcaacgtcagcgcgggcgcttgcaggaactcaagctcggcctggacccctatcgcgagcaacgccggcttgcgttgctggatgcgcgcctgcatgcactggacgtcaacgaccggggcctggccggcgaggagggccaacgccgcgctgcagtggataaccaccaacaacgcttgtccgatctggaggcccagcgccgcagccagggcggcgaacggatcgacgcgctggaacgcgagcagctccaggtccagggcgaacttgcacgccgcagcgacaagcgtgccaaggccgaacaggcctgccgccagctcgaccagagcttggccgacaacgcgcatggatttgccgagcagtccgcgcaggcgcgcgccgcgctcgaggacgggcagcggctggccgccgaacaggacgaggcgatcggcgagcgtatcgccggcaagcgcgaggacacccagcgctttgcgcaggtgcgcgccgagatcgaggcgctcacccgcaatccctccaacattgctgcgccgatgcagggcctgcgtgcacgtctgagcgaagaaaccggcattcccgaggccgcgctgcccttcgtcggcgaactgatccaggtgcgtgaggaagatgccgcctggcgcggtgccatcgagcgcgtgctgcatagttttgcgcaatcgctgctggtggacgagcgccattaccccgaactggccgagtgggtcaaccgcacgcatctgggctcgcgcctggtctactaccgggtgcgcaataacgaacaggcgtttgccggccgcgaacccggcagcgcctcgctgctgcacaagctgcaattgcgcgagcatccctttgccggctggctgcggcgcgaactgggcaagcgtttcgactacgactgcctggagagcgccaaggccttgcgcacggcagagcgcgcgatcacccgcgaaggccaggtcaagcatcccggcgaacgctacgaaaaggacgaccgtcatgcggtcggcgaccgtcggcgctggctgctgggcttcgacaaccgcgacaagctggcactgtacgagcgcgaagccattgaactggcacaacgcatcgccgcctgcgatgccgacgtggccgagctgcgtgcgcgccgcgaacgcgatgccagccggcgcctggcccagcacaccctggccaacctggcctgggaggaaatcgacgtcgccgcccagctgcaacgccgcgacgatatcgccagcgccttgcgccagctgcgcgaaggcgatgccaacctgcgcgcgctgggcgaggcgatcgagcgcacgcgcggcgacctggaacaggccaagcgcacgttcgacggtgtgcgcgaggaacggatcgcgctgggggtcgagcgcacgcgcctggaaaagcaacgcctgcactgcgccgacgccgatgcccgggtggtcacgccgctgcagcgcgaggggctggaggagcgcctggccaacctgggcgcgcttagcctggacaatctcgaagcgcattttcgccagatcggcaacgccatcgccgagcagaccagcgccagcgacagcgagcacaatcggctcgaacagttgctgctcggctgctttcgccggtatagccaacagtggcccgaagacagtggcgacttcatcatcagcctggccggcgccgaggattttcttgcccgcctgcagcgtctggaacgcgatggcctgccgcagcacgaagcgcgctttttcgagctgttgcagagccagagcaagaacaatctgctcgccttgcagcgccacaccgccgaagcacgcaaatcgatcgcccaacgcctggacgaggtcaacgccagcctggagcaggtgccgttcaaccatggcaccttgctgaccatcgaactcagcgatcggcgtctgccggaggtgatcgacttccatcaacgtctgcgcgacgtgctcggtcaccaccagaccgaacagcgtgacgtggccgaacagcaatttgccgtgctgcgcgaactggtgcgtaagctcggctcggccgatggcgaggacaagcgctggcgcgagctggtgctggatgtgcgcctgcatgtggagttcgtcggtgtcgagctggatgcggccacccgccagcaggtggagatctaccgcagcggcgccggcaagtccggcggccagcggcagaaactggcaaccacctgcctggccgccgcgctgcggtatcaacttggcggcgaagacggcgaattgccgcgctacgcggccgtggtactggacgaagccttcgacaaggccgacaacgaattcaccgccttggcgatgaacatcttcgagaatttcggcttccagatggtggtggccacgccgctcaagtcggtgatgacgctggagccgtttatcggcggtgcctgctttgtcgaaatcagcggccgtcacgactcgggtgtattgctgatcgaatacgacgaacaggcacgccggctcaagttacccgagcgctcgcgcagcgcggccgccgccggtgcggcgcgcgcgaccgagccgtccgccgacgccgtcggcggagcgagcgtcgatgaactgcactga

SEQ ID NO: 47500 - DNA, 1182 bp, Xanthomonas campestris
atggccgccgccgcgcccatgatgttgcctgccgctgcgctgctggccttgcgcgggcagtggcagcgcgcacgcgggcagtggctgatcggcgagggcgcaccgcaggcgatcgggttgcgggcgccgacccaggcacaggccatcgcgcggttcgatgccttcggtgcgtggttgcaggagtggagccgcacaggcctgccggggcgggtggagtatcgcgcggtgagctggacgcagctggggccgcagcgcctgccgcagacctgggtgctggacgatgcgggccaggccgccggcgcgcttggcgagggcgagcgctgggcgcgtgcccgccaacgcagcgctgccttgcaggcgcgctggccgcaggcggtcgcgctggcggcgcggctacgccgtcaattcgatctgctggccgactggccggaggccgagttcgcacgcttggtggcggtggtggagtggctgcaccagcatcgcgacagtggactgttcctgcgccagcttcccatcgccggcatcgacagcaaatggatcgaaccgcatcgcggcgtcatcgccgactggcttgccggcctgcgcggcatcgccgagccgcgcagctttgccagcctgtccggcctgcgcaacgcgccggatcgggtgcgcttgcgattgctcgacccggccctgcgccaccacctcggcggcctggaggacatcaccgcaccgatcgcgcagatcgccgcgctgcgtctgcctgcgcgccgcgtgctgatcgtggaaaaccgcgaaaccggtctggcctgcgaatcgctgccgggcacgctggtgctgatggcgcgcgggtacgccatcgaatacgtgagcaatatcgcgtggctgcgcgggttgccgctgtactactggggcgacatcgacacccacggcctggcgatcctgcaccgcctgcgcacgcacgctccgcacaccaccgcggtgttgatgaatgaggccaccctgcaggccactccgcgcgcgttgtgggggcacgaacgcaggccgcaccgcgcccaacgcctggctgcgctcagcatccaggagcagcgcctgtatgcagacctgcgcggcggccggttcggtccgtcgccgcgcctggagcaggaacgtatcgcctgggactatgcctggccgcgcatccaggccgcattggcggactga

SEQ ID NO: 47501 - DNA, 1473 bp, Xanthomonas oryzae
atgaaacaccgtgcccgtatcgcccgctatcgcgccctgcgcgagcagccgctgtggaaactgctggcggccgatcagtcgccggaagtgatcggcctgctgcagacgttgttgctcgacagcgagcgcggtttgcctgcggcggtcctgcatgaacgcctgcagcgcatgcttgacgatctcaatgtcgatcagctctcgcgcgagctgccgcgcactgcgcaggcctatgtagcgcactggctggcgcagggctggctggaacggcgcctacccgagggcgcgcagcaggagcagtacgagttgtctacccaggcgatgcaggcgattcgctttgccgatggtctggagcaggcgcgtggtgccgcgaccgagagcaggcttgcgctggtgatgcagcagttgtcgcagttggccgcgttgaccgaaaccaatcccgatgcgcggctgtcggcgctgcgcgacgagcgtgatcgcatcgatgcggagatcgcgcgggtggctgccggcaaggtcgcctcgttggatggcaaacgcgcgctggaacgtgcgcggcaggtgatcgcgctggccgacgagctgaccgaggattttcgccgggtacgcgacgatttcgagcagctcaatcgccagttccgtgagcgcatcatcgacgacgagggcgagcgtggcgaggtgttgacgcggctgttcgagggcgtggacgtgatcggcgacagcgaggcaggacgcagttttcaagcgttctgggcgctgctcaacgatgccgaacaaagcgcgcagctggatgcggcgctggagacggtgttggcgcgggcgttcgcacgcaagctcgatcgccgcgagcgcagcttcctgcgcggcttgaccggcaccatgctcgaacgcggcggtcaggtgcacgatgtgatgcagcatttcgcccgcagcctgcgcggcttcgtccaaagccgtggctatctggaacaacgccggctcaatcaattgctcaagcaggcgcaggccgaggcgttggggctgcgcgagcatctgcgtgcgcagcgctcggtcgggcacgacctcaacctgaccaccagccgcttacgctcgctgtcgcaatggcgtctgcacgatccgcgtcagacccaggtcgatggcagcatccagcgcaacgacgcagcggcgatctcgctggacagcgtcggcgatctggtcgcgcagtcggaaatcgacttccgcagtctgcgccgcgatctctacgaactgctgggagaacacgcacagctgtccatcgcgcaggtgctggcgcagcggcaggcagagcaggggctcggcagtgtgatcggctacctgtcgctgggcacgcggcatgggcaggtggatgcgcaacgcagcgagatcgcgcggtggcgtggcggcgatggccagtggcgcggcgcacgtattccgttagtgtggttcagccaggagaaacgcaatgaattggcaggctga

SEQ ID NO: 47502 - DNA, 699 bp, Xanthomonas oryzae
atgaattggcaggctgacaacgccgaaaccgacgcgcacgcgccgagcgcccacgccgatgcggctgcgcccgaggcggacgccgcgacaggcctgtttcccggcgatagcggtgcgttgccggtggatgcgcggcgcgtgctgtgccaattgctcgccggccccagcgtggacgtgcagcgccacagcaagttgtggccagcgttgctgcgccacgaagcggccgtgcgcagccgcctggccgatctcttcctggaattggtgctcgaccgcgacgtcggcgtcgccttcacccgccaggccgacaccggcgagctcgaagcgccggtgctgctgcgctctctgccgctgaccttcatcgattcggtgttgctgctgcatctgcgtcagcaactggccgaagccgatgcgcggggcgtgcgtgcggtggtcgaagatgcgccgttgagcgaggccctggccgtctacgagaagaatctgtccaccgaccgtgccggcttcatgcgtcgggttggcaacgccattcagaagatgaaggacaaccacgtgctcacgcgtctgcgtggcgaagacaaccgctacgaggtttcgcccacgctcaagctgctgttctcggccgaggatgtgtccgcgctggcgcagatctatcgccagctgcgcgagcagccaggtaccgtaggcgatgcagagcgcgcctga

SEQ ID NO: 47503 - DNA, 3432 bp, Xanthomonas oryzae
atgaaatcttcttcctccagcctgtttgccgacgatctgcccgacccgcgcgtgcagcagttccgcatgcgccgcctgcaggtccataactggggcacgttcaacggcttgaccgacgtgccgatcgccgcgaagggcttcttgttcgtcggccgttccggttcgggcaaatccacgctgctggatgccatgtccgctctgttgaccccacccaatctggtcgacttcaatgccgccgcgcgcgaggccgagcgcagtggccgcgatcgcaacctggtgtcgtatttgcgcggcgcctgggccgaccagcaggacagcgcctccggcgaaatcgccacgcaatatctgcgcaggggcagcacctggaccgcgctggtgctggaataccgcaacggcgagggacgggtgatcagcctgatacggctgttctggatcgccggcagcggtgcggcggcagccgacgtgcgcaagcattacatggtggccgagcgcagtttcgatatcgccagcgaactggtcggcttcgatctggatttgcgcaagctcaaggcgcgtctgggcgacgacatcgcccacttcgacaatttctccggctatgccgagcgcttacgccatcagttgggcatcgccaacgagatggcgttacggctgctgcacaaaacccagtccgcgaagaatctcggcgatctcaatgtgttcctgcgcggcttcatgctcgaggttcccaagaccttcgacgccagcgagcggctggtgggcgacttcgccgaactcgatggagcgcatcgggcggtggtcaccgcacggcggcaggtcgaaacgctgctgccggcgcgtgcgcattacgacgacttgcagtcggtgcaacgtcagcgcgggcgcttgcaggaactcaagctcggcctggacccctatcgcgagcaacgccggcttgcgttgctggatgcgcgcctgcatgcactggacgtcaacgaccagggcctggccggcgaggagggccaacgccgcgctgcagtggataaccaccaacaacgcttgtccgatctggaggcccagcgccgcagccagggcggcgagcggatcgacgccctggaacgcgagcagctccaggtccagggcgaacttgcacgccgcagcgacaaacgcgccagggccgaacaggcctgccgccagctcgaccagagcttggccgacaacgcgcatggatttgccgagcagtccgcgcaggcgcgcgccgcgctcgaggacgggcagcggctggctgccgaacaggacgaggcgatcggcgagcgtatcgccggcaagcgcgaggacagccagcgctttgcgcaggtgcgcgccgagatcgaggcgctcacccgcaatccctccaacatcgctgcgccgatgcaggccctgcgtgcacggctgagcgaagaaaccggcattcccgaggccgcgctgcccttcgtcggcgaactgatccaggtgcgtgaggaagatgccgcctggcgcggtgccatcgagcgcgtgctgcatgggtttgcgcaatcgctgctggtggacgagcgccattacgccgagcttgccgagtgggtcaaccgcacacatctgggctcgcgcctggtctattaccgggtgcgcaataacgaacaggcgtttgccggccgcgaacccggcagcgcctcgctgctgcacaagctgcaattgcgcgagcatccctttgccggctggctgcggcgtgaacttggcaagcgtttcgactacgactgcctggagagcgccaaggccttgcgcacggcagagcgcgcgatcactcgcgaaggccagctcaagcatcccggcgaacgctacgaaaaagacgaccgtcatgcggtcggcgaccgtcggcgctggctgctgggcttcgacaaccgcgacaagctggcactgtacgagcgcgaagccattgaactggcgcaacgcattgccgcctgcgatgccgacgtggccgagctgcgtgcgcgccgcgaacgcgatgccagccggcgcctggcccagcacaccctggccaacctggcctgggaggaaatcgacgtcgccgcacagctgcaacgccgcgacgatatcgccagcgccttgcgcaagctgcgcgaaggcgatgccaacctgcgcgcgctgggcgaggcgatcgagcgcacgcgcggcgacctggaacaggccaagcgcacgttcgacggtgtgcgcgaggaacggatcgcgctgggggtcgagcgcacgcgcctggaaaagcaacgcctgcactgcgccgacgccgatgcccgggtggtcacgccgctgcagcgcgaggggctggaggagcgcctggccaacctgggtgcgcttagcctggacaatctcgaagcgcattttcgccagatcggcaacgccatcgccgagcagaccagcgccagcgacagcgagcacaatcggctcgaacagttgctgctcggctgctttcgccgttatagccaacagtggcccgaagacagtggcgacttcatcatcagcctggccggcgccgaggattttctcgcccgcctgcagcgtctggaacgcgatggcctgccgcagcacgaagcgcgctttttcgagctgttgcagagtcagagcaagaacaatctgctcgccttgcagcgccacaccgccgaagcacgcaaatcgatcgcccaacgcctggacgaggtcaacgccagcctggagcaggtgccgttcaaccatggcaccttgctgaccatcgaactcagcgatcggcgtctgctggaggtgatcgacttccatcaacgtctgcgcgatgtgctcggtcaccaccagaccgaacagcgtgacgtggccgaacagcaatttgccgtgctgcgcgaactggtgcgtaagctcggctcggccgatggcgaggacaagcgctggcgcgagctggtgctggatgtgcgcctgcatgtggagttcgtcggtgtcgagctggatgcggccacccgccagcaggtggagatctaccgcagcggcgccggcaagtccggcggccagcggcagaaactggcaaccacctgcctggccgccgcgctgcggtatcaacttggcggcgaagacggcgaattgccgcgctacgcggccgtggtactggacgaagccttcgacaaggccgacaacgaattcaccgccttggcgatgaacatcttcgagaatttcggcttccagatggtggtggccacgccgctcaagtcggtgatgacgctggagccgtttatcggcggcgcctgctttgtcgaaatcagcggccggcacgactcgggcgtattgctgatcgaatacgacgaacaggcacgccggctcaagttacccgagcgctcgcgcagcgcggcggccgccggtgcggcgcgcgcgaccgagccgtccgccgatgccgtcggcggagcgagcgtcgatggactgcactga

SEQ ID NO: 47504 - DNA, 1182 bp, Xanthomonas oryzae
atggccgccgccgcgcccatgatgttgcctgccgctgcgctgcgggccttgcgcgggcagtggcagcgcgcacgcggcgagtggctgatcggcgagggcgcaccgcaggcgatcgggttgcgggcgccgacccaggcacaggccatcgcgcggttcgatgccttcggtgcgtggttgcaggagtggagccgcacaggcctgccggggcgggtggagtatcgcgcggtgagctggacgcagctggggccgcagcgcctgccgcagacctgggtgctggacgatgtgggccaggccgccggcgcgcttggcgagggcgagcgctgggcgcgtgcccgccaacgcagcgttgccttgcaggcgcgctggccgcaggcggtcgcgctggcggcgcggctacgccgtcaatttgatctgctggccgactggccggaggtcgagttcgcacgcttggtggcggtggtggagtggctgcaccagcatcgcgacagtggactgttcctgcgccagcttcccatcgccggcatcgacagcaaatggatcgaaccgcatcgcggcgtcatcgccgactggcttgccggcctgcgcggcatcgccgagccgcgtagctttgccagcctgtccggcctgcgcaacgcgccggatcgggtgcgcttgcgattgctcgacccggccctgcgccaccacctcggcggcctggaggacatcaccgcaccgatcgcgcagatcgccgcgctgcgtctgcctgcgcgccgcgtgctgatcgtggaaaaccgcgaaaccggtctggcctgcgaatcgctgccgggcacgctggtgctgatggcgcgcgggtacgccatcgaatacgtgagcaatatcgagtggctgcgcgggttgccgctgtactactggggcgacatcgacacccacggcctggcaatcctgcaccgcctgcgcacgcacgctccgcacaccaccgcggtgttgatgaatgaggccaccctgcaggccactccgcgcgcgttgtgggggcacgaacgcaggccgcaccgcgcccaacgcctggctgcgctcagcatccaggagcagcgcctgtatgctgacctgcgtggcggccggttcggtccgtcgccgcgcctggagcaggaacgtatcgcttgggactatgcctggccgcgcatccaggccgcattggcggactga

SEQ ID NO: 47505 - DNA, 1473 bp, Xanthomonas oryzae; identical to SEQ ID NO: 46180

SEQ ID NO: 47506 - DNA, 699 bp, Xanthomonas oryzae; identical to SEQ ID NO: 42287

SEQ ID NO: 47507 - DNA, 3429 bp, Xanthomonas oryzae; identical to SEQ ID NO: 46182

SEQ ID NO: 47508 - DNA, 1182 bp, Xanthomonas oryzae; identical to SEQ ID NO: 46183

SEQ ID NO: 47509 - DNA, 1473 bp, Xanthomonas oryzae
atgaaacaccgtgcccgtatcgcccgctatcgcgtcctgcgcgagcagccgctgtggaaactgctggcggccgatcagtcgccggaagtgatcggcctgctgcagacgttgttgctcgacagcgagcgcggtttgcctgcggcggtcctgcatgaacgcctgcagcgcatgcttgacgatctcaatgtcgatcagctctcgcgcgagctgccgcgcactgcgcaggcctatgtagcgcactggctggcgcagggctggctggaacggcgcctgcccgagggcgcgcagcaggagcagtacgagttgtctacccaggcgattcaggcgattcgctttgccgatggtctggagcaggcgcgtggtgccgcgaccgagagccggcttgcgctggtgatgcagcagttgtcgcagttggccgcgttgaccgaaaccaatcccgatgcgcggctgtcggcgctgcgcgacgagcgtgatcgcatcgatgcggagatcgcgcgggtggctgccggcaaggtcgcctcgttggatggcaaacgcgcgctggaacgtgcgcggcaggtgatcgcgctggccgacgagctgaccgaggattttcgccgggtacgcgacgatttcgagcagctcaatcgccagttccgtgagcgcatcatcgacgacgagggcgagcgtggcgaggtgttgacgcggctgttcgagggcgtggacgtgatcggcgacagcgaggccggacgcagttttcaagcgttctgggcgctgctcaacgatgccgaacaaagcgcgcagctggatgcggcgctggagactgtgttggcgcgggcgttcgcacgcaagctcgaccgccgcgagcgcagcttcctgcgcggcttgaccggcaccatgctcgaacgcggcggtcaggtgcacgatgtgatgcagcatttcgcccgcagcctgcgcggcttcgtccaaagccgtggctatctggaacaacgccggctcaatcaattgctcaagcaggcgcaggccgaggcgttggggctgcgcgagcatctgcgtgcgcagcgctcggtcgggcacgacctcaacctgaccaccagccgcttacgctcgctgtcgcaatggcgtctgcacgatccgcgtcagacccaggtcgatggcagcatccagcgcaacgacgcagcggcgatctcgctggacagcgtcggcgatctggtcgcgcagtcggaaatcgacttccgcagcctgcgccgcgatctgtacgaactgctcggcgaacacgcacagctgtccatcgcgcaggtgctggcgcaacggcaggcagagcaggggctcggcagtgtgatcggctacctgtcgctgggcacgcggcatgggcaggtggatgcgcaacgcagcgagatcgcgcgatggcgtggcggcgatggccagtggcgcggtgcacgcattccgttagtgtggttcagccaggagaaacgcaatgaattggcaggctga

SEQ ID NO: 47510 - DNA, 699 bp, Xanthomonas oryzae
atgaattggcaggctgacaacgccgaaaccgacgcgcacgcgccgagcgcccacgccgatgcggctgcgcccgaggcggacgccgcgacaggcctgtttcccggcgatagtggtgcgttgccggtggatgcgcggcgcgtgctgtgccaattgctcgccggccccagcgtggacgtgcagcgccacagcaagttgtggccagcgttgctgcgccatgaagcggccgtgcgcagccgcctggccgatctgttcctggaattggtgctcgaccgcgacgccggcgtcgccttcacccgccaggccgacaccggcgagctcgaagcgccggtgctgctgcgctctctgccgctgaccttcatcgattcggtgttgctgctgcatctgcgtcagcaactggccgaagccgatgcgcggggcgtgcgtgcggtggtcgaagatgcgccgttgagcgaggccctggccgtctacgagaagaatctgtccaccgaccgtgccggcttcatgcgtcgggttggcaacgccattcagaagatgaaggacaaccacgtgctcacgcgcctgcgtggcgaagacaaccgctacgaggtttcgcccacgctcaagctgctgttctcggccgaggatgtgtccgcgctggcgcagatctatcgccagctgcgcgagcagcccggcaccgtaggcgatgcagagcgcgcctga

SEQ ID NO: 47511 - DNA, 3432 bp, Xanthomonas oryzae
atgaaatcttcttcctccagcctgtttgccgacgatctgcccgacccgcgcgtgcagcagttccgcatgcgccgcctgcaggtccataactggggtacgttcaacggcttgaccgacgtgccgatcgccgcgaagggcttcttgttcgtcggccgttccggttcgggcaaatccacgctgctggatgccatgtccgctctgttgaccccgcccaatctggtcgacttcaatgccgccgcgcgcgaggccgagcgcactggccgcgatcgcaacctggtgtcgtatgtgcgcggcgcctgggccgaccagcaggacagcgcctccggcgaaatcgccacgcaatatctgcgcaagggcagcacctggaccgcgctggtgctggaataccgcaacggcgagggacgggtgatcagcctgatacggctgttctggatcgccggcagcggtgcggcggcagccgacgtgcgcaagcattacatggtggccgagcgcagtttcgatatcgccagcgaactggtcggcttcgatctggatttgcgcaagctcaaggcgcgtctaggcgacgacatcgcccacttcgacaatttctccggctatgccgagcgcttacgccatcagttaggcatcgccaacgagatggcgttacggctgctgcacaaaacccagtccgcgaagaatctcggcgatctcaatgtgttcctgcgcggcttcatgctcgaggcgcccaagaccttcgacgccagcgagcggctggtgggcgacttcgccgaactcgatggagcgcatcgggcggtggtcaccgcacggcggcaggtcgaaacgctgctgccggcgcgtgcgcattacgacgacttgcagtcggtgcaacgtcagcgcgggcgcttgcaggaactcaagctcggcctggacccctatcgcgagcaacgccggcttgcgttgctggatgcgcgcctgcatgcactggacgtcaacgaccagggcctggccggcgaggagggccaacgccgcgctgcagtggataaccaccaacaacgcttgtccgatctggaggcccagcgccgcagccagggcggcgagcggatcgacgcgctggaacgcgagcagctccaggtccagggcgaacttgcacgacgcagcgacaagcgtgccaaggccgaacaggcctgccgccagctcgaccagagcttggccgacaacgcgcatggatttgccgagcagtccgcgcaggcgcgcgccgcgctcgaggacgggcagcggctggccgccgaacaggacgaggcgatcggcgagcgtatcgccggcaagcgcgaggacagccagcgctttgcgcaggtgcgcgccgagatcgaggcgctcacccgcaatccctccaacattgctgcgccgatgcaggccctgcgtgcacgcctgagcgaagaaaccggcattcccgaggccgcgctgcccttcgtcggcgaactgatccaggtgcgtgaggaagatgccgcctggcgcggtgccatcgagcgcgtgctgcatgggtttgcgcaatcgctgctggtggacgagcgccattacgccgaactggccgagtgggtcaaccgcacacatctgggctcgcgcctggtctattaccgggtgcgcaataacgaacaggcgtttgccggccgcgaacccggcagcgcctcgctgctgcacaagctgcaattgcgcgagcatccctttgccggctggctgcggcgcgaactgggcaagcgtttcgactacgactgcctggagagcgccaaggccttgcgcacggcagagcgcgcgatcacccgcgaaggccaggtcaagcatcctggcgaacgctatgaaaaggacgaccgtcatgcggtcggcgaccgtcggcgctggctgctgggcttcgacaaccgcgacaagctggcactgtacgagcgcgaagccattgaactggcgcaacgcatcgccgcctgcgatgccgacgtggccgagctgcgtgcgcgccgcgaacgcgatgccagccggcgcctggcccagcacaccctggccaacctagcctgggaggaaatcgacgtcgctgcacagctgcaacgccgtgacgatatcgccagcgccttgcgccagctgcgcgaaggcaatgccaacctgcgcgcgctgggcgaggcgatcgagcgcacgcgcggcgacctggaacaggccaagcgcacgttcgacggtgtgcgcgaggaacggatcgcgctgggggttgagcgcacgcgcctggaaaagcagcgcctgcactgcgccgacgccgatgcccgggtggtcacgccgctgcagcgcgaggggctggaggagcgcctggccaacctgggcgcgcttagcctggacaatctcgaagcgcattttcgccagatcggcaacgccatcgccgagcagaccagcgccagcgacagcgagcacaatcggctcgaacagttgctgctcggctgctttcgccggtatagccaacagtggcccgaagacagtggtgacttcatcatcagcctggccggcgccgaggattttcttgcccgcctgcagcgtctggaacgcgatggcctgccgcagcacgaagcgcgctttttcgagctgttgcagagccagagcaagaacaatctgctcgccttgcagcgccacaccgccgaagcacgcaaatcgatcgcccaacgcctggacgaggtcaacgccagcctggagcaggtgccgttcaaccatggcaccttgctgaccatcgaactcagcgatcggcgtctgccggaggtgatcgacttccatcaacgtctgcgcgatgtgctcggtcaccaccagaccgaacagcgtgacgtagccgaacagcaatttgccgtgctgcgcgaactggtgcgtaagctcggctcggccgatggcgaggacaagcgctggcgcgagctggtgctggatgtgcgcctgcatgtggagttcgtcggtgtcgagctggatgcagccacccgccagcaggtagagatctaccgcagcggcgccggcaagtccggcggccagcggcagaaactggcaaccacctgcctggccgccgcgctgcggtatcaacttggcggcgaagacggcgaattgccgcgctacgcggccgtggtactggacgaagccttcgacaaggccgacaacgaattcaccgccttggcgatgaacatcttcgagaatttcggcttccagatggtggtggccacgccgctcaagtcggtgatgacgctggagccgtttatcggcggcgcctgctttgtcgaaatcagcggccgtcacgactcgggcgtattgctgatcgaatacgacgaacaggcacgccggctcaagttacccgagcgctcgcgcagcgcggcggccgccggtgcggcgcgtgcgaccgagccgtccgccgacgccgtcggcggagcgagtgtcgatgaactgcactga

SEQ ID NO: 47512 - DNA, 1182 bp, Xanthomonas oryzae
atggccgccgccgcgcccatgatgttgcctgccgctgcgctgctggccttgcgcgggcagtggcagcgcgcacgcgggcagtggctgatcggcgagggcgcaccgcaggcgatcgggttgcgggcgccgacccaggcgcaggccatcgcgcggttcgatgccttcggtgcgtggttgcagcagtggagccgcacaggcctgccggggcgggtggagtatcgcgcggtgagctggacgcagctggggccgcagcgcctgccgcagacctgggtgctggacgatgcgggccaggccgccggcgcgcttggcgagggcgagcgctgggcgcgtgctcgccaacgcagcgctgccttgcaggcgcgctggccgcaggcggtcgcgctggcggcgcggctacgccgtcaattcgatctgctggccgactggccggaggccgagttcgcacgcttggtggcggtggtggagtggctgcaccggcatcgcgacagtggactgttcctgcgccagcttcccatcgccggcatcgacagcaaatggatcgaaccgcatcgcggcgttatcgccgactggcttgccggcctgcgcggcatcaccgagccgcgcagctttgccagcctgtccggcctgcgcaacgcgccggatcgggtgcgcttgcgattgctcgacccggccctgcgccaccacctcggcggcctggaggacatcaccgcaccgatcgcgcagatcgccgcgctgcgtctgcctgcgcgccgcgtgctgatcgtggaaaaccgcgaaaccggtctggcctgcgaatcgctgccgggcacgctggtgctgatggcgcgcgggtacgccatcgaatacgtgagcaatatcgcgtggctgcgcgggttgccgctgtactactggggcgacatcgacacccacggcctggcgatcctgcaccgcctgcgcacgcacgctccgcagaccaccgcggtgttgatgaatgaggccaccctgcaggccactccgcgcgcgttgtgggggcacgaacgcaggccgcaccgcgcccaacgcctggctgcgctcagcatccaggagcagcgcctgtatgcagacctgcgtggcggccggttcggtccgtcgccgcgcctggagcaggaacgtatcgcctgggactatgcctggccgcgcatccaggccgcattggcggactga

SEQ ID NO: 47513 - DNA, 1452 bp, Microbacterium chocolatum
gtgcccgccgtcgcccaggttctcgagctcgcccagcttgcggagcgcgatgcggcgtggaagctgcttcgagccgacagtgcacccgtggtcgccggtcttctcggcacccacctgggcggagacgagcgccgagtcgacgctgaggagctgtacgagcggatcgatgccgacctcgagcggctccgtgcgcaggggctgatcttgccgctgactgcgaaggggtactgcggggagtggcgatcggccggcttcctggtgcgtcggccgtcatcggaagcgcggggtgagacgctcgagctttccccggatgcgatcgccgggatccgcttcttacaggggcgtgccgccccgcgttcgagtgtgaccgagtctcggcttgcgagtcttgcggcgcaggtccgtcgcctcgcgatcgacaccgatcctgacgtgtcagcgcgcatcgcgctactcgaggaagagatcgagtcgattgagcggcggatcgagagcctgcgttccggtgacgagtccgcgatcgatgaagaccgggcgctcgagcgcgttcgcgacgtgctggcgcaggcggcggacgtgccggacgactttgctcgggtgcgtgccgagttcgagacgctgaatgcgtcgctgagggcgaagatcgtcgagtccgatgtttctcaggcgtcagtcgtcgacgaagtcttccgcggaatcgaccacatctccgactcggatgcaggccgcagtttcgctgccttctcccagctcgtgctcgaccctgcactcggtgccgcattcgaggccgacatccgtcgcatcctcgaccgcagattcgctcgtgatctcacctcggatgagcgccgggcactgcgcgccttcctcgcaacgctcaagggacgaagcgcggagatccacgatgtcatcacattgttcgcccgggcgctccgccgctacgtgcagtcgcaggactaccagcgcgaccgggtcctgcggactcttctgcgggaggctcagcacgcgggggtggaagccgccgcacacacgcgtccgtggcatccgacgtctctcacgctggatctctcggccgttgcgctgtcgagcgtcggggcgatcgaccttcacgaccccgccgaattcgccgccaccgaagagatcgtcacgcaggcgacatccctcgcgagcctcgaggagctgcgggcgatcgctcgcgaaaccgagatcgacttcgacgaactcacccggaacgtcaacgacctgctcgccgaggtgccctcgtgcaccgtcgcagatgtccttgctcgataccccgcgacgcagggggtcggcagcgtgatcggacttctctcgatcgccgccgagcagggcaccgttgacgatgagcccgaggtactcgcttggcagggcgccgacggagttccgcgtgcggcgattgtggccgcgcaccgattcacaggagcggtggcatga

SEQ ID NO: 47514 - DNA, 660 bp, Microbacterium chocolatum
atgaccgagtcgaccacggcggatgtcgcccccgacgagcacggaggcctctggcgtggcgacgccggcgaactccctgatcgcacgaggcgcgtcttgctgcgtctggtgcgtggcccgtatctttccggagcgcgcgaggcgcagctgtgggcggtgctgctcaccgacgaggctgtcctccgctcccggctcgccgatttgttcctcgaattggtcatcgatcgggacaacgagttcgccttcgtccgcaacgctccgtccgaggacgccccgaaggcagtgcggtctgaggcgttgacgttcctcgacaccgcaatgctgcttgtcttgcgccagacgctgctgagcgaggagggtcgcggtcgggtgatcgtcgggcaggcggaggtgttcgagcagctcgccgtgttccgcaccccggaccgtgatgagaaggacttcgcgagccgcgtcaactcgtcgtggaacaagatgcagaacaagctccgcgtgttgcacgccgttggcgatgaccgtgccgagatttcgcccgtgctccgactgctcgtcgatgccgaccagatccgcgcgatcacatcggagtaccaccggatcgcccgagagggcggaggagaatccgctgccccgtcgacggatgccgaggatgacacagaatga

SEQ ID NO: 47515 - DNA, 3354 bp, Microbacterium chocolatum
atgacgatgctgagcttccccaccgacgagccggaggtcgatccgaccaggcccggccagtggcgactctcccaaatcgaactcgtcaactggggcacgttcgccggccacgtctccgtggatgtcgcgcgcgccggccacctgttcaccggcgcatccggatcgggcaagtcgtcgctactcgacgcgattgccgccgtcctcacccccgacaggtggctgcgcctcaacgcggcggctcaggatggcgcttcccgacagagcgatcggacgctgatgagctatgtgcgtggcgcctggagcaaggaagctgacgagactgccgatcgggccaccacgacctacctgcgctcgaaggcaacctggagcggcatcctgctgcgctacgagaatctccgcgatgaaccggtcgtcctgctgcgggtgttccacgcaccgggcacgcgcaccgaaccgaccgcgttgaaggacgcacggatcttcacccgcggtcacgtgaagcttctcgacgtgaagccgcacgtcgaaggcggaattgacgcgcgtcgcatgtcgaaggccttccccgacgcgctgatcaccaccggtgggagacacggacgctttcacgagcggatcatccgtcagttcggcttccgcggagatgcgacgcttcagcttctccacaagacacaatcagcgaagaacctcggcaccctcgacgcgttgttccgcgggttcatgctcgaccagccggggaccttcgcgcgggccgagaccgccgttgagcagttcacggagctcgatgccgcgcacaagcacgtggtcgacctgaggaagcaggctgatgcgctccgcaaggtcgacgaggcgatcaccgcgttcgacttggccggcgctgagatggcagcgatctccgatctgcacgacggggtcgagcccttcacagcgggactcaagttgcggctcgcgaaggaagccgcgggccccgcacgcgccgcgctggcgcgcgccgagagcgacctgagcgacgccgcgcgagagcagcggttggcggcaggggcgctggaaaccgcgaaggcgcgggtccgggatgagggcggcgcgcgcgtcgagcttctgcaggagcggatcgacagtgcgcagcgtgccgaggacgtcactaggcaatatcgagctcagttgaccgcagagctgatgcgcatcggcgcaccaatgcccgaagacccagagcagtttgcggagctccttgccgcggccgtcaccgaggttgcgcgcgacatccccgctgtgtcgtatgaggtgcgtgacgccgcgagtcaggcgcgtaaggcgctggacgaagtcaccaggcagattcaggcgctgagagatcaccggagcaacctcgacgagaagcttctgagcgcacgacgattcctcgcggacgctgttggtgtgccggcatcgacattcccctttgcgggcgagctgatctcggtcgccgagcagcactccgcctggcgcggcgcggcagagcgagtgctcgctccgtttgcgtcgacgctcctcgtgcgggacgaacatcttgtcgccgcacgtcgggcagccgactcgcggacactcggtgtccggctcgtcatcgaagcggtcccgcacgccgtcgacgagccgcgtcgccccaaggatgcccgctcgctcgttcatcgtctcgcggtgagcgatgggcccttcgcgtcctacgtccgcaagcgcatggcctccgagttcgactacgcctgcgtttcgcaccccgacgagcttgatgacgtcgagcgtggcgtcacgatcggcggcctggtcaagcgcaactcacgtaggtatgagaaggacgaccgtcacgaggtcggtgatgccactcgatgggtgctgggcggcgacacccacgcgcggctcgaggcattgcttgagcgtcggcgggacgcgatggcggcgatggaggaagcatccgcccgcgacgccgaggccgactcgtttcgtcaggatgcggtcagtcggcgcgacgtcttcacacgcgtatcgacgttcagctgggaccaagtggacctcgcaactgcgatggcggtcaccgcggcccagcgcgacgatctccgggtgctcaccagcgagtcggggactctccgcgaagcacaggaggccgcggagcgagcgacccagcgactggacgaaacgaacgcgaagcacgcacgggcgctcggagcccacgctgtcgcccgcaatcacgtcgaaagcatcgcggcacacgtcgccgaactcgaggccaccccatatgcaccggtcgaggagcggatcgccgacgccctcgaaggccggttccgagcggagcgacgctccgtgagcctggagacggtggacgaagtcgcgcgaaaggtgcagtcggcactctcgaaggagaaggacgcctcggccagccgcgcagcggatgctgaggccagcttcgccgggcgcgccgccgagtttcggctcgggtggcccgctgcatccgcagagctgactgctgacatccgcgaccgttacgggtatcgcgaacttcgggaggggatcctcgcccgcggcctgcccgagaaggagaccgagttccgcaagctgttgcgggagcgctcgcaggatgtcgtcgcccacttgctcagcgacctccgcgacgccccggggttcatccgggagcggatccttcccgtgaacgcatccctcggacggtccccgttcgaggggacggatcgcttcctcgagatcgatgtgaagacgacccggacgccggaggtcgacgagttcctcaccgacctgcgccgtatcgtcgaaggcaactgggccgatgagtccgccgccggcgcggagcagcgcttcggcgtcctgcagcgcgttatcggtcgactcggctccaaggaccgcatcgacatcgattggcgcaatcgtgtgctcgacacaaggcttcacgtgagcttccttgcgcgggagaaggacctcaccggccgggtcgtgcgagtgtacgactccgccgaggggttgtcgggcggtcagaggcagaagcttgtcatcttctgcctcgccgcggccttgcgctatcagctcactgaggaagaggacgaggtcccgaggttcgggtcgatcgtgctcgacgaggcattcgacaaggccgacagtcgatacacgcgcaacgcgatggaggtgttccgggaattcgggttccacatgatcctcgcgacacctcagaagctgctgcagacactcgagccgtacgtgggcgcgattacgtcggtatcgaaccccgaccgcaacacgtcacgactggcgaacgtggtgttcgcggtcggtgacccggaggccacctctacgccgcatgcggagtcgcgcgcgtga

SEQ ID NO: 47516 - DNA, 1095 bp, Microbacterium chocolatum
gtgcgtgcgcgcgcgaagaagctctttgaccgcgatgcgcgcacgtgggcggccgagcagcagaccggtgtcgtgctcgatgttcccctgcggccgccgacagagcgggaggcgctgagcgacctgaatcgtgttcgagagtgggtcaagtcctggcgcggcgtgagcgaagcctcgggaatcgagctcgagtgggccgtccgaaactggtcacgcgtcggatcacaggaggtccccgtgcgcgccatcgtgcgtagcccagaggtgatcgctggagtcgcaggtgaggcagcggtatggcggcgtctggtggaacgcctcgacgagctgagggctcttgttgggcccgacgcgcaggtagtgctccgcacctacgcccactcgattgccgacctcgatgacgctgattttcacaggctcgtcgacgtgctgacctggctgcgtgacaacccggcgtctgaccgcctcatccgggagcttccgattcgcggcatcgactccaaatggatcgagtcccgccgaggggtcgtagaggcgttgcatcgagctggaaccggtgcatccggactggggcttcgcgagccgtcgccgctggtgcggatccgtgtactcgatccatctctctccttccaaaggctcaccgatgtgtcagcgcccgtcgacgaacttgcatcgattcctttacggcctcaacgagtcttcgtcttcgagaaccttgccacggtgctcgccatgccgaacgtgccggacgcggtcgctgtgcacggcggcggtcaccgagtcgacctcgtcgctcgcctgccatgggcgcagaccgtcacctactggggcgatctcgactcacatggattcgccatcctcaaccgactacgagccaggggagtcgaggcgacatcggcgttgatggattccgggactcttttcgaccaccgggatctgtgggggaccgatccagaaccgaatgtcggcgtgctcgagctgctcacgcccggtgagcgcgcgactcttcagtcgctgagcgcggaggggaacattcgcctcgagcaggagcgcatcccgtggagctacgcgctcgcgcgactcggagtgtcttga

SEQ ID NO: 47517 - DNA, 1371 bp, Asanoa ferruginea
atgctgttcgcgcagctgtccgacgagctgttcaagccgctggcctcgccgagccgcggcttcaacgccgccctgctcctgcacctgcaccggcgcgtcctcggggccgagccggtgcgcaaggccgagctcctggcggagatcggcgacttcgccgccggctggagcgaccccgaggtcagcggcgacgagccgatctcggccgacccggccgagcgccgcacggcgctctaccggcgcctcctcgacaccggctggctgatcgagcgccgcgagcgctacgtcccggtcgcggagttcgaccccgaggcccgcctcctgctggaggagctgtcccggctcgaaaggggcgagacgcgctcctacggcggcgccgtgctggaggtgctgggcgggcttgagagcgccctgtcggacccggcgaatcgctccgaggcgctgtccaacgccgcccgggccgctgccgccttcctgtcgcacgtgcgcggcctcgcggccggcatgcgcaaggtcgaggagcgcatcctgcgcgagcccgaccgcgccaagaccttccggctgttcttcgaggatttcgtcgagcgccacctgatcagcgactaccggacgctgcacacccgctttaacccgttccgcttccgcgccagcgtggtgcgcgaggccggtcgggcgctgcgcgacgccctcacggtccgggcgctggccgagggcctgatccgcgaggggcggagcgccgacctcgacgcggcgcagaaggccgtccgggcggatctcgcccagatcctcgcggtgttcgagggcctcgacaaccacctcgacgccgtcgacgccgtggtggcgcggctggagcgccggatcgcttccgccctgcacgtgatggaccgcccggacccgagcggcgtcgagcgcgtggcggcgatgctgcgcgccgtcggcgggtccgagatcgcccccgaggtgccgggggacgtctcgctgctgcggccgccgatcggccacgcgcatctccaggcgccgcgggcccgcaagtcggccatcgacatggagcccctgcccgacatcgaggacgaccccgtggtcgacgccttcgcggccgccaaggcggagttccggcgccgcaccaccgtgaccccggagagcatgagcgccttcgtggaggcccgcctcggcaaggccgtgcgcctgcgcgggtcgcagatcgtgatcgcgggcgtcgacgacttcatcgtgttccagcgcctgcgcgagatcgacgtgctgttcgacgccaagctcggcgcgcgctacgccctgacccggctgcccgagcgggttgtcaacggctggctggactgcccggacttcctgctggagcgccgtccccgtgcttga

SEQ ID NO: 47518 - DNA, 678 bp, Asanoa ferruginea
ttgtcaacggctggctggactgcccggacttcctgctggagcgccgtccccgtgcttgagggcttccgcgcgatcatcgacggcgacgagccgccgccccccggcgcccgggcgccggacgccgaggagctgtgccgcgctctccaggttctgctgaaggggcaggtgatctacgccgagacgcaggggatcggacggtcctacgagctcgcccggcactacgctccgttcttcaccgactacttcgcctgcctcggctacgcgctgaccgtctcgcaccgcgaccagatggtctcgctgagcccggccgccgacgccccgcggcacgacatcgtctcggagcgcctgcgcaaggacgagaccctggtgctgctggcgctccggctcctctacgaggagggcctgcgcgaccaccgggccggcacggacgggatcgtcgactgcaccaccgacgagatcgtcgagaagatccgcgccgtggcccgcaacgagccccccgaggagggccggctcgccgacatcctgcgcctctacgccaagcgcggcggcctgcgcctcggcgagcgcgatcgggtcgagcgggtcacgccgctctcgctcctgccgggcgtgacggtgctggcctccgacgcctggatggagcgtctgcgggcgtggtcagaggccggcgaggcctga

SEQ ID NO: 47519 - DNA, 3399 bp, Asanoa ferruginea
ctgatccgccgcgagcagatccgcctgcgcggcgccgcggcgctggtcgggccgaccggggccgggaagtcgacgatcttcgacgcggtcggcacggtgctggccggcaacaacgccagccgcctcgccctcaacgcctcggcctccggccgcagcgcccgcacggtgcgcgactactgcctcggctggatcagcgacccggcggagggcggccgcccgacgcgggaatcctgcgagaccgtgctggtcctggtcttcgagaaccccgattccggccgcgtggtctcggtcggcctcgccctggcggcccgggccgtggagccgaaggagaccgtgctgtcgcgcttcatcgcggtcgggcaccggttcgaggtcgccgactacgcgcgcaccgctcccggcggcacctacacggcgccctggagcgagatcgccgccgacctgcgcgcccgcgcgtcgagcttcaccgagtaccgcacctccggcgagcgcttcacggccgacgtgctcgcgaccctgcgcgagggggcgccggcgccggagccgcgccacttcctgcgcagcttcgccaacgcggtggcgttcaagccgatcttcgacaccagcgcgttcgtgcgcgccttcgtgctcgacccggagcccctcgacgtcgagcgtgtgcgccactcgatcgccaactggcggcgcctcctggagaccatcgccgaactggagagccggctcgggcgcctgcggcgcctgcgcgaccgctacgaggcctggggcgaggcggtcctggccgccgcgacccacgagctgcgggcggcgagcgccgagctgcgccgccgcagcctcgacctcatcgccgtccggagccgcctccgcgagggcgccgacaccctgcgcatcgcgcgcgaacgcgtcaccgcgagccgaggctacgtccgcgagatcgacggcgagatcgccgagaagaaggcgctggccgccgcgagcgccgccgagggccggctcgcggcctcgacgcttggcctgtccatgctggagcgggaccggaaggagctgatcggccggatcggcgacctcgtggggctcgtcgggcagatggccaagctccagcccgtcgccccgctcctgcgccagagctgcccgcaggcggcccgcctcgccgaggcctgcgcccgggcgggcctgcgccgggaatcctcgcccgaggagatcctgcgccccgagggcccgctggccgagctggcagacggactggcgcgcctgcccgatttcgacgaggccctggagcgggccgccgaggacgcggcgctcaaggcccgggcccaggagagcgaggccgagcgcacggccccgcgcaccggcggcggcccggcggcgcgcctgtcctccgacacggtggcgtttcgcggcgagctggagcggcgcggcatcgacgcgctgccgatctgcgagctggcggagatcgtcgatccgacctgggggccggccctcgaaggcctgctcgggcgcgcccgcgaggcgctggtggtcgcccccgaccggctgagcgaggcgctcggcgtgctgcaatcgggccgcgaccgcttcagccgctgcatcctggtgaagaccaccgacaccgcaaagcagcggtcccgccgctacgacgacgggccgctcaccgtgatcgagaccagcgacccccacgcggaggccttcctcggcgtgcggctcggcggctacgacctcgcccggggcgatgccgaactggcgcgcctgtcccgcgccgtggcgccgagcggtcggaccacggccggcatggcctacacggtgacccgcaacgtcgacctgctgatgactcgcggtcatcgcgggccgaccgccgacagccgccgcgcgcacgagatcgccgtcgcggaggcgcggcgcctgcgcggcgaggccgcggtcctgcgcgaggccgccaggacggccgccgcgatccgggcccgcgtcgcccggggcctcgacgacgtggaggccttgcgggccgagctcgacgggctcgagggacggcggcgcacgctccagaccgagcgggagggcatcgagaagcgcgacacggcggggctcaccgccgagatcgccgcgctgaccaccgagcgggtcggctacctgcgggaactgtcggaggagctggagccgaagctcgatcgtctgctcgccgacgaggcggccctgcgcgcccggatggggcctgtgcgcgaggccgtccgcgccgccctgtcggcccgccgcgcggccctgcgccagctgagcgggggcgacgcggcgcgggtgcgcctcgcccgcgccgagccgttcgacctcggtgcggtcgccgaggcgcggcggtcgctcgccggactcgacgccaaggcggccggggcccgggtgagtgccgagcgcggcctcgcccgcgattccgccgaggccgcccgctcgcacgggcggatcgccgagcgcgagctggcggaggcctgcgccgcctggcgggtggagaacccgctcgcctccggggacgccccggcgatcgacggtttcgcctgggtgcggcgggaatacgaggcggtcgaggggcacgagctgcgtcgctaccgggcgcaggccgagcgggccgaggccgagatgcgccgcctgatgaccgaggacctgctgacgcgcctcgccgaccggttcgagcgggtccacgcccgcctcgcggccctgaacgagcggctctcggcgcgcagcttcaccggccagacctacgcgttcgaggcggcggtcgaccgccgctacgccgccgtccacgcgctggccaccgagaccgcccgctcgcccgaggccgcgcaggcgctgctcgccggtgaggccgaggggccgatggcggccgcgctcgaggagatcaccgcgctgatcgccggcgaggaggacgcggcgcggctcgccgattaccgcaactacttcgtctacgagatcggcatgcgcgaccgggcgggcaaccgcaccaccatgtcggcccgggcgctgcgcggctccggcggcgaggcgcaggcgccgttctacgtggcgatcgccgcgtcgctggccagcgcctactatccgggcgaccggccgggcgacgagaatccggggctcggcctgtgcctgctcgacgaggcgttctcgaagctcgacgtgcgcaacagccaggcgctggtcgatctctaccgcgcctgggggctgcagctcctcatcgccgcccccgaggacaagcgcaccacgctgaccgaggtgatggacacgatcgtgacggtctacaagagcccggatctcacctcggtgcggatcgaggccgagcaccccctcgaggcggcccggcgggcgctgcacgcgatcaatcccgaccagatcgggatcgagggcttccgccggtcggacgccgccgagtga

SEQ ID NO: 47520 - DNA, 1371 bp, Streptomyces purpurogeneiscleroticus
atgctgttcgcgcagctgtccgacgagctgttcaagccgctggcttcgccgagccgcagcttcaacgcggccctgctcctgcatctgcaccggcgcgtcctcggggccgagccggtgcgcaaggccgagcttctggccgagatcggcgacttcgccgccggctggagcgatcccgaggtcagcggcgacgagccgatctccgccgatccgaccgagcgccgcacggcgctctaccgacgcctcctcgacaccggctggctgatcgagcgccgcgagcgctacgttccggtcgcggagttcgaccccgaggcgcggctcctcctggaggagctgtcccggctggaacggggcgagacccgctcctacggcggcgccgtgctggaggttctgggtggcctcgagagcgccctgtcggatccggcgaaccgctccgaggccctctccaacgccgcccggggcgcggccgccttcctgtcgcacgtgcgcgggctcgcggccggcatgcgcaaggtcgaggagcgcatcctgcgcgagcccgaccgcgccaagaccttccggctgttcttcgaggatttcgtcgagcgccacctgatcagcgactaccggacgctccacacccgcttcaacccgttccgcttccgcgccagcgtggtgcgcgaggccggccgggcgctgcgcgacgccctcaccgtccgggccctggccgagggcctcatccgggaggggcggagcgccgatctcgacgcggcgcagcgggccgtccggacggatctcgcccagattctcgcggtgttcgaggggctcgacaaccatctcgatgccgtcgacgccgtggtggcgcgtctggagcgccggatcgcctccgccctgcacgtgatggaccgcccggatccgagcggcgtcgagcgcgtggccgcgatgctgcgcgccgtcggcgggtcggagatcgcccccgacgtgccgggcgacgtctcgctgctgcggccgcccatcgggcacgcgcatctccaggcgccgcgggcccgcaaggccgcgatcgacatggagcccctgcccgacatcgaggacgatccggtggtcgacgccttcgcggccgccaaggcggagttccggcgccgcaccaccgtgacgcccgaaagcatgagcgccttcgtggaggcccgactcggaaaggcggtgcggctgcgcgggtcgcagatcgtgatcgcgggcgtcgacgacttcatcgtgttccagcgcctgcgcgagatcgacgtgctgttcgacgccaagctcggcgagcgctacgccgtcacccggctgcccgagcgggtggccaatggctggctcgactgcccggatttccttctggagcgccgcccctatgcttga

SEQ ID NO: 47521 - DNA, 627 bp, Streptomyces purpurogeneiscleroticus
atgcttgagggcttccgtgcgatcatcgacggcgacgagccgccgccgcccggtgcaagggcgcctgatgccgaagagctgagccgtgccctccaggtgcttctgaaggggcaggtgatctacgccgagacccaggggatcggccgctcctacgagctcgcccggcactacgccccgttcttcaccgactacttcgcctgcctcggctacgcgctcacggtctcgcatcgcgaccagatggtctcgctgagcccggccgccgacgcgccccgccacgacatcgtctcggagcgcctgcgcaaggacgagacgctggtgctcctggcgctccggctcctctacgaggagggcctgcgcgaccaccgggccgggactgacgggatcgtcgactgcaccaccgacgagatcgtcgagaagatccgcaccgtggcgcgcaacgagcctcccgaggaggggcggctcgccgacatcctgcgcctctacgcgaagcgcggcggcctgcgcctcggcgagcgcgaccgggtcgagcgggtcaccccgctctcgcttctgccggggctgacggtgctggcttccgacgcctggatggagcgccttcgggcgtggtcggaggccggggaggcctga

SEQ ID NO: 47522 - DNA, 3399 bp, Streptomyces purpurogeneiscleroticus
ctgatccgccgcgagcagatccggctgcgcggtgccgccgcgctggtcgggccgacgggggccgggaaatcgacgatcttcgatgcggtcggcacggtgctggccggcaacaacgccagccgcctcgccctcaacgcctcggcctccgggcgcagcgcccgaaccgtgcgcgactattgcttgggctggatcagcgacccggcggaaggcggccgcccgacccgggaatcctgcgagaccgtgctggtcctggtcttcgagaatcccgattccggccgcgtggtctcggtcggcctcgccctggccgctcgggccgtggagcccaaggagacggtgctctcgcgcttcatcgcggtcgggcaccggttcgaggtctccgactacgcccgcaccgcccccggcggcacctacacggcgccctggagcgagatcgccgcggacctgcgggcccgcgcggcgagcttcaccgagtaccggacctccggcgaacgcttcacggccgatgtcctcgccaccctgcgcgagggggcgccgtcgccggagccgcgccacttcctgcgcagcttcgccaacgcggtggcgttcaagccgatcttcgacaccagcgccttcgtgcgcgccttcgtgctcgacccggagcccctggacgtcgagcgcgtgcgccactccatcgccaactggcgtcggcttctggagaccatcgccgagctggagagccgcctcggacgcctgcggcgcctgcgcgaccgctacgaagcctggggtgaggcggtcctcgctgccgcgacgcacgagctgcgcgcggcgagcgccgagctgcgccgccggagcctcgacctcatcgccgtccggtcccggctccgggaaggcgccgacaccctgcgcatcgcccgcgagcgcgtcgcggcgagccgcggctacgtccgcgagatcgacggcgagatcgccgagaagaaggcgttggccaccgcgagcgccgccgagggccggctcgccgcctcgacgctgggcctctccatgctggagcgcgaccggaaggagctgatcggccggatcggcgatctcgtcggcctcgtcgggcagatggccaagctccagccggtcgccccgatcctgcgccagagctgcccgcaggcggcccgcctcgccgaggcctgcgcccgggcgggcctgcgtcgggaatcctcccccgaggagatcctgcgccccgaggggccgctcgccgaattggccgacgggctggtgcgcctgcccgatttcgacgaggcgctggagcgggccgccgaggacgcggcgctgaaggcccgcgcccaggagagcgaggccgagcgcacggcgccgcgcaccggcggcggcccgaccgcgcgcctgtcctccgacacggtggcgttccgcggcgagctggagcgccgcggcatcgacgcggtgccgatctgcgaactggccgagatcgtcgacccgacctgggggccggccctcgaaggcctgctggggcgcgcccgcgaggccctggtggttcccccggaccggctgaacgaggcactcggcgtcctgcaatccggccgcgaccggttccaccgctgcatcctggtgaagaccaccgacaccgccaagcagcggtcccgccgctacgacgacggtccgctcaccgtgatcgagaccagcgacccgcacgcggaggcgttcctcggcgtgcggctcggcggctacgacctcgcccgggacgacgccgaactggcccgcctcgcccgggcggtcgccccgagcggccggaccacggccgggatggcctattcggtcacccgcagcgtcgacctactgatgacccgcggccatcgcgggcccaccgccgacagccgccgcgcccacgagatcgccgtcgccgaggcgcggcgcctgcgcggcgaggccgcggtcctgcgcgaggccgcccggacggcggccgcgatccgggcccgcgtcgcccggggcctcgacgacgtggaggcgctccgggccgagctcgacgggctcgacgggcggcgacgcacgctccagaccgagcgggagggtatcgagaagcgcgataccgccgggctcgccgccgagatcgctgcgctgaccaccgagcgggtcggctacctgcgggaattgtcggaggagctggagcccaagctcgaccgcctgctcgccgacgaggcggcgctgcgcgcccggatgggaccggtgcgcgaggccgtccgcgccgctctgtcggcccgccgcgcggccctgcgccagctcagtgccggcgacgccgcgcgggtgcgcctcgcccgcggcgagcccttcgacctcggcgtggtcgccgaggcgcggcgggcgctggccggcctcgatgccaaggcggccggatcccgggtgaccgccgagcgcggcctcgcccgggagtccgccgaggccgcccgctcccacgggcggatcgccgagcgggagctggcggaggcctgcgccgcctggcgggtggagaacccgctcgcttccggggacgccccggcgatcgacggcttcgcctgggtgaggcgggaatacgaggccgtggaggggcacgaactccgccgctacagggcgcaggccgagcgggccgaggtcgagatgcgccgcctgatgaccgaggatctgctgacgcgcctcgccgaccggttcgagcgggtccatgcccggctcgccgccctcaacgagcggctctcggcgcgcagcttcaccggccagacctacgcgttcgaggcggcggtggatcgccgctacgccgccgtgcacgcgctcgccaccgagaccgcccgctcacccgaggccgcgcaggcgctgctcgccggcgaggcggaggggcagatggcggcggcgctcgaggagatcaccgcgctgatcgccggcgaggaggatgcggcgcggctcgccgattaccgcaactacttcgtctacgagatcggcatgcgcgaccgggcgggcaaccgcaccacgatgtcggcccgggcgctgcgcggctccggcggcgaggcccaggcgccgttctacgtggcgatcgccgcctcgctggccagcgcctactatccgggcgaccggccgggcgacgagaatccgggcttgggcctatgcctgctcgacgaggccttctcgaagctcgacgtgcgcaacagccaggcgctggtcgatctgtaccgggcctgggggctgcagctcctgatcgccgcccccgaggacaagcgcaccacgctgaccgaggtgatggatacgatcgtgacggtctataagagcccggatctcacctcggtgcggatcgaggccgaacatcccctcgaggcggcccggcgggcgctgcacgcgatcaaccccgaccagatcgggatcgaggggtttcgccagccggacgcggcggagtga

SEQ ID NO: 47523 - DNA, 666 bp, Bradyrhizobium japonicum
atgggcgcaggctccacggttgccacggcagaggaacgcgtcgtcgccgagctcgagaagatcaagagcgtctttgaggacgtcggccccttcatggacaagatcgaagatttccgcgaccgtctcgaacgccgcatccgcaccaccgtccactacatggacgtcatgggagagggatccgctgagcggatcgtccggctgatcgagcaactctcgaagatcgggcgcgatgaagtggagatccgtcttgggtcgccggatgtgggcctgccgatcacatcgcttgcgctgtacacgccaccgcctccgaaggcaccaccggagcggacgcgcttcaaggtgccgaagcaggatccatatctgcgcgcctatgtcgaggccacgaccgaattcgaccggatggtgcgcgtgtccgaccagaggctgctcgagttcgcccggcggcagatgcagggccgcgatgccgtgtcgtccgcggagatcgagatcgagagcattccggacctcttcgcctaccgggcgctcccgaacctggctgcggtcggccgctctgtgcgacttggcgaattcacgatcaggctcgacgaggggcgctccgccaacgactggatcgacgtgaccgccttccggatcgaaagaacgaggaccacggccgatgctgcgtga

SEQ ID NO: 47524 - DNA, 642 bp, Bradyrhizobium japonicum; identical to SEQ ID NO: 41684

SEQ ID NO: 47525 - DNA, 3501 bp, Bradyrhizobium japonicum; identical to SEQ ID NO: 44616

SEQ ID NO: 47526 - DNA, 1206 bp, Bradyrhizobium japonicum; identical to SEQ ID NO: 44617

SEQ ID NO: 47527 - DNA, 1557 bp, Bradyrhizobium japonicum; identical to SEQ ID NO: 41687

SEQ ID NO: 47528 - DNA, 639 bp, Bradyrhizobium japonicum; identical to SEQ ID NO: 41688

SEQ ID NO: 47529 - DNA, 3435 bp, Bradyrhizobium japonicum
atgatggagctacgccacctgacgatggtgaactggcacctattcgacgtcgccgacatcgacgtgaggggacacgtcggggtcctgggcgagaaccggtccggcaaatccacaatcctcgacatggcacaggtcgttctcaccggcgggagccggcggttcttgcgcctgaacgcggtcgccggcgatagcggaaaatcgcgcagcggctcgaagcgcagcgtcgtcgattactgccttgggacgctcggcgaagatcagcgccggcgcgacgaggcgcgcacctacatcgcgctcggtttcgaagacacggaaggcgcccggtcaccggtcacgatcggcatggcgctcgaggcgcgcaagtccgacagcagggagaccgtgctggcactcttcgtagccgtcgggaccgttctgagctccaaggacttcatcgagcagcgaggaaagtcgcaattcccggcgcagtgggaggacgtgcgcgcccggatcgtcgcagcggtcggcgaaggcaacttcgtcaatcatcgcgaccgggcgagcgactatgtccgcgagtacatgcgccatcttctgccgcattcgtcctttggcgaacagaacgccagcgccctgcagaaatcaatcgtcaacgcgatgacgctcgatcacaaccagacggcgacgcagttcgtgcggaactacatcctcgaggacagtccgatcggcatcaaggagctgcgcgagtcgatccagacataccgcaacatcagcgagaccatccggaaaatgcgcctcaggctcgaagccctaagggcgcttcggggcgtcctcgccgcgcttgaagaggcgctcgagaccaagttcagggaggaatgggtcgcaaaacgcgcgacttggctcgcggcgcgcgcgacaaacctggacttcaagaccaagcggcgtaccgagatggcgcgccgggacgccgcagcaaaagaactcgaattcatcgacgacgacgtcaaggccatcgataaggagatcgaacgcctcacggccgcgatcgccgagcacgatgccaagaccggcagaaagtccctgcagcagaccgccgatgtggccgggcaggcggcgcaccgcgcctcggcggacttcaaggctcgcatggagaacatccgtcgcctggagccgctacgcgcgatgtgcgcggacggtttcgaggacttcgttcctgcgcttgagcgtcttctgaccgccaccgccggggccgacatcgggggcgtctccgacgaggtcaccgcggccgagaagtccttcgcggcaagcggcgccaaatggctgccgaagatcgacgaagcgcgtcaaaggatcatcgcggagctttccggcctccgcggcaggcgcgacgaggtgctcgaacggatccgacagcacgccgccggaggggcgcgcgcctatctcggcgacgacactgaactcctctgccgcaggctgcggcagggtggaatggtcccgcgcgtactctgcgacatcatcgaagtcgccgaacccgagtgggtaggagccgccgaggcgctcctcggtcgcgaccgggaagccgtgttcgtggacagagcggatatcagcgccgccacgtcaatcttcaaggaaggtcgccgcgagtttcgccatgcatcgctcgtgagcctaaacaagctcgagcagttcagggccaagccggagcgcggcactttcccctcgatcttccggagccaggatccggacgcgatggccttcatcatgcgccgctacggcaacgtccgtctcgccgacacgctcgaccagttcaacaggcccggccgggcgataatgaaggacggcctctacgacgacggactcgtccggagccatcgctggatcgaatcctcgcagtataagatcggaaaggcagcccaggcgaacgccctgcgatccctgcaggatcaggccgaggagctgggtcggatcctgatcgacaaggggaaggaggcccatgccgcggagcaggcttttgccgctctgaagaacatctgcgagggacgtaatgatctgggggcttgcgcggccgccttcgcggccgcgcagactgaggtcgctgaagctcaggccaggctcgatgccctcgacggcgcgggggacggcgggcttcgcgacaaaaagagggcgcagcaaaagctgaaggagaagaggctggaggagagaaagacacagcagaaggcgttcggcgagcatgacggcgaggtcaggtcggcggagaggaggctcggagagggcgagaacgtgcccggctccgaactcaacctcagggtcgcccggtcgatataccgcaagttcttcccactctactccaccgcgaaaggcagggccgtctaccgcgaccgcctcgatgccgcagcccaaaagggcttcgctgagaaacaccgggccatcgccgagaaggccttgaaggatgcgaatgtgtccgacaacgagcgcgcccggatcgagcgacgggtccgcgagcttctttacgattacttcgaccagttcgggatgagttcgcaggtcggtgcggaaagcgagccgctgcgggaggtgaagccatggatggagcagctgatctcggatatcgaatccaatgagctgcgccagtacgaaaggcaggcgcgggatgcggcggaaaaggcctctaccctgctgcgcggcgagttcatcaacgcgctcacggcccggatcggaaagatggagcgggagctgcaatcgttgaaccgtagcctctacgcacatccgttccataacgagcgatattcattccatcgcacccagatggtggaattccagcccatcctgaagatcatcgagatcgccaaaacctctccggaggcgctcgatatgctgttccggggcgacgtgcccgatgacttcccgcacaaggatacgatcgtcgcactcgaggcgctgctcgaggaccccgacaaggatttcacccagttcgaggactaccgcaacttctacaccttcgagatccacatggaggatgttgccaccggccgctcgacccgctgggagcagcggcgcggcaccgggtctggcgccgaacaacaggtgcctatctacgttgccatcggcgcttcgctggccgccgtctacggcagcgcggagcgtcgtgccggcaagcccgccggtttcgcgctcgccatgttcgatgaggccttctccaagatggacggcaagaaccagcggcagatgatgagcttttacaaaaacctcggcctgcagttcgtgatcgcggcgccgttcgagaagcgcgtcgccgtgctcgagcacatggacaccatcgtggaggtggaccgcatcggcgagcagtccagggccactgtggtggaactgaaagagaaggccaagcgcgagctgatggccatcgatccggacctgatgtccgaagatgagctcgccacccgtctggccgccgagtag

SEQ ID NO: 47530 - DNA, 1170 bp, Bradyrhizobium japonicum; identical to SEQ ID NO: 41690

SEQ ID NO: 47531 - DNA, 1461 bp, Arthrobacter sp. LS16
atgcagccctcgcaccgcgcgaatagcctgtggatccagtcccagcagttcagaagctcggcggcgtaccggctcttaacggcccagccctgggcagtcgccttcatccgcgccgagttcaccgcggaccgcccgcgcatcgcgctggaactgttccacgcttcactggattccttcctgaaaaccgcccgcacgagcgacgagcagatcccgcagacctacagtgcgcaggacttcgccgaaacctgggtcaagcagggattgctggcccgtccgctgatcgacgggcgcttcgtctacgagcccagcgcccagaccctgcgcacgctgcgcttcctagccgatttctccaccgacgactcgcacctgaactcctcgcgcctgaacacgctgctgtcctcgctggaatccctggcccacgaaaccgacccggatcccgaggcgcgcatccgcgcgctggaatcccagatcgcccagcgccaggcgcagatcgaccagctgcgctccggcaccgatccggcggtgctctcccgcaccaccgcgctgtccgcggcccgctcggtgctggatctggccgcgagcctgccggcggacttccgccgcatgcgcgacggggtgcaggacatgctgcattcgctgcgcgagggaatcctggacgcctccaccgccaagggcgtggcggtgggccaggtgctggaagccgaccggcagctgcgctcaaccgccgagggcgagaccttccgcggcttcaccgagttcctgaattcccccgaagcccagcagcgtttccgcgcggcgctggccgaggtgctggagcgcgacttcgtggacgacctggacacccccgaacgccagatcctcaccaacctgctgcgcgagctgcgccgccaggccgccgaggtgcacacctcctacggcaagctctccgagtccctgcatgccttcgtgcagtccgaggactacaagcaggccgagttgctgcgccgggcggtgcgcgaggcggaggccgcgatcagcaagtccgcgggtctgaagccgcgcagcgggctggccccgctggaactgttcgccccgcagttcgtcaccctgcacgggctgggcatctacgatccctccgagcacgtggccccgccgccgctggcccatgccccggaattcagcgccgaggacatcgtgcgcacccccagcaccccggaggccgacatgccggcgctgcgcagcgcgatcgcgcagcggctgcgcggcgccgcgcaggacccggtgccgctggatcaggtgttcgcggccctgcccgccgagcaccagcacctgaataccatccgcgcgctgatcgagatcgggcgcaccaacggcgagaacctcgacgagtcgcagctgctgggcatcgaattcacccagcttgatggttccacgcgcaccgcctacctgcccgccctgagcttcacgaaggagccgctatga

SEQ ID NO: 47532 - DNA, 693 bp, Arthrobacter sp. LS16
atgacctacaccgactcatatgccgcaccgatcaccgatccgctgttcgatggggataccggcagcttcccgctcccgctgcgccagctgctggtgcggctgctgcgcggcccgtacctcgacggctccgtggacgccgcggcctggcagctgctgctggattcgcaaggcgctgtcaccaagtacttctcggagatcttcctggcgctgagcctggacatggaccgcaagatcgccatgctggcgccggtggacatcgagcaggcgcacaccgcgccgatcgccccgcgccgcccgctcaagcgcgacgagaccctgctggcgctgcggctgcggctgctgctggagcagcagtcgggcaccggggccgatgcggtgatctcccgcgcgggcatgcacgagatcctggccgagcaccgcgccgccgccgaccgcgacgacaagcgcttcgccgagtcctgcgatgcggccatcgcccggctgggctcgctgcggctgctgaccaataccgagctggccgacgagttccgcatttccccggcgctggccatggccctgcccttggcctccatccaggacatcccgcgctacatcgcggcgatcgacgccaatgagggcgtgctgaccctcgccgaggcggagcccgacgaggccgacgcatccgaacagaccgacgcactggtgcaggagtag

SEQ ID NO: 47533 - DNA, 3324 bp, Arthrobacter sp. LS16
atgagcattgaaatgacgctgccgctgggcggcgagatcaaccccggccagcaccgcctctcgcgcgtccagctggtgaactggggaaccttccacgggctgcacgacctgggggtggaccgcgccggaacgctggtcaccggccatcccggcgtgggcaagtccacgctcttcgacgccatgggccacgtgttcttcgccagcccgcggctgaacgagtcggccaacgacgcggccacccgcgaggaccgccgcaccacctattcctacatgcgcggacgcaagttcaagaccagctccggcaccgtgttccagcgccccggcgccacctggagcgccgtgctgctcagctaccaggacggcatgggcaacaccgtcagcgccggcgcggtcttcgacctgccggacgccgggctggagggccaggtgtccaagcactacctgttgtgcgagggcgcgctggacatcgcgcagctggagaaccacggcccgcgccgcttcacggtctcctcgctgtccaaggcgctggccccggccgaggccttcgacacccacaaggcgttcatcgaccggctgcgccgccgcctgggcgtggaaagcgacaaggccttcgccctgctgcgcaccctgcagaacggcaagggcctggccaagggcgtgaaccagttcttccgccacgaggtgctggaggaacctgccacgctgaaggccgccgccgccgcggtggaggacttcgcgcacctgcgcggcatctaccggcagctggacaccgcccgcgcgcagcgcgacgtgctggccgccgtgccggagcaggaccgggcctaccgctcgctggccgaacggatcggcgaaacccgccagctgctggaaaccgagctggcgcagctcgaaacgcaggtgcgccagctggtgctgcgcaacgacctggcggcgcaccgcgccgagcatgcgcagctcactgccaggcaggccgagctgggcgaacgcaaggccaagctcgatgaccagctgcagtcgctggaggccgcgcacgattcggccggctccgcctcgctgatgctgctggaacgcgaagccgacgccgcccgcaaggcgctgagcgagaaggagcgcatgttgcacgccctgcaggagcaggccgaccaggccgggctggccttcgaattcagcgccaccgggctggacgagctgcgtgccaacgccgcccgcaccctgcagcagctggactcgatcaccaaggacgcgcagaccgttgaatacgaggccatggcctcgctggtcaacctgcgcaagcgcgctgacacgctggccgagcagatccgctcctaccagcgccgcagcaccaacatcgacgaccgctcggtcgcggcccggcgcgccatcgcctcggcctgctcgctgcgcgaggagcagctgcccttcgccggcgagctgatggacgtctccgccgactgcgccatgtggcggctggcggcggaaaaggcgctgcactcggtggcccgcaccatcctggtgcccggcgagttcctggcccaggtcacccacgccatcgacaagctcgacgggctgggcagggtgcgctgggcggacatctcgctggccccgcgcgaggccgaagcaggcccggccgacctggtcaccaagctggacttcgccccgggcgaggccggcgcctggctgcgcgcgaagatcaccgccgactacccgctggcctgcgtggagaacgacggggccatgcacatccatcccaaggccatcaccccggccggcaccatcaagaccggcaccggcatcttcgagcgcgacacccgcaccctgccggcctccgaatacctgctgggctttaccaacgaggcgaagatctccgagctgcagtccaaggccgcgcgcctggaaatcaaggtgcaggacgccaagaaggcggcggatgaccgcagcgccgccaaggccaaggtgctggccaaggcgcagctgctcggcgcgctgatcgaggacgagcgcaccttcgcgcagctggatgcggcccccgcgctccaggcgctgcgccgcagcgagcagaagctgggcgacgcgctcacgctctccggggattcctcccgggtccgcgcgcagatcgaggccgccaaggccgagtccgagcagctggtcggagacctggcgctggtccgctcccgcgccggcgagctgggcctgcagatcgagcgggccgaaaaggtcctggctgccggtcccgcggacagcggcgactggctggagcgggtcccggcggcgctgcgcggccacgagctgctcggcgggttgctggaaaccatcggcgccggcagcagcccggcctccgaggagatctccagcgccttcgccgaggccaggctgcagctggcgggccagctgagcgagctgaccgcgcggcgccaggaaatcggcggggcgctgagcgagaccttccgccgtttcgcccgtgaattcggcggctcccacgcgcagacccacggcacctccccggaggccgcggagcactacgcccagctgcatgagcagatcgtcgccgacggcctgccgcaccatgaggcgcagttccgcgaatacttcgccaaccgctcctacgaacgtttcagcgacctattgcagctgctggacgaggagcgcaggatgatttccgagcgcatcaagccgctgaaccagatcctcggcgaggtggccttcgagcacggctcgctgctgcgcctggaggtggaaagctccatcccggtggaggcggccaccttccgcaaggacctgaagaacgcgctgcaggacgcctacaccaccaaggacgagggcacgctggccagctcctaccaggcgctggaggcgctggtctccgcgctgagcgacccgggcctttcggcctggcgttcgacggtgctggacgtgcgccagcatgtggtgatcagctgcaacgagcacaagccgaacggcgaggtggagaccgggctggaacctggcaccctttccggcggcgaggggcagcgtttcacctcgttcatcatgggtgccgcgctggcctaccagctcggcttcgccaccgccgggttcacctccttcggcacggtgatgatcgacgaggcgttcatccaggccaactccgaatatgccgcggcgggcatccgcgcgctgcaggagttcggtttccacctggtgctggcagccccggaagacaaaatcgatttgagccgccacctgggatccatcacggacatcatcaagcatccgggatccaatatctccggcttcgtcaccaccggccgctccccggccatggccaccaccatcacgctgcgctag

SEQ ID NO: 47534 - DNA, 1632 bp, Bifidobacterium longum subsp. infantis
gtggccgatgtgatgcgggagctggaacggctgcgaccggtgtatgagacgggcgtcctgcggttgctgttgcgccagaacgcgatgctgtacgtgtcgctgctgcgttccacgttcgacccgctcaccggcgagctgccgcgcgagaccgtggaggagcggttcgcgcaaagtctgaacgctctggccgacgccggcgaatatgcgccgcgcgaggaccagaccttcgccgaggccgcccatcagatcctcgccgacctgacccgtgaaggcgaaggcgactacgcctggctcgccaactcgcatgatgcggccacacaccgattcctctaccgtttgacggcccgcgcccaccgcgccatcgaggcactgagcaggctcgaagacgaatcacgcgccctgtccggcgcgcaggccaacagcatcatcatggaaatcgagcacgcgcgcatgcagctgaccgccgaccccggcgagcgcatcaaactcctcaaccgtgaaatcaaggaacgcaagcacgagatcaaacgcatccaacagggcaagcagcacgccacgctgagcgaagcccaagtggaggacgtgatcgccgtgatccacaacacgctgcgcggcgtgcccatcgacctgcgcgaactcgtgctcgacgagcgggacaacggcgacgccttgcgccggcgcatgcaggccggcgacatcagcgtggacgagaacctgacccgctaccacgatgaataccgccgctcgttcagcgaatcggacagcggccgccgcttcgaggacgccttccaggtgatcatcaccgacgagggccgccagcaaatcgacgaagccctgcgcgccatcgccaaaaccccgtatctggccggcgaatccggcctgctgcttggccagatacgcgacgaactggcccgcatctacgacggcatcgaggctgtgcgtcgtcagatgcgcgtctccgacgaggcgatcagccggctcatgcgccagcaaaccgacactcgctaccgtacgatgctcacccgcttgaaccgactgtacgcgcgcctcaacgcagatgcgaaaacccatatgggagacgcctcgcgcccgtgcgacacggccaccgcggacgcgctgttcgcgccattgccgatgcgcccggccaaatccatgacccgcgccaccgcacccggcctgagcgacctcgccgccgaagccccgcaggcgactccggtggccgatctgcgggatatggtcaacagcggcggcccccgactcctgcgcatggtcagcctcatccggcgcaacccggtgaccgttgacaggtccgatgacaggtccggcgcaaccctcgtggacatcgccgccagcttcaaccggctgcccgaaagcgaacgccgcgaaagcgagatcgtcggcttcctgggcgggctgggagccgtaagcggcagcgccatcgctgacgagccgtccactgacggcgtcggcatcgacagcgacagcgacatcgccactgagccggccccggcgcagcgcggcgataccgcgacttggcattgcgtatcgatcgacggcgagccccggaactggatcactagaccggtgctggccgacatggacgagctgaacatcattgtggaggaaggatga

SEQ ID NO: 47535 - DNA, 666 bp, Bifidobacterium longum subsp. infantis
atgaccgtggccgaggaacacgaggagcacatggacaacgccaacccgtacgccctgttcgaaggcgacaccggcgacatgccggccgaggcacgcatggccgccatcgccctcaaacgcgaccgctatatcagcgggcccacctacgacaccgtgctcgacaaccgcgacgccgtcgtacgctccctgaacaacgacctgctcgacttggtgatcaacgaacgctaccgcatcatgtacgccacgcccgtggccggcgacgacgtgaccctgcgctcgctcaaaacccgcgtcagcctcaaacgcgaggaagccgcgctgctcgccttcctgcgcatccgcgtcctcgaatacgagaacgtgcacgccgaccccgccgactggctcgtcagctttgaggagatccgcgccgcgctcgccaccggcgccggctatctggccgcccgcaacgacgaggaaggcgtggcaaagcagatcggcgccatcgtctccgcgatgatcacctacgggtatttggtgcgcctggacgacgaagccatgtaccagatcacgccgctcgtgcccgtggtgctcgaccgcgaactggccgacacctggctcgacgtcgtggaacacggcgacggcgacacggaagatgacgatgacgacgagaagggagccgaatga

SEQ ID NO: 47536 - DNA, 3555 bp, Bifidobacterium longum subsp. infantis
atgatgcaggcgacagacgtgcagatgatcgcggaccggtggatgctggaatcccgccgactcatcaactggggctcatatgagggctaccacgaattccgcccctccacggaccacaagctgccggtgaccctgctcgccggcgccagcgaatccggcaaatccacgctggtcgacgcgcagatctccctgctgtacccaaccggcacgccgttcaacaaggcctcgaactccggccgctccgaacgcagcgactacacctacctgcgcggcatggtcggcgtgggcagcaccgaaaccggcgacgagccgctctacctgcgcggccgcgacgagaacggcgcaccgcaacccgtgtggggcgccatcgtggacacctatcgcaaccagaccaccggccaggtgctctcctgcgccaaattcctctacctgatgcccggcgacggccgcggtgacgtgcgccgccagtacgtggtctggggcaagcccgtggaccccaggcgcatggaccaataccgtgacgccccgttcacgccggcccagctcaaagccacctaccccgactgcctcacattccccagcgccgaagcgttccacacacacatctggagcgcaatgggcctgagcgaggccgcctgccgactgctgcacaagatccagtccgccgacgcgccctcccggctcgatgacatcttcaaacaaggcgtgctcggcgtgcccgaagccctgggcctggcccgcaccacggtcgaggactacgaacgttacgacgggaacttccacgccatggacgagaaaacccgccgcatggacacgctgcgcggcatccaacaggcctacggcgaatacgccgccgcacgcggcaaggcccgcgcattcgaaccggtcaagccggccgtcgacggcacggtgccggccgtgctgcgcgactgggcattggcccgcatgcgtggcgaagtcgcagtccaactgcccgccgaccgcgccgaacaacagaacagcgaggcggaagccaagctgctgcgccgccgaaccgaagacctgcgcacccgcctcgacatgatccgaggccagatgcagggtctggacggcggcaacctgacccgactcgaactcgaactcgaccaggcccgccgcaccctcgaagacgtgcaagccaaccgaacacgaatcgaacaaacgttcgcatccatcggcgagacgctgcccggcaacgaacaggcctggaacgagcgccgcatcaacgccgtgaacttcaaacgcgaatacaacaaacgagacggcgaatgcgaggaagccctcaccgccgccatcaacgcgcgggccggcgcacgcggcgacctcgaacgactgcaacgcgacttcgaccggcaacgctcccagcgcacccgcatctcccagcagatggacgaaacccgcgccatgctctgccgcgccaccggactcacccccgccgaactgccgtacgtggccgaacttatggacgtgaacgaacacgaggaagactggcgtctcgccatgaacgtcgcctacgcgcccatcgcccagaccatcctcgtcgacaagcgccacgaacagggcttcgccgccaaagtcagcaccatcgacccgcgcaccatgccccgacgcacctggcagttcgtggacaccgcacgccactacgacgacaccggcgcgcacgcgaacatactcaccggagaacaggacggcgactggctgtccggcaaattgcgctaccgcgacgactcgcccttcgccgactggctgcgctcgcagacccaggccgaacgattcgacgccctatgcgtcaccgccatcgacgacaccgaccgcaccaaccgtcaggtgcaggccgacggtcagatcaaatccggcgcacgcggccagcacggcaccaaagaccgcgcccaggtcatcggattcgtcaacgaaacctacctcaacgcgctcgcagcgcaggtcgacgccgcccgcaacgcgcttagccaagccgacaccgactacacggccgccaaaacacagtccgataacctccaccgcgaactcgaactggccaaccagctcgcctacacgtcatgggaacgcatcgacatcgccggcgcgcaacggaccatcacggacacgcaggacgccatcgcatccatcaagaacgatcccaaactcgccgaactcgccaaacagcgcgacgaactgaacgccgaactcgaccgtgtggaacgccagcgcatcgaatccgaccaggccgcggcccgcgccggcagcgccgtcgaagcggcgctcatctggctgcgcgaccatgccgacgccggcacgacggacgccgccggtgtcatcgccgacagcggcgatgacgataacgccaccgccggcccactgccggacgaagtcacggcggtgctcaccgaatcctacgacaaccgattcgccggattggcggacgccgccatgcgcgcacacatgatcatcggcgcgggcgtggccggaacgcgggcgccgggggagagtttccccgaacgcaccatcgccggcatcggcaaggacatgacctcccgcatcaatctgctgaacggccaggccgacgccgcgcgcaccggcgtcgaatcgaaaatgagcacctacatcgcgctctacgcggccgacgacgactcgctgaccgccagcgtggaggactaccggtactatctcgacgaactcgccagcctcacccagctggccgcggtcgccgccaccgacgccgaataccggcgctgcctcgaacagctgctcaggagcttcctgaccatcaaacgcgccatcgacacggatgccagcgacatccacgaccagcttgaccgcatcaacgccatgctcaaaggccaacagttcggtcccaagcacggcagcctgtccctgcacgcggacgtgcgccgtcccgagcgcgccttctggacgcagctcatccgcgtcatcggcaccctgaacgattggaaatccgccgacgtcaacgattccgacgcctcgcgcaaggccttcgcggcctgtgcgccgatggtcgggctgctgcgcgccgaactcgcgcaggtcaaggacgcgaacggcgtgaaaagctacggcgcccgcaatctcgacccgcgctgccgctcgtccttctacgccatcgtgcatcatgccgacggtccggacgaacgcatcacctccaccggtggccgttcgggcggcgccttgcaggagctcacctcattcgtatacggcgcggcgctcatctacctgctcggcggcggcctgaccagcgaaccctcgtacaccacgctgttcctcgacgaggcgctcatcaaggccgacggccgttacacgcagcgcgccctcgcggtgctgccgcgcctcggattccaggtcatcgtctccgccccggaaagcaagaccggcgaaatcctcgaggtctccaccaaggcctacgtgacctacaaggaccccgacaccggcctcacctccctgcgcgaggccgtgctgcaccagaatgacatggacgatgaatcatcgtcggatatattgaaggatgacggggttgccgaatga

SEQ ID NO: 47537 - DNA, 375 bp, Bifidobacterium longum subsp. infantis
atggccggcatgaaagacatcgctgcgatcaccacatgcgtgaagaaacatatgcgttcacatatgtacgacatcgaaccggcatggccatttcccgtgccggtgggattgccggaccaagcatttttggaaaccaatgcgattgcagtgcatgacaacaacaatgagatacggcaatgggcaagcaagaatggttgcgaaatcataaccaagcatcgcaccataggcacctctgtcgagttaatctccaaagtcgtcgttcctgacgaatcaatagccatgcgtgtggttggtcgtacgctggcggcggaatatcgcgaagcgcaccgtcgcacagattccactgacaggattcagcggcaaatggctgaatga

SEQ ID NO: 47538 - DNA, 1458 bp, Arthrobacter sp. ERGS1:01
atgcgctccactgaaaacgccgttgcgcactggcatacccaaaaacagttgcggcacggcccggcctggaaactgatgcaggcggctccctggacagtggcgttcctgcgtgcggagttcacggccgccaggcagcgcatcacgctggaggaattccatgcggacctggccgcgttcatcaaggaactccggcacgagaacctgaacctcaacgatgcctggcaggcctccaactacgccgattcctgggttcgcagccaattcctggcccgccccatggtggatgggcgcttcgtgtacgaacccaccgccgccaccgcccgggtgctggcgttccttgacacgttcacggtggaacgcaccaacctcaacagctcccgcctgaacacgctgctgaccagcctggaaacgctgtccttccagacggacccgaaccccgacagccgcatcgccatgctcgaggcggaaattgccgaacgccagggtgaaattgcggccctgaaaaacggccaaagcccggccgtgctctccgacgactccgccgtggccgccacccgcagcgtccttgacctggcctcaagcctgcccgccgatttcaagcgcatgcgcgacggcgtcgagctcatgttgcacaccatccgcacggaaatcatggaatcctccgtgacgaagggcgtggccgtgggccaggtcctggagggtgacaaagcgctgcgcaacacggccgagggcgcgacgttccagggtttcaccgaattcctcaacgacccggtccagcaggcccggttccggcaatccgtgaatgaagtgctggaacgcaacttcaccgaacagctcagcagcgaagaacgcagcaacctggccaccctggtgaaggaaatgcgccgccaggccgccgacgtgcacaccatctacggccggctgtccgagagcctgcacacctacgtgcaatctgatgaattcaaggaatcggtgctgctgcgcaaggccatccacgccgcagaacaggccgtggccgccgccgccctgggcacgcgcacccccgtcacggcgccgctgctgtacgcccccgagtttgagacgctggccggcctgggcatcttcaaccccgatgaccacgtcccgccgcccaagctggcagccccgcccgtgctcagcgacgccgacatccaccgcacccccgtcacgccggcacccgacatgccggccctgcacgccgccgtcggccttgcccggcgcagccgcaacggcagcgccagcctggccgacgtctatgcggagctgcccgcggaactacgccacatcaacaccatccgcggcctgatcctggccgcccgcagcaccgaccaaggccttgatgagggtggcaccgagaccctccgcttcacccaaatcgacggcacggagcgcaccgcccgcgtcccgctgatcacgttcacgaaggacaccgcgccatga

SEQ ID NO: 47539 - DNA, 720 bp, Arthrobacter sp. ERGS1:01
atgacccaaagttccgaactcgatccggagacgtacgacgccggccccgcaccaacgccgggcagcgatgcctaccgcacggagcgggccttgtttgccggcgacaccggttccttcccgctggacattcgccaggctctggtgcgcctgctgcgcggaccgtacatcgacggcaccgtcgacgccgcattgtggaccaccctgctgacccacagggcgtccctgcagcagtacttgagcgagattttcctgtttctgacggtagatacggaccgcaagatcgcgatgctgaccccggcggaaatcgacgccgtccacacccagcccatcgtggcccggaagccgttgcgccgcgaggagaccctgttggcgctgcgcctgcgcatgctgctggaccgccatgcgggcacgggcaccgatgtgaccatcacccgctccggcgcccgggaaatcctggccgaacaccgccgccccggcgcggtggacgacaagcggctggatgagcagaccgacgcctcgctggcgcgcctgctggccctgaagctgctgctgcccaccgagcttgccaccgaatttcgggtcagcaacgccctggcgctggcgctgccctttgattcaatcgaggcgatccccgcctacctcgacgccctggacaagagcaacgacgacgaactggatcttgacatgccggaatcaaatgatcgggagagcgtccaatga

SEQ ID NO: 47540 - DNA, 3303 bp, Arthrobacter sp. ERGS1:01
atgagcatcgccacccccttgccgttcggcgaggaaatcaaccccggccaataccggctcagccagatccagatcatcaactggggcacgttccacggccggcattccatgtacgtggaccgcgcggggacactgctgacgggccatccgggcgtgggcaagtccaccttgttcgacggcatccaacacatcttttacgcggcgccgcggctgaacgagtccgcccatgaggcctccaaccgcaaggacaggcgcaccacgttcagctacatgcgtgggcgcaagatcaaaaccgccgatggcaccgtgtaccaacgccccagcgccacctggtccgccacagccctcgtgttcgaggacggactgggccgccatgtcacgattgccgcgctcttcgacctgcccgccaacggtctggaggggcaggtcggcaagcattacctgatcctggacaagcccctggacacggccgccctggaaaaccacggcagccgccgcttttcgccgtcgtcgctgcatgccgcactccccgccgccgaagccttcgacgtgcacaagacctttgccgaacggttccggcgcaagctgggcatcgacaatgacaaggcattcagcctgttgcgcacgctgcagaacggcaagggcctggacaagggcgtcaaccgcttcttccgctacgaggtgctggacaagccggccaccatcaccgcggccaaggcggccgtggaggacttcagccacctgcgcgggatctatcgccagctcgaggacgcccgcggccagcgggacgccctgacccaggtcccggaactgcacggaaaattgcgggagctccgggaatccctttcacgcacaaccgagctaaaaaacaagcagttgccgttgttgcgccaacagttccaggccgagctgctgaccgcaaagtcgctgtcgctcggcgaccgccgcaccgccatgcgcggtgacattgaggcagcggtcgccgccaaggacgccctgacggatgccgtggcggccctggatgaacagcacgccaaccatggcggcaatgccattgaagggctggaaaaggacatccgcaccacggtgcgggaacaccaggagcgggcgcgcatcgaagcggcggcccgtggggaccttgacgcggcgggactcgcgtacgactggagtccggcgggcctgtccgccgcccggcaaagcgccgtggacggcgtcgcacgccagcaggaggaaaccgagtcggcgcgcacccgcgagtatgaggccgtcgcggccagcatgaacacgaaggcgcaggagaagaaactccgggccgagatcgcctcctacgagcgccgcggcagcaacatcgacggccgcagcgccgccgcccgccgcgccatttgcgccgaaacgggcctggacccggccgacatgccatttgccggcgagctcgtcgacattggcagcgaccacctgccgtggcggcccgccgcggagaaggtgctgcgctccctggccaccacgctgctggtccgcggcgaggacatcaagactgtcactgccgccatcaacgcactggatggccacggaaaactgcgctggatcaacatcgccaccccgccgcggcagggcgagccgggtgaggaccacctggtgaccaagcttgaattccagaactccgacgccggcacctggctgcgtgccaagatcaccggagacttcggcttccggtgcgttgacaacgacgccgaacttcaccagcacgaccgtgccatatcccgtgccggaaccctcaaggtcaactccgcgacctttgaacgcgacacccggtccgtgagcccgtcagactacctgctgggcttcaacaatgtggacaagatcctccagttgcaggcgcaggccgatgatctggcggcggcctacgaaagctcggccgcgcttgccgagcaacgtagcaaggccaaggatgaactgaccggccggctggatgcgctcaagcgggtggctgcggacacccgtgcgtttgaacaactggactccgcggcgctggcggccgcattggagacgctgcgggccaccttggcggccaccattgacagcagcgcctcattggcgcagatccgcgcttcccgcagtgacgccaaggcggaactggaagcggccgtgggcagggtggccgtactccacaacgaccttgccggcattgagaaggaactgcacggtgtccaggcaaccgctgtggccaccggcgagcaggcgcggctcaacccgccgtcggactgggccgtggacgcgtttgccccttacctggcggacggcgagccggccagcctggaggaattggagcagctgttcgggcgggctgcggtggatctgggcgagcgcctgaccaccatcaaggaacgggttttccgtaccgaaggggctctcagcgacacgttcaaggcattcgctcgcgagtttggacccgccgtgagctccagtctcggcacgggcgccgaggccgtggaacagtacgaggagctatacgagcgcatcgtcgccgacggcctgccgcagcgccaggacgagttccgcgagtacttcaacaaccgttcctacgaacgcttctccgacctcctccagctcttggaggaggagcggcgggccatcgaggaacgcattctgccgttgaaccagatcttggaggacgtgccgtttgagaagggcagccggctccggctcgaggtgaagaccaccattccggaggaggcccgcgccttccgcacggagctgaaggaggccctgggcaacgcgtacgcgaaggccaccgaggagaagatggccgccagttaccagcagctggaacgcctggtggatgccctgagcgattcatccctgcagcattgggcggacaccgtgctcgacgtccgccagcacgtgaccatcagctgcaatgagcaccgtcccaacggcgaggttgagttggggctggagccgggcacgctttccggtggtgaaggccagcggttcacgtccttcatcatgggcgccgccttggcctaccagctgggcatcgacacccagggctacagcacctatggcaccgtcatgatcgatgaggcgttcatccaggccaactcggaatacgccggcgccggcatcaacgccctccaggagtttggcttccagctgctgctggccgcccccgaggacaaggtggacctgtccaaacacctcggttcggtcaccgacatcatcaagcaccctcaagccaatgtgtcggggtttgtctccacgggccgctcacccgccacggccaccgacatcatcctgcggtag

SEQ ID NO: 47541 - DNA, 1521 bp, Bifidobacterium bifidum; identical to SEQ ID NO: 42153

SEQ ID NO: 47542 - DNA, 1023 bp, Bifidobacterium bifidum
atgagcgacctgacgaacgacaccgcccagccggacgcggacatggacatgattgacgacgacatgaccggcaccggcagtgccgataccgacagtgccagtaccggcgtggatgacatgggtgcggcggacgtcgaatacgatggcgcggacgcggaaggcgcggtcaacccatacgccctgttcgagggcgacacgggcgacatgaccgccgacgcgcgcatggtggcgatcatgctcaaacgcgagcgctacatcagcggacgtttctatgacctggcgctcgacaaccgcgcggcggtcatccgttcgctcaacaacgacctgctcgatctggtcgtcaacgagcactaccgcgtcatgtacgccaccgcggtgagcgggccggacatgacgctgcgcgcgctcaagacccgtgcgagcctcaaacgtgaggaggcggcgctgctggcgttcctgcgcatccgcgtgctcgaatacgagaacgcccacgtcgcgccggacgaatggctggtcagcttcgaggagatccgagcggcgctcgccaccggcgccgggtacctcgcctcgcgcaacgacgaggagggcgtgctcaggcaggtgggtgcgatcgtgtccgtcatgtgcacgtacggctatctcaggcagctcgacgatgacgagacgatgtaccgcatcacgccgctggtgccggtggtgctggaccgtcagctggcggacagctggctcgcagtcgcggaccgggacgacgatgacgagccggccggtgacatggccccggccggctcgcggtctgcagccggcgatacgtcgaacgccgatgcgagcggcgccgatgacgatggcgattcggacgatgcgggacccgacgccgaactgttcgaggctccgctgttcgatgatgacgccgatgcggacgccgccgaggacatcaggggcgccgatgatgccaatggcgcgaacgacagcggcattgacgacgagaccgcctcggacggcggcactgcacgggaaggggagtga

SEQ ID NO: 47543 - DNA, 3591 bp, Bifidobacterium bifidum
gtgacgatgagcggcaaggacatgcagatgatcgccgaccgatggatgatggaaagcaggaggctcgtcaactggggatcctatgagggctaccatgagttccgtccctccacggactcgcaactgccggtgacgttgctcgccggcgcgagcgaatccggcaagtcgacgctggtcgacgcgcagatatcgctgctctacccgaccggcacgcccttcaacaaggcgtcgaattcggggcgttcggaacgaagcgactacacctacctgcgcggcatgatcggcgtgggaggctccgacggcgtcgacgaaccgatgtacctgcgcggccgggacgagtccggcgtgccccggtccatatggggcgcgatcgtcgacacctaccgcaacttcaccaccggtcagatactgtcctgcggcaagttcctctatctgatgcccggcgacgggcgcggcgacgtccgacggctgtacctggcatgggacaagccgatcgacccgcgccgcatggacgtgttccgcgagtcgtcgttcacgcccacgcagctgaaatccacgtatccggggtgcgtcaccttcccgaacgccgaggcgttccacacccatatttgggatgtcatgggcctgagcgcggaggcatgccgtctgctggcccgcatccagtcggccgacgccccctcccgccttgacgacatcttcaaacagggtgtgctgggcgtgcccgaggcgctggacctggcccgtgcgaccgtggaggattacgagcgttatgacgcgaacttccgaagcatggaggaaaagaccagacgcatgggcaagttgcgtgccatcaccgccagctatggcgactacgagtcggcccgtgacgcggtccactcgttcgacgcggtgaacccggccacgaagtccggctcggcgacgatccgagcatgggcgatccgccgcatgatcggcgaggtcaacgaacggcagccgctcgacaggcgtctgcgtgacgagcgacgcagtgaggcgcgggctgccggcaagcgcatcgaaagcctgcgcacccgcatcgacgcggtgcgcgagcgcatgcgaggcctcgacggcggcgacctgacacggctcgacgcggaaatgcggcaggcggaacgcgcgctggcggacatcaccgccggcagacagcgcatcgggcgcatgttcgaggcggccggcgaggagttccccaaagacgagcacgcgtgggacgagcggcgcatcgaggccgtgacgttcatgcgctcatatgagcagcgcaagggactgctggacgacatgcgcaaccagacgtacgccgcgcacgcgtccgtcaagcagacgctgcagcggctgaacgacgattacgaacgccagaaatcgcagcgcacccgcatctcccgccagatggacgagacccgcgccatgctgtgccgggccaccgggctgggcccgagcgaactgccgtacgtcgcggagctcatggacgtgcgcgaggatcaggagcattggcgcctcgccatgaacgccgcatacggatccatggcccagaccatcctcgtcgacaagcgccatgagcgtggattcgcagccaaggtcagcgccatcgacccgcacgccatggcgcggcgcacctggcagttcgtcgacatcgaacgcgggggagccgggaacgggcccggcggcgcgaacacgggtgcgaccggcggaacggccggagaggtgtggctgtcctcgaagctgcgctaccgcgaggattccccgttcgccggctggctgcgcgagcagaccagctccgagcgtctcgacgccctgtgcgtcgacggcatcgacgactccgaccatgccgtgcggcaggtgcaggccgacgggcagatcaaatccggcaaacgcggccagcatggcatcaaggaccgtcagcaggtcatcggattcgtcaacgaaagctatttggcgcaactgcgcacgcgcatccaggacgcgcaacgccaatgcgacgagaccgcgcaatcgtacgcgagcgcgaaggaacaggccgaccgcctgcagcgagagcgcgaactcgccgatcagctcgcatacaccgcatgggagaagatcgacgagaacagcgcgaaggcggcgatcgccgacatcgaacgcaccatcgcctcggtcaggaacaatcccaagctcgccgaactcgacacgttgcaggagtcgctgtccaaggagctcgaccgctcgcagcgccagcgcatcgacatcgaacggcaggccgagctcgccgatcaggcggtgaacgcagcgcagacatggctcgacgagcatgccgcgcagccgcagccgcagacgcggccgctcgacggggaagcggcggacgtttcgccaaaagccgtcacgaacggacggactctcctgacggacgaggtggaggaggcgctcgccgaatcatatgagcagcgtctctccggtctgggggatgcgacgacccgcgcccacatgatcatcggcgcgggggcgccgcagcgtatggctcagggggataccttcgccgaccgtgtcatcgccggcatcggcaaggatctggaggcgcgcgtctccatgctcgaaggtcgtgcggcgtcggcccgcaccgccgtcgaggcgcggatgggcgcctatatcgagatgtatgcgggcggtgacgatacgatcgccgccagcgtggacgactaccggtattaccaggacgagttggaaagcctttcgaagctcgccaccgtcgaagccaccgccgtcgaataccacaactgcctcgacaagctgctgatgagcttcctgaccatcaaacgcgcgatagacaccgacgccggagacatccacgaccagctggaacgcatcaacgcgatgctggacggccagcagttcggcccgcgccacggcagcctgtccctgcacgcggacgtgcggcgccccgagcgcgcgttctggtcggccctgacccgcgtgatcggcaccctcaacgaccgcaaggcggcacagacggacgacgatcttgacggggcccggtgcgcgttcgcgtcctgcgccgcgatgatcgacatgctgcgccgcgagatcgggcagatcagggacgtcaacggcgtgaaaagctacggcgcccgcaacctcgacccgcggtgccgatcctcgttctacgcgctcgtgcgccactcggacgggcaggtcgaacgcatcacctcgaccggcggacggtccggcggcgccctgcaggagctgacctcgttcgtgtacggcgcggcgctgatctacctgctcggcggcggcatggacaacaagctcaagccttcctacacgacgctcttccttgacgaggcgctcatcaaggccgacggccggtatacgcggcgcgcgctgtccgtactgccgagactgggtttccaagtcatcgtctccgcccctgaaagcaagacgggcgagatactggaggtctccaccaaggcatacgtgacccgcaaggaccccgacaccggctacaccacgctgcacgaagcaagactggacggcatcgatgagatggacggcgcagatgagccggaaggtaccgtcgagtcggatgacgccgccgaatag

SEQ ID NO: 47544 - DNA, 1470 bp, Xanthomonas translucens pv. poae
atgaaacaccgcgcccgcatcgcccgctaccgcagcctgcgcgagcagccgctgtggaagctgctcgccgccgaccaggcgccggaagtgatcggcctgctgcagtcgctgttgctggacagcgaacgccggctgccggcggcggtgctgcacgaacgcctgcagcgcatgctcgatgaactcaatgccgagcagctgtcgcgggagctgccgcgcaccgcgcaggcctatgtcgcgcactggctggcgcagggctggctggagcggcggctgccggacggcgcgcagcaggaagaatacgaactgtccactcaggccacgcaggccatccgtttcgccgacggcctggagcatgcgcgcggcgcggccaccgagagccgcctggccttggtgatgcagcagctggcgcagctggcggcgctgaccgagaccaatcccgatgcgcggctgtcggccttgcgcgacgagcgcgaccgcatcgatgcggagatcgcgcgggtgtccaagggcaaggtggcggcgctggacggcaagcgcgcgctggaacgcgcgcgccaggtgatcgcgctggccgacgagctgaccgaggatttccgccgcgtccgcgacgatttcgagcagctcaaccgcgatttccgcgagcgcatcatcgacgacgagggcgagcgcggcgagatcctgggcaagctgttcgaaggcgtggacgtgatcggcgacagcgatgccgggcgcagctttcaggcgttctgggccttgctcaacgatgccgagcagagcgcgcagctggacgcggcgctggagacggtgctggcgcgctcgttcgcgcgcaagctcgaccgccgcgagcgcggcttcctgcgcgggctgaccggcaccatgctcgagcgcggcggccaggtgcacgacgtgatgcagcatttcgcgcgcagcctgcgcggtttcgtgcagagccgcggctacctggagcagcgccggctcaaccagctgctcaagcaggcgcaggccgaggcgctggccttgcgcgatcacatccccgcacagcgcggcatcggccgcgacctgaacctgaccaccagccgcctgcgctcgctggcgcaatggcggctgcacgacccgcgccagcagcaggtcgagggcggcatccagcgcaacgaggcggcggcgatttcgctggacagcgtcggcgacctggtggcgcagtcggaaatcgatttccgcagcctgcgccgcgatctgttcgatctgctcgccgagcagccgcaactgtccatcgcccaggtgctgacccagcgcgaggccagccagggcctgggcagcgtgatcggttacctgtcgctgggcacccgccatggcgtggtcgccgccggccagcacgagatcgcgcaatggcgcggcggcgacggccagtggcgccgcgcgcgcattccgttggtgtggttcacccaggagaaacgccatgaactggcatga

SEQ ID NO: 47545 - DNA, 705 bp, Xanthomonas translucens pv. poae
atgaactggcatgagcacgaatgggatgccgagcaggaacgcctgccggacgcggccgacaacgcggcgcccgacgccggcagcggcctgttccccggcgacagcggccgcctgccggtggaggcgcggcgcgcgctgtgccagctgctcagcggccccagcgtggacgcgcagcgccacagcaagctgtggccggcgctgctgcgcagcgaggcggcgatccgcagcgccctggccgacctgttcctggaactggtgctggaccgcgaggccggcatcgccttcacccgccaggccgacaccggcgaactggaagcgccggtgctgctgcgctcctcgccgctgaccttcatcgattcggtgctgctgttgtacctgcgccagcagctggccgaagccgatgcgcgcggcctgcgcgcggtggtggaggaagcgcagctgggcgaggcgctggcggtgtacgagaagaacctgtccaccgaccgcgccggcttcctgcgccgggtcggcaatgccgtgcagaagatgaaggacaaccacatcctgacccgcctgcgcggcgaagacgaacgctacgaagtctcgccggcgctgaagctgctgttctcggccgaggacgtcgccgcgctggcgcaggtgtaccggcagctgcgcgaaggccccgattccggcgaggacgccgccgcggctgcgcaggacgcctag

SEQ ID NO: 47546 - DNA, 3576 bp, Xanthomonas translucens pv. poae
atgaaatcctccgcttccacgcctggcctgttcgccggcgatctgcccgatccgcgcctccagcagttccgcatgcgccgcctgcaggcgcataactggggcacgttttccggcctgaccgagatccccatcgccgcgcgcggcttcctgttcgtcggccgttccggctcgggcaagtccaccctgctcgatgcgatgtcggcgctgctgaccccgccgagcatcgtcgatttcaacgccgccgcgcgcgaggccgagcgcagcggccgcgaccgcaacctggtgtcctacgtgcgcggcgcctgggccgaccagcaggacagcgaatccggcgagatcgccacccagtacctgcgcaagggcgccacctggaccgcgctggtgctggaataccgcaacggcgaggaccgcgtggtcagcctggtgcggctgttctggatcgccggtaacggcaccgccgcggccgacgtgcgcaagcactacatggtggccgagcgcgcgttcgacatcgccgccgatctggacggcttcgacctggacctgcgtaagctcaagcagcgcctgcacgacgtgcaccatttcgacagcttcgccggctatgccgaacgcttccgccaccagctcggcatcggcaacgagatggcgctgcggctgctgcacaagacccagtcggcgaagaacctcggcgacctcaacgccttcctgcgcggcttcatgctcgaggagccgaagaccttcgacgccgccgagcgcctggtcggcgatttcgccgaactcgatggcgcgcatcaggcggtggtgaccgcgcgccgccaggtcgagaccctgctgccggcgcgcgcgcaccacgccgagctgatggcggtgcgccgccagcgcagcgaactggacgaactcaagctcggcatcgacagctaccgcgagcagcgccgcctggcgttgctggatgcgcggctgcaggaactggatacccaggaccgcggcctggccggcgaggaagggcaacgccgtgccgccctggagaaccatcagcggcgcctggacgacctggaagcgcagcgccgcgcgcagggcggcgagcgcatcgatgcgctggaacgcgagcgcggccagcaggaaaccgagcgcgaccgccgcgccgccaagcgcagccaggccgagcaggcctgccgccagctggagcatgtcctggccggcagcgcgcagggcttcgccgagcaggccgcacaggcgcgcgcggcgttggaggacggcacgcgcgcggccgccgaactcgacgaggcgatcggccagcgcatcgccggcaaggccgaggacgccaggcgctttgccgaagtgcgcgccgagatcgacgcgctcaagcgcaacccgtccaacatcccggcgccgatgcaggcgctgcgcgcgcgcctgagcgccgacaccggtgtgcccgaggccgccttgccgttcgtcggcgagctgctgcaggtgcgcagcgaggacgccgactggcgcggcgccatcgagcgcgtgctgcacggcttcgcgcaatcgctgctggtggacgaacgccattacgccgacgtggccgactgggtcaaccgcacccatctgggcatccgcctggtctattaccgggtgcgcgacaacgagcacgccctgcctgggcgcgcgccggccgccggctcgctgctgcacaagctggaactgcgcgagcacgccttcgccggctggctgcgccgcgaactgggcaagcgcttcgactacgactgcgtggacagcgccaaggcgctgcgccatgccgagcgcgcgatcacccgcgaaggccaggtcaagcatcccggcgagcgctacgagaaggacgaccgccatgcggtcaacgatcgccggcgctggctgctgggcttcgacaaccgcgacaagctggccttgttcgaagaggaaggccttgcgctggcgcagcgcatcgccgcctgcgacgccgacgtggccgcgctgcgcgcgcgccgcgaacgcgacggcgcgcggcgcctggcccagcacaccctggccaacctggcctgggacgagatcgacgtggccacgccgctgcagcgcctggacgacatcgccacggcgctgcgccagttgcgcgagggcgacgccaacctgcgcgcgctgggcgaagcgatcgaccatgcgcgcgcggacatcaagcaggccgagcggacttaccaggacgtccgcagcgagcggatgagcctcagccgtgagcgtacgtcgttggaggaggagcgcctggagtgcgccgatgccgatgcgcgcgtgctgacgccgatacaacgacagggcttgagcgaccgtctggatgcgcttggcaagctgagcctgaaaaatctgtcggacttgtttcgcacagtggagcgcggcatcgaagcccagcttggtgccagccagcaggaacacaaccgcctggagcagcaactgctcggctgcttccgccgctactgccagcaatggcccgaagacagcggcgatttcaccgtcggcctgggcagcgccgaggatttcctcgcgcgcctgcagcgcctggaacgcgacggcctgccgcagcacgaggcgcgcttcttcgaactgctgcagagccagagcaagaacaacctgctggccctgcagcggcataccgccgaggcgcgcaagtccatcgcccagcgcctggacgaggtcaatgccagcctggagcaggtgccgttcaaccgcggcaccttgctgaccatcgaactgggcgaccgccgcctgccggaggtgatcgaattccaccagcgcctgcgcgacgtgctcggccaccaccagaccgagcagcgcgaactggccgaacaacagttcgcggtgctgcgcgaactggtgcgccggctcgggtcgcaggacggcgaagacaaacgctggcgcgagctggtgctggacgtgcgcctgcacgtggaattcgtcggcgtcgagctcgatgccgccacccgccagcaggtggagatctaccgcagcggcgccggcaagtccggcggccagcggcagaagctggccaccacctgcctagccgcggcgctgcgctaccagctcggcggcgaggacggcgaactgccgcgttactgcgcggttgtgctggacgaagccttcgacaaggccgacaacgagttcaccgcgctggcgatgaacatcttcgagaacttcggcttccagatggtggtggccacgccgctgaagtcggtgatgaccctggagccgttcatcggcggcgcctgtttcgtcgagatcagcggccgccacgattcgggcgtgctgctgatcgaatacgacgagcaggcgcgccggctcaagctgcccgagcgcacgcgtggcgcgaatgcggcggacgccaccgcggcaacaccggacgcgcaggaagcgcgggaggccgagcaggtgcagccggcgccgcagcggctgcgcgcggcgcctgctgtgcgtagcattgcggctgatcctgcggttgtcgatgctgccgccatggcagccacgccgcagcgcacgccacccaagtccaagtccaagtcaaaacccaaatccaagccaaaggcctga

SEQ ID NO: 47547 - DNA, 1209 bp, Xanthomonas translucens pv. poae
atggcgcgcgctaacgcgatgctgctgcccgatgccgcgctggccgccttgcgcgggcagtggcggctacaccgcggcgcgtggttgctgggcgatgcggcgccgcaaccgatctcgctgcgcatgccgacccaggcccaggccagcgccggattcgatgcgttcggcgcctggctgcgcgcctggcgcaccacgccgttgccggggcatgtggaatggcgcgatgtgaaatggtcgcaactcggcctgcaatgtctgccgcacgcctggcaaccgaacgccgatgaggccgcgctggcgctgggcgaacacgcgcgctggcagcgcgcacgccagcgcagcgcagcgctcgtcgcgcgctggccgcaggcactggggtttgccgcgcgcctgcgccggcagttcgacctgctcgccgatgcaccggaagcggagttccttcgcctgctcgcggtggtcgagtggctgcacgcgcatcgcgacagcggcctgttcctgcgccagttgccgatcgccggcatcgacagcaaatggatcgagccgcgccgcggggtcatcgccgactggctggccgggctgcgcggtatcgtcgaaccgcgcggcttcgacagcgtgtccggactgcgccgcgcgccggaccgggtgcgcctgcgcctgctcgatccggacctgcgcgcgcggctcggcgggctggaggacgtgcaggtgccgatcgcgcagatcgccgcgctgcagctgccggtgcggcaagtgctgatcgtggagaatcgcgagaccggcctggcctgcgaggatctgcccggcacgctgctgctgatggcgcgcggctacgcggtggactacgtgcgcgccatcgactggctgcaggccttgccgctgtactactggggcgacatcgatacccacggtctggcgatcctgcatcgcttgcgccggcatgcgccgcggacggtcgcgctgctgatggacgaagccaccttgcgcgctacgccatccgagctgtggggacacgaacgccgccagcatcgcgcgcagcggctggatgcgctcaccgctgccgagcaggccttgtacaccgacctgcgcactggccgtttcggccccgcgccgcgcctggaacaggagcgcatcgcctggaattacgcgtggccgcgtatccgtgccgcactggccgaagagcgcgccgaaccgtgcgcgatcgtgcgctga

SEQ ID NO: 47548 - DNA, 1470 bp, Xanthomonas translucens pv. arrhenatheri LMG 727
atgaaacaccgcgcccgcatcgcccgctaccgcagcctgcgcgagcagccgctgtggaagctgctcgccgccgatcacgcgccggaagtcatcggcctgctgcagtcgctgctgctggaatccgaacgccggctgccggcggcggtgctgcacgaacgcctgcagcgcatgctcgacgaactcaatgccgagcagctgtcgcgcgagttgccgcgcaccgcccaggcctatgtggcgcactggctggcgcagggctggctggagcggcggctgccggacggcgcgcagcaggaagaatacgaactgtccacccaggccacgcaggcgatccgcttcgccgatggcctggagcacgcgcgcggcgcggccaccgagagccgtctggccttggtgatgcagcagctggcgcagctggcggcgttgaccgagaccaatccggacgcgcggctgtcggcgctgcgcgacgagcgcgaccgcatcgatgcggagatcgcgcgggtttccaagggcaaggtcgccgcgctggacggcaagcgcgcgctggaacgcgcgcgccaggtgatcgcgctggccgacgagctgaccgaggatttccgccgcgtgcgcgacgatttcgagcagctcaaccgcgacttccgcgagcgcatcatcgacgacgaaggcgagcgcggcgagatcctgggcaagctgttcgaaggcgtggacgtgatcggcgacagcgatgccgggcgcagtttccaggcgttctgggccttgctcaacgatgccgagcagagcgcgcagctggacgcggcgctggagacggtgctggcgcgctcgttcgcgcgcaagctcgaccgccgcgagcgcggcttcctgcgcgggctgaccggcaccatgctcgagcgcggcggccaggtgcacgacgtgatgcagcatttcgcgcgcagcctgcgcggtttcgtgcagagccgcggctatctggagcagcgccggctcaaccagctgctcaagcaggcgcaggccgaggcgctggccttgcgcgatcacatcccggcgcagcgcggcatcggccgcgacctgaacctgaccaccagccgcctgcgctcgctggcgcaatggcggctgcacgacccgcgccagcagcaggtcgagggcggcatccagcgcaacgaggcggcggcgatttcgctggacagcgtcggcgacctggtggcgcagtcggaaatcgacttccgcagcctgcgccgcgatctgttcgacctgctcgccgagcagccgcaactgtccatcgcccaggtgctgacccagcgcgaggccagccagggcctgggcagcgtgatcggttacctgtcgctgggcacccgccatggcgtggtcgccgccgggcagcacgagatcgcgcaatggcgcggcggcgacggccactggcgccgcgcgcgcattccgttggtgtggttcacccaggagaaacgccatgaactggcatga

SEQ ID NO: 47549 - DNA, 705 bp, Xanthomonas translucens pv. arrhenatheri LMG 727
atgaactggcatgagcacgaatgggatgccgagcaagaacgcctgccggacgcggccgacaacgcggcgcccgacgccggcagcggcctgttccccggcgacagcgggcggctgccggtggaggcgcggcgcgcgctgtgccagctgctcagcggccccagcgtggacgcgcagcgccacagcaagctgtggccggcgttgctgcgcagcgaggcagcgatccgcagcgtcctggccgacctgttcctggaactggtgctggaccgcgaggccggcatcgccttcacccgccaggccgacaccggcgaactggaagcgccggtgctgctgcgctcctcgccgctgaccttcatcgattcggtgctgctgctgtacctgcgccagcaactggccgaagccgatgcgcgcggcctgcgcgcggtggtggaggaagcgcagctgggcgaagcgctggcggtgtacgagaagaacctgtccaccgaccgcgccggtttcctgcgccgggtcggcaatgccgtgcagaagatgaaggacaaccacatcctgacccgcctgcgcggcgaagacgaacgctacgaagtctcgccggcgctgaagctgctgttctcggccgaggatgtcgccgcgctggcgcaggtgtaccggcagctgcgcgaaggcccgggcagcggcgaggacgccgccgaggctgcacaggacgcctag

SEQ ID NO: 47550 - DNA, 3576 bp, Xanthomonas translucens pv. arrhenatheri LMG 727
atgaaatcctccgcttccacgcctggcctgttcgccggcgatctgcccgatccgcgcctccagcagttccgcatgcgccgcctgcaggtgcacaactggggcacgttttccggcctgaccgagatcccgatcgccgcgcgcggcttcctgttcgtcggccgttccggctcgggcaagtccaccctgctcgatgcgatgtcggcgctgctgaccccgccgagcatcgtcgatttcaacgccgccgcgcgcgaggccgagcgcagcggccgcgaccgcaacctggtgtcctacgtgcgcggcgcctgggccgaccagcaggacagcgaatcgggcgagatcgccacccagtacctgcgcaagggcgccacctggaccgcgctggtgctggaataccgcaacggcgaggaccgcgtggtcagcctggtgcggctgttctggatcgccggcaacggcaccgccgcggccgacgtgcgcaagcactacatggtggccgagcgcgcgttcgacatcgccgccgacctggacggcttcgatctggacctgcgcaagctcaagcagcgcctgcacgacgtgcaccatttcgacagcttcgccggctatgccgaacgcttccgccaccagctcggcatcggcaacgagatggcgttgcggctgctgcacaagacccagtcggcgaagaacctcggcgacctcaacgccttcctgcgcggcttcatgcttgaggagccgaagaccttcgacgccgccgagcgcctggtcggcgatttcgccgaactcgatggcgcgcatcaggcggtggtgaccgcgcgccgccaggtcgagaccctgctgccggcgcgcgcgcaccacgccgagctgatggcggtgcgtcgccagcgcagcgaactggacgaactcaagctcggcatcgacagctaccgcgagcagcgccgcctggcgttgctggatgcacggctgcaggaactggatacccaggaccgcggcctggccggggaggaagggcaacgccgtgccgcgctggagaaccatcagcggcgcctggacgacctggaagcgcagcgccgcgcgcagggcggcgagcgcatcgatgcgctggaacgcgagcgcggccagcaggaaaccgagcgcgaccgccgcgccgccaagcgcagccaggccgagcaggcctgccgccagctggaacaggtcctggccggcagcgcgcagggcttcgccgagcaggccgcacaggcgcgcgcggcgctggaggacggcacgcgcgcggccgccgaactcgacgaggcgatcggccagcgcatcgccggcaaggccgaggacgccaggcgctttgccgaagtgcgcgccgagatcgacgcgctcaagcgcaatccatccaatattcctgcaccgatgcaggcgctgcgcgcgcgcctgagcgccgacaccggcgtgcccgaggccgccttgccgttcgtcggcgagctgctgcaggtgcgcagcgaggacgccgactggcgcggcgccatcgagcgcgtgctgcacggcttcgcgcaatcgctgctggtggacgaacgccattacgccgacgtggccgactgggtcaaccgcacccatctgggcatccgcctggtctattaccgggtgcgcgacaacgagcacgccttgcctgggcgcgcgccggccgccggctcgctgctgcacaagctggaactgcgcgagcacgccttcgccggctggctgcgccgcgaactgggcaagcgcttcgactacgactgcgtggacagcgccaaggcgctgcgccatgccgagcgcgcgatcacccgcgaaggccaggtcaagcatcccggcgagcgctacgagaaggacgaccgccatgcggtcaacgatcgccggcgctggctgctgggcttcgacaaccgcgacaagctggccttgttcgaggaagagggcctggcgctggcgcagcgcatcgctgcctgcgacgccgacgtggccgcgctgcgcgcgcgccgcgaacgcgacggcgcgcggcgcctggcccagcacaccctggccaacctggcctgggacgagatcgacgtggccgcgccgctgcagcgcctggacgacatcgccacggcgctgcgccagttgcgcgagggcgatgccaacctgcgcgcgctgggcgaggcgatcgaccatgcgcgcgccgacatcaagcaggccgagcgcactttcgatggtgtgcgcaccgagcggatcactctcggtgccgagcgcgcgcggctggagaagcagcggctgtcctgcgccgacgcggacgcgcgcgtggtcacgccgctgcagcggcaggggctggacgagcgcctcgctggcctgggcgtgctgagcctggacaatctcgaggcgcattttcgccagatcggcaatgccatcgtcgagcagaccagcgccagcgacaaggaacacaaccgcctggagcaactgctgctcggctgcttccgccgctactgccagcaatggcccgaagacagcggcgatttcaccgtcagcctgagcagcgccgaggatttcctcgcgcgcctgcagcgcctggaacgcgacggcctgccgcagcacgaggcgcgcttcttcgagctgctgcagagccagagcaagaacaacctgctggccctgcagcggcataccgccgaggcacgcaagtccatcgcccagcgcctggacgaggtcaatgccagcctggagcaggtgccgttcaaccgcggcaccttgctgaccatcgaactgggcgaccgccgcctgccggaggtgatcgaattccaccagcgcctgcgcgacgtgctcggccaccaccagaccgagcagcgcgaactggccgaacaacagttcgcggtgctgcgcgaactggtgcgccggctcgggtcgcaggacggcgaagacaaacgctggcgcgagctggtgctggacgtgcgcctgcacgtggaattcgtcggcgtcgagctcgatgccgccacccgccagcaggtggagatctaccgcagcggcgccggcaagtccggcggccagcggcagaagctggccaccacctgcctggccgcggcgctgcgctaccagctcggcggcgaggacggcgaactgccgcgttactgcgcggtggtgctggacgaagccttcgacaaggccgacaacgagttcaccgcgctggcgatgaacatcttcgagaacttcggcttccagatggtggtggccacgccgctgaagtcggtgatgaccctggagccgttcatcggcggcgcctgtttcgtcgagatcagcggccgccacgattcgggcgtgctgctgatcgaatacgacgagcaggcgcgccggctcaagctgcccgagcgcacgcgtggcgcgaatgcggcggacgccaccgcggcaacaccggacgcgcaggaagcgcgggaggccgagcaggtgcagccggcgccgcagcggctgcgcgcggcgcctgctgtgcgtagcattgcggctgatcctgcggttgtcgatgctgccgccatggcagccacgccgcagcgcacgccacccaagtccaagtccaagtcaaaacccaaatccaagccgaaggcctga

SEQ ID NO: 47551 - DNA, 1179 bp, Xanthomonas translucens pv. arrhenatheri LMG 727
atggcgcgcgctaacgcgatgctgctgcccgacgccgcgctggccgcgctgcgcgggcaatggcggctgcaccgcggcgcctggttactgggcgaggccgcaccgcaaccagtggcgctgcgcatgccgacccaggctcaggccagcgccggattcgaggcgttcggtgcctggctgcgcgcctggcgcaccacgccgttgccggggcacgtggaatggcgcgatgtgaaatggccgcagctcggcccgcaatgtctgccgcaggcctggcagccgaacgccgacgaggccgcgctggcgcttggcgaacacgcgcgctggcagcgcgcacgccagcgctgcgcggcgctggtcgcgcgctggccgcaggcactggggtttgccgcacgcctgcgccggcagttcgatctgctcgccgatgcgccggaagcggatttcgtgcgcctgctcgcggtcgtcgagtggttgcatgcgcatcgcgacagcggcctgttcctgcgccagttgccgatcgccggtatcgacagcaaatggatcgagccacgccgcggagtcatcgcggactggttggcggggctgcgcggcatcgccgaaccgcgcggcttcgacagcctgtccggactgcgccgcgcgcccgaccgggtgcgcctgcgcctgctcgatccggcgttgcgcgcgcggctcggcgggctggacgacatccaggtaccgatcgcgcaggtcgccgcgctgcggttgccggtgcggcaggtgctgatcgtggagaaccgcgagaccggcctggcctgcgaggacctgcccggcacgctgctgctgatggcgcgcggttacgcggtggactacgtgcgcgccatcgactggctgcagggagtgccgctgtactactggggcgacatcgacacccacggcctggcgatcctgcatcgcctgcgtcggcacgcgccgcggacggtcgcgctgctgatggacgaagctaccttgcgcgatacgccagccgcgctgtggggacacgagcgccgccagcatcgcgcgcagcggctggatgcgctcagcgctgccgagcaggccttgtacaccgacctgcgcagcggccgcttcggccccgcaccgcgcctggagcaggagcgcatcgcctgggactatgcgtggccacgcatccgcgccgcgctggccggatag

SEQ ID NO: 47552 - DNA, 1470 bp, Xanthomonas translucens pv. phlei
atgaagcaccgcgcccgcatcgcccgctaccgcacgctgcgcgagcagccgctgtggaagctgctggccgccgaccaggcgccggaagtcatcggcctgctgcagtcgctgttgctggacagcgaacgccggctgccggcggcggtgctgcacgaacgcctgcagcgcatgctcgacgaactcaatgccgagcagctgtcgcgcgagctgccgcgcaccgcgcaggcctatgtggcgcactggctggcgcagggctggctggagcggcggctgccgaacggcgcgcagcaggaagaatacgaactgtccacccaggccacgcaggcgatccgcttcgccgatggcctggagcacgcgcgcggcgcggccaccgagagccgtctggccttggtgatgcagcagctggcgcagctggcggcgttgaccgagaccaatccggacgcgcggctgttggcgctgcgcgacgagcgcgaccgcatcgatgcggagatcgcgcgggtctccaagggcaaggtcgccgcgctggacggcaagcgcgcgctggaacgcgcgcgccaggtgatcgcgctggccgacgagctgaccgatgatttccgccgcgtgcgcgacgatttcgagcaactcaaccgcgacttccgcgagcgcatcatcgacgacgagggcgagcgcggcgagatcctgggcaagctgttcgaaggcgtggacgtgatcggcgacagcgatgccgggcgcagtttccaggcgttctgggccttgctcaacgatgccgagcagagcgcgcagctggacgcggcgctggagacggtgctggcgcgctcgttcgcgcgcaagctcgaccgccgcgagcgcggcttcctgcgcgggctgaccggcaccatgctcgagcgcggcggccaggtgcacgacgtgatgcagcatttcgcgcgcagcctgcgcggtttcgtgcagagccgcggctatctggagcagcgccggctcaaccagttgctcaagcaggcgcaggccgaggcgctggccttgcgcgagcacattcccgcgcagcgcggcatcggccgcgatctcaacctgaccaccagccgcctgcgctcgctggcgcaatggcggctgcacgacccgcgccagcagcaggtcgagggcggcatccagcgcaacgaggcggcggcgatttcgctggacagcgtcggcgacctggtggcgcagtcggaaatcgacttccgcagcctgcgccgcgatctgttcgagctgctcgccgagcagccgcaactgtccatcgcccaggtgctgacccagcgcgaggccagccagggcctgggcagcgtgatcggttacctgtcgctgggcacccgccatggcgtggtcgccgccgggcagcacgagatcgcgcaatggcgcggcggcgacggccactggcgccgcgcgcgcattccgttggtgtggttcacccaggagaaacgccatgaactggcatga

SEQ ID NO: 47553 - DNA, 705 bp, Xanthomonas translucens pv. phlei
atgaactggcatgaccacgaatgggatgccgagcaggaacgcctgccggacgcggccgacagcgtggcgcccgacgccggcagcggcctgttccccggcgacagcgggcgtctgccggtggaggcgcggcgtgcgctgtgccagctgctcagcggccccagcgtggacgcgcagcgccacagcaagctgtggccggcgttgctgcgcagcgaggcggcgatccgcagcgccctggccgacctgttcctggaactggtgctggaccgggaggccggcatcgccttcacccgccaggccgacaccggcgaactggaagcgccggtgctgctgcgctcctcgccgctgaccttcatcgattcggtgctgctgttgtacctgcgccagcaactggccgaagccgatgcgcgcggcctgcgcgcggtggtggaggaagcgcagctgggcgaggcgctggcggtgtacgagaagaacctgtccaccgaccgcgccggtttcctgcgccgggtcggcaatgccgtgcagaagatgaaggacaaccacatcctgacccgcctgcgcggcgaagacgaacgctacgaagtctcgccggcgctgaagctgctgttctcggccgaggacgtggccgcgctggcgcaggtgtaccgccagctgcgcgaaggccccgattctggcgaggacgccgccgaggctgcgcaggacgcctag

SEQ ID NO: 47554 - DNA, 3498 bp, Xanthomonas translucens pv. phlei
atgcgccgcctgcaggtgcacaactggggcacgttttccggcctgaccgagatcccgatcgccgcgcgcggcttcctgttcgtcggccgctccggctcgggcaagtccaccctgctcgatgcgatgtcggcgctgttgaccccgccgagcatcgtcgatttcaacgccgccgcgcgcgaggccgagcgcagcggccgcgaccgcaacctggtgtcctacgtgcgcggcgcctgggccgaccagcaggacagcgaatcgggcgagatcgccacccagtacctgcgcaagggcgccacctggaccgcgctggtgctggaataccgcaacggcgaggaccgcgtggtcagcctggtgcggctgttctggatcgccggcaacggcaccgccgcggccgacgtgcgcaagcactacatggtggccgagcgcgcgttcgacatcgccgccgacctggacggcttcgacctggacctgcgcaagctcaagcagcgcctgcacgacgtgcaccatttcgacagcttcgccggctatgccgaacgcttccgccaccagctcggcatcggcaacgagatggcgctgcggctgctgcacaagacccagtcggcgaagaacctcggcgacctcaacgccttcctgcgcggcttcatgctcgaggagccgaagaccttcgacgccgccgagcgcctggtcggcgatttcgccgaactcgatggcgcgcatcaggcggtggtgaccgcgcgccgccaggtcgagaccctgctgccagcgcgcgcgcaccacgccgagctgatggcggtgcgccgccagcgcagcgaactggacgaactcaagctcggcatcgacagctaccgcgagcagcgccgcctggcgttgctggatgcgcggctgcaggaactggatacccaggaccgcggcctggccggcgaggaagggcaacgccgcgccgtgctggagaaccatcagcggcgcctggacgacctggaagcgcagcgccgcgcgcagggcggcgagcgcatcgatgcgctggaacgcgagcgcggccagcaggaaaccgagcgcgaccgccgcgccgccaagcgcagccaggccgagcaggcctgccgccagctggaacaggtgctggccggcagcgcgcagggcttcgccgagcaggccgcacaggcgcgcgcggcgctggaggacggcacgcgcgcggccgccgaactcgacgaggcgatcggccagcgcatcgccggcaaggccgaggacgccaggcgctttgccgaagtgcgcgccgagatcgacgcgctcaagcgcaatccatccaatattcctgcaccgatgcaggcgctgcgcgcgcgcctgagcgccgacaccggcgtgcccgaggccgccttgccgttcgtcggcgagctgctgcaggtgcgcagcgaggacgccgactggcgcggcgccatcgagcgcgtgctgcacggcttcgcgcaatcgctgctggtggacgaacgccattacgccgacgtggccgactgggtcaaccgcacccatctgggcatccgcctggtctattaccgggtgcgcgacaacgagcacgccctgcctgggcgcgcgccggccgccggctcgctgctgcacaagctggaactgcgcgagcacgccttcgccggctggctgcgccgcgaactgggcaagcgcttcgactacgactgcgtggacaacgccaaggcgctgcgccatgccgaacgcgcgatcacccgcgaaggccaggtcaagcatcccggcgagcgctacgagaaggacgaccgccacgcggtcaacgatcgccggcgctggctgctgggcttcgacaaccgcgacaagctggccttgttcgaggaagagggcctggcgctggcgcagcgcatcgccgcctgcgacgccgacgtggccgcgctgcgcgcgcgccgcgaacgcgacggcgcacggcgcctggcccagcacaccctggccaacctggcctgggacgagatcgacgtggtcgcgccgctgcagcgcctggacgacatcgccacggcgctgcgccagttgcgcgagggcgacgccaacctgcgcgcgctgggcgaggcgatcgaccatgcgcgcgccgacatcaagcaggccgagcgcactttcgatggtgtgcgcgaagagcggatcgccctcggcgtcgaacggtcgcggctggaaaagcagcggctgtcctgcgccgacgcggacgcgcgcgtggtcacgccgttgcagcggcaggggctggacgagcgcctcgctggcctgggcgtgctgagcctagacaatctcgaggcgcattttcgccagatcggcaatgccatcgtcgagcagaccagcgccagcgacaaggaacacaaccgcctggagcaactgctgctcggctgcttccgccgctactgccagcaatggcccgaagacagcggcgatttcaccgtcagcctgagcagcgccgaggatttcctcgcgcgcctgcagcgcctggaacgcgacggcttgccgcagcacgaggcgcgcttcttcgagctgctgcagagccagagcaagaacaacctgctggccctgcagcggcataccgccgaggcgcgcaagtccatcgcccagcgcctggacgaggtcaatgccagcctggagcaggtgccgttcaaccgcggcaccttgctaaccatcgaactgggcgaccgccgcctgccggaggtgatcgaattccaccagcgcctgcgcgacgtgctcggccaccaccagaccgagcagcgcgaactggccgaacaacagttcgcggtactgcgcgaactggtgcgccggctcgggtcgcaggacggcgaagacaaacgctggcgcgagctggtactggacgtgcgcctgcacgtggaattcgtcggcgtcgagctcgatgccgccacccgccagcaggtggagatctaccgcagcggcgccggcaagtccggcggccagcggcagaagctggccaccacctgtctggccgcggcgctgcgctaccagctcggcggcgaggacggcgaactgccgcgttactgcgcggtggtgctggacgaagccttcgacaaggccgacaacgagttcaccgcgctggcgatgaacatcttcgagaacttcggcttccagatggtggtggccacgccgctgaagtcggtgatgaccctggagccgttcatcggtggagcctgtttcgtcgagatcagcggccgccacgattcgggcgtgctgctgatcgaatacgacgagcaggcgcgccggctcaagctgcccgagcgcacgcgtggcgcgaatgcggcggacgccaccgcggcaacaccggacgcgcaggaagcgcgggaggccgagcaggcgcagccggcgccgcagcggctgcgcgcggcgccggctgtgcgtagcgttgcggctgatcctgcggttttcgatgctgccgccatggcagccacgccgcagcgcaggccacccaagtccaagccaaaacccaaatccaagccaaaggcctga

SEQ ID NO: 47555 - DNA, 1179 bp, Xanthomonas translucens pv. phlei
atggcgcgcgctaacgcaatgctgctgcccgacgccgcgctggccgcgttgcgcgggcaatggcggctgcaccgcggcgcctggctgctgggcgaggcggcgccgcaaccggtggcgctacgcatgccgacccaggcccaggccagcgccggattcgatgcgttcggcgcctggctgcgcgcctggcgcaccacgccgttgccggggcacgtgcaatggcgcgaggtgaaatggccgcagctcggtgcgcaatgtctgccgcacgcttggcagccgaacgccgatgaggctgcgctggcgctgggcgaacacgcgcgctggcagcgcgcacgccagcgcagcgcagcgctcgtcgcgcgctggccgcaggcactggggtttgccgcgcgcctgcgccggcagttcgacctgctcgccgatgcgccggaagcggagttccttcgcctgctcgcggtggtcgagtggctgcacgcgcatcgcgacagcggcctgttcctgcgccagttgccgatcgccggcatcgacagcaaatggatcgagccgcgacgcggggtcatcgccgactggctggccgggctgcgcggcagcgccgaaccgcgcagcttcgacagcctgtccgggctacgccgcgcgcccgatcgggtgcgcctgcgcctgctcgatccggagctgcgcgcgcggctcggcgggctcgacgacatccaggcgccgatcgcgcagattgccgcgctgcaactgccggtgcggcaggtgctgatcgtggagaaccgcgagaccggcctggcctgcgaggacctgcccggcacgctgctgctgatggcgcgcggttacgcggtggactacgtgcgcgccatcgactggctgcagggagtgccgctgtactactggggcgacatcgacacccacggcctggcgatcctgcatcgcctgcgccggcacgcgccgcggacggtcgcgctgctgatggacgaggccaccttgcgcgagacgccatccgaactgtggggacacgagcggcgccagcatcgcgcgcagcggctggacgcgctcagcgccgccgagcaggctttgtacaccgacctgcgcacgggccgtttcggccccgcaccgcgcctggagcaggagcgcatcgcctgggactacgcatggccgcgcatccgcgccgcgctggccggatag

SEQ ID NO: 47556 - DNA, 1470 bp, Stenotrophomonas maltophilia
atgaagcaccgcgaacgcatctcccgttaccgccatctgcgcgaacagccccagtggaagctgcttgccgccgaccacgccccggaaatcatcggcctgctgcaggggctgctgatggacggcgagcgcacgctgccgtcgtcggtgctcaacgagcgcctgcagcgtgcgctggatcagctcaacggcgacgaactgtcgcgcgagctgccgcgtaccgcgcaggcctatatcgcacactggctggcccagggctggctggaacgccgcctgcccgacggtgccgaccaggagcagtacgagctgtcgaccgcggcactgcaggcgatccgattcgccgacggcctcgagcaggcccgtgtggccgccaccgaaagccgcctggcgctggtcatcgagcagctctcgcagctggccgcgcagaccgaatccgatccggacgcccgcctgtcggcgctgcgcgacgagcgcgaccggatcgacgccgagattgcccgtgtcggcgccggccgtgtgatcgcgctggacggcaagcgcgcgctggaacgtgcgcgccagatcatcggcctggccgacgagctgaccgaggacttccgccgcgtgcgcgacgacttcgagcagctcaaccgcgagttccgcgaacgcatcatcgacgacgagggcgagcgcggcgatgtgctgtcgcagctgttcgaaggcgtggacgtgatcggcgaaagtgacgccgggcgcagcttccaggccttctggcgcctgctcaacgacgccgagcagagcgcccagctcgatgccgcactggaagcggtgctggcgcgcggcttcgcccgccgcctggaccgcaacgaacgcaacttcctgcgcggtttcaccagcaccatgctcgagcgcggtggacaggtgcacgatgtgctgcagaacttcgcgcgcagcctgcgcggcttcgtgcagagccgtggctacctggaacagcgtcgcctcaaccagctgctcaagcaggcgcagtccgaagcgctcgctctgcgcgacgagttccccgcacaacgcggcatcggccgcgacctgcagctgaccaccagccgcctgcgctcgtggtcgcaatggaaactgcacgatccgcgcagcgcccaagtcgatggcaacgtcgaatacaacgacgcagccgcgatcagcctggaaagcgtcggcgatctggtcgcctcgtccgaaatcgatttccgcaccctgcgccgcgacctgcacgacctgctcgatgcacagccgcgtctcagcatcgcccaggccctgtcgcagcgcgaagcgccgcagggtcttggcagcgtcatcggctacctgtcgctgggcacgcgcttcggcaacgtggtcgccggcgagcaggagcttgcgcaatggcgtggtggcgacggccagatccgtcgcgcccgcatcccgctggtttggttcacccaggagagacgccatgagctggcatga

SEQ ID NO: 47557 - DNA, 702 bp, Stenotrophomonas maltophilia
atgagctggcatgaagatcccatcgacgcaccgcaggccgacgtggcggaagacgcctacgaggccgagccggtggcggccgtggcgcagccccgccgtggcaacgacgtgtactacctcggcgataccgggcgcctgccgctggatgcgcgccgtgcgctgtgccagctgctgatcggccccagcatcgaccagctgcgccacgccaagctgtggccggcgctgatccgcagcgaggcggccatccgctcatcgctggccgacctgttcctggaactggtgctcgaccgcgacagtggcgtggcgttcacccgccaggccgataccgaagacgtcgatgcgccggtgctgctgcgcacctccccgctgaccttcatcgactcggtgctgctgctgtacctgcgccagcagctggccgaggccgatgcgcgcggcaaccgcgcggtggtcgccgacgccgagatggccgaagcgctggccatctacgaaaagaacctgtccaccgaccgcgccggcttcaaccgtcgcgtcgcatcggcggtgcagaagatgaaggacaaccacatcctgacccgcctcagcggccaggaagaccgccacgaagtctcgccggcgctgaagctgctgttctccgccgaagacgtgtcccagctttcggcggtctaccgccagctgcgtgaaaccccggccgccgaggcctga

SEQ ID NO: 47558 - DNA, 3381 bp, Stenotrophomonas maltophilia
atggctatctccaagcacactcccgccctgttcaacgaaggcctgccggacccgcgcctgcagcagttccgcatgcgccgcctgcaggtgcacaactggggcaccttcaacggcctgaccgaagtaccgatcgccgaacgcggcttcctgttcgtcggccgctccggctcgggcaagtcgaccctgctcgatgccatgtccgcgctgctgacgccaccggccatcgtcgacttcaacgccgctgcacgtgaagccgagcgcagtggccgcgaccgcaacctggtgtcctacgtgcgcggcgcgtgggccgaccagcaggacagcggcaccggcgaaatcgccacccagtacctgcgcaagggcgcgacctggaccgcactggtgctggaataccgcgccggcgatggccgcgtggtcagcctggtgcgcctgctgtggatctccggcaatggcacctcggccggcgatgtgcgcaagcactacatgatcgccgagcgcccgttcgacatcgccaaggacctcggcggtttcgacctggacctgcgcaagctgaagcagaagctgcccgacctgcaccacttcgacaccttctccggctacgccgagcgcttccgcgacctgctcggcatcgacaacgagatggcgctgcgcctgctgcacaagacgcagtcggcgaagaacctgggcgacctcaacgtcttcctgcgcgacttcatgctcgacacgccgaagaccttcgacgccgccgagcgcctggtcagcgacttcgccgagcttgatggcgcgcaccaggcggtggtcaccgcccgccgccaggtggaaaccctgttgccggcccgcgcctactacaacgacctgaaggaaatgcaccgccgtcgtggcgacgacgaagcgctgaagctgggtgtcgacagcttccgcgaaagccggcgccaggcgctgatcgaagcgcgcctgcgcgagatggacgtgcgtgaccgcggcctgcttggcgaagaagcccagcgccgtgccgcgctcgacaaccacaccgagcgcctggccgaactggagctgcagcgccgccagcagggcggtgagcgcatcgaggaactggaacgcgagcagggtcgtgccgaagctgagcgcgatcgccgtcaggccaagcgcgagcaggcacgccaggcggcgcagcagctgggggccgaactgccggacgacgcccatggcttcgccgaactggtcgagcgcgcacagaacgagctgcaggaccgccagcgtgcctcctcggcactggacgacgcgatcagtgaccgcctgggcggcaagcgcgatgacgagcgccgcttcggcgaggtccgtgccgaactcgaagcgatgcagcgcacgccctccaacatcccggcgccgatgcagaagctgcgcgcgcgcctggccgaggaaaccggcatcgccgaggcggcactgcccttcgtcggcgaactgatccaggtccgctcggaagagcagggctggcagggtgccatcgagcgcgtgctgggtggcttcgcgctgtcgctgctggtcgacgacaagcactacaacgacgtcgccgaatgggtgaaccgtacccaccttggcatgcgcttcacctactaccgcgtgcgccgcaacgatgatgcattcgcccgtgagccgtcggcgaagtcgctgctgcacaagcttgaactgcgcgagcatgtgttcgaaagctggctgcgccgcgagctgggcaagcgcttcgactacgaatgcgtggatgccaagcagctgcgcaacgtcgaccgcggcatcacccgcgaaggccaggtcaagcatcccggcgaccgtttcgagaaggacgaccgcagtgcggtgggcgaccgccgtcgctggatcctcggcttcaacaaccacgacaaggtgggcgccttcgagcgcgaagcacaggaactggccaagcgcatcgccagctgcgagaccgacatcgcgcgcctgcgcgggcagcgtgaccgcgacaacgaacgccgcctggcctgccacgagctggtcagcatcagctggaacgagatcgacatcgccgctccgcagcagcgcctgagcgatatcgaagccaccctgcgcgacctgcgtgaaggcaacgccgatctcgccaagctggccaagcagatcgacgccgtgcgcgccgacatcgagcagtcccgccgcacctatgaagacgtccgcgtcgagcgcggccagctggtcaaggaacgtgatcgccttgaccgcgcacgccagcagagccgcgcactggtgctgccgagcctggcccaggagcaggaagccggcctcgccgagcgcctgcaggaacaggggccgctcagcctggaaacgctcgaagcgcacatgcgccaggtcagcaacgcgctgaacgagcagttgtcgtcctcgcagcaggacctcaaccgcatcgagaaccagctgatcggctgcttccgtcgcttcatccagcagtggccagaggagtcgggcgacttcaccgtgtcggtggcctcggccgaggacttcctcgcacgcctcgaacggctggaacgcgacggcctgccacagcacgaagagcgcttcttcgacctgctgcagaaccagagcaagaacaacctgctggccctgcagcgccacagcgcagaggcccgcaagtcgatcggccagcgcctggacgaggtgaacgccagcctggagcaggtgccgttcaaccgtggcacgctgctgaccatcgaactgagcgaccgccgcctgccggaggtcgctgagttccacctgcagctgcgcgaggtgctgtcgcagcagcagaccgagcagcgcgagctggccgagtcgcagttcaccgtgctgcgccagctggtcaaccgcctcggctcgcaggaaggcgaggacaagcgctggcgcgagctggtgctggacgtgcgcatgcacgtggagttcatcggcgtcgagctggatgcggaaacgcgccagcaggtcgagatctaccgcagcggcgccggcaagtccggtggccagcgtcagaagctggccactacctgcctggcggctgcgctgcgctaccagctcggcggcgctgacagccagctgcccagttacgcggcggtcgtgctcgacgaggccttcgacaaggccgacaacgagttcaccgcgctggcgatgaacatcttcgacaacttcggcttccagatggtggtcgccaccccgctgaagtcggtgatgacgctggagccgttcatcggtggcgcctgcttcgtcgaaatcagcggccgccacgactccggcgtactgctgatcgagtacgacgaagagggcaagcgcctgaagctgccggagcgcagccgccagcaggccaacgaaccggaagaagccgaggcctga

SEQ ID NO: 47559 - DNA, 1353 bp, Pseudomonas aeruginosa; identical to SEQ ID NO: 44235

SEQ ID NO: 47560 - DNA, 663 bp, Pseudomonas aeruginosa; identical to SEQ ID NO: 44272

SEQ ID NO: 47561 - DNA, 2940 bp, Pseudomonas aeruginosa; identical to SEQ ID NO: 44273

SEQ ID NO: 47562 - DNA, 1182 bp, Pseudomonas aeruginosa; identical to SEQ ID NO: 44163

SEQ ID NO: 47563 - DNA, 1632 bp, Bifidobacterium longum; identical to SEQ ID NO: 42278

SEQ ID NO: 47564 - DNA, 675 bp, Bifidobacterium longum
atgaccgtggccgaggaacacgaggaacacgaggagcatatggacaacgccaacccgtacgccctgttcgaaggcgacaccggcgacatgccggccgaggcacgcatggccgccatcgccctcaaacgcgaccgctatatcagcgggcccacctacgacaccgtgctcgacaaccgcgacgccgtcgtacgctccctgaacaacgacctgctcgacttggtgatcaacgaacgctaccgcatcatgtacgccacgcccgtggccggcgacgacgtgaccctgcgctcgctcaaaacccgtgtcagcctcaaacgcgaggaggccgcgctgctcgccttcctgcgcatccgcgtcctcgaatacgagaacgtgcacgccgaccccgccgactggctcgtcagctttgaggagatccgcgccgcgctcgccaccggcgccggctatctggccgcccgcaacgacgaggaaggcgtggcaaagcagatcggcgccatcgtctccgcgatgatcacctacgggtatttggtgcgcctggacaacgaagccatgtaccagatcacgccgctcgtgcccgtggtgctcgaccgcgaactggccgacacctggctcgacgtcgcggaacacggcgacggcgacacggaagatgacgatgacgacgagaagggagccgaatga

SEQ ID NO: 47565 - DNA, 3549 bp, Bifidobacterium longum
atgatgcaggcgacagacgtgcagatgatcgcggaccggtggatgctggaatcccgccgactcatcaactggggctcctatgagggctaccacgaattccgcccctccacggaccacaagctgccggtgaccctgctcgccggcgccagcgaatccggcaaatccacgctggtcgacgcgcagatctccctgctgtacccaaccggtacgccgttcaacaaggcctcgaactccggccgctccgaacgcagcgactacacctacctgcgcggcatggtcggcgtgggcagcaccgaaaccggcgacgagccgctctacctgcgcggccgcgacgagaacggcgcaccgcaacccgtgtggggcgccatcgtggacacctatcgcaaccagaccaccggccaggtgctctcctgcgccaaattcctctacctgatgcccggcgacggccgcggcgacgtgcgccgacagtacgtggtctggggcaagcccgtggaccccaggcgcatggaccaataccgtgacgccccgttcacgccggcccagctcaaagccacctaccccgactgcctcacattccccagcgccgaagcgttccacacacacatctggagcgcaatgggcctgagcgaggccgcctgccgactgctgcacaagatccagtccgccgacgcgccctcccggctcgacgacatcttcaaacaaggcgtgctcggcgtgcccgaagccctggacctggcccgcaccacggtcgaggactacgaacgttacgacgagaacttccacgccatggacgagaagacccgccgcatggacacgctgcgcggcatccaacaggcctacggcgaatacgccgccgcacgcggcaaggcccgcgccttcgaaccggtcaagccggccgtcgacggcacggtaccggccgtgctgcgcgactgggcattggcccgcatgcgcggcgaagtcgccgtccaactgcccgccgaccgcgccgaacaacagaacagcgaggcggaagccaagctgctgcgccgccgaaccgaagacctgcgcacccgtctcgacatgatccgcggccagatgcagggtctggacggcggcaacctgacccgactcgaactcgaactcgaccaggcccgccgcaccctcgaagacgtgcaagccaaccgaacacgaatcgaacaaacgttcgcatccatcggcgagacgctgcccggcgacgaacaagcctggaacgaacgccgcatcaacgccgtgaacttcaaacgcgaatacaacaaacgagacggcgaatgcgaggaagccctcaccgccgccatcaacgcgcgggccggcgcacgcggcgacctcgaacgactgcaacgcgacttcgaccggcaacgctcccagcgcacccgcatctcccagcagatggacgaaacccgcgccatgctctgccgcgccaccggactcacccccgccgaactgccgtacgtggccgaactcatggacgtgaacgaacacgaggaagactggcgtctcgccatgaacgtcgcctacgcgcccatcgcccagaccatcctcgtcgacaagcgccacgaacagggcttcgccgccaaagtcagcaccatcgacccgcgcaccatgccccgacgcacctggcagttcgtggacaccgcacgccactacgacgacaccggcgcgcacgcgaacatactcaccggagaacaggacggcgactggctgtccggcaaactgcgctaccgcgacgactcgcccttcgccgactggctgcgctcgcagacccaggacgaacgattcgacgccctatgcgtcaccgccatcgacgacaccgaccgcaccaaccgtcaggtgcaggccgacggtcagatcaaatccggcgcacgcggccagcacggcaccaaagaccgcgcccaggtcatcggattcgtcaacgaaacctacctcaacgcgctcgcagcgcaggtcgacgccgcccgcaacgcgctcagccaagccgacaccgactacacggccgccaaaacacagtccgataacctccaccgcgaactcgaactggccaaccagctcgcctacacgtcctgggagcgcatcgacatcgccggcgcgcaacggaccatcacggacacgcaggacgccatcgcatccatcaaaaacgatcccaagctcgccgaactcgccaaacagcgcgacgaactgaacgccgaactcgaccgtgtggaacgccagcgcatcgaatccgaccaggccgcggcccgcgccggcagcgccgtcgaagcggcgctcatctggctgcgcgaccatgccgacaccggcacgacggacgccgccggtgccaccgccgacaatgacgatgacgccgcgtccggcccgctgccggacgaagtcacggcggcgctcgccgaatcctacgacaaccgattcgccggactggcggacgccgccatgcgcgcgcacatgatcatcggcgcgggcgcggcaggaacgcaggcaccgggggagagcttccccgaacgcaccatcgccggcatcggcaaggacatggcctcccgcatcaacctgctgaacggccaggccgatgccgcacgcaccggcgtcgaatcgaaaatgagcacctacatcgcgctctacgcggccgacgatgattcgctgaccgccagcgtggaggactaccggtactatctcgacgaactcgccagcctcacccagctggccgcggtcgccgccaccgacgccgaataccggcgctgcctcgaacagctgctcaggagcttcctgaccatcaaacgcgccatcgacacggatgccagcgacatccacgaccagcttgaccgcatcaacgccatgctcaaaggccagcagttcggtcccaagcacggcagcctgtccctgcacgcggacgtgcgccgtcccgagcgcaccttctgggcgcagctcatccgcgtcatcggcaccctgaacgattggaaatccgccgacgtcaacgattccgacgcctcgcgcaaggctttcgcggcctgcgcgccgatggtcgggctgctgcgcgccgaactcgcgcaggtcaaggacgcgaacggcgtgaaaagctacggcgcccgcaacctcgacccgcgttgccgctcgtccttctacgccatcgtgcatcatgccgacggcccggatgaacgcatcacctccaccggcggccgttcgggcggcgccttgcaggagcttacctcattcgtatacggcgcggcgctcatctacctgctcggcggcggcctgaccagcgagccctcgtacaccacgctgttcctcgacgaggcgctcatcaaggccgacggccgttacacgcagcgcgccctcacggtgctgccgcgcctcggattccaggtcatcgtctccgccccggaaagcaagaccggcgaaatcctcgaggtctccaccaaggcctacgtgacctacaaggaccccgacaccggcctcacctccctgcgcgaggccgtgctgcatcagaatgacatggacgatgaatcatcgtcggatatattgaaggatgacggggttgccgaatga

SEQ ID NO: 47566 - DNA, 1176 bp, Bifidobacterium longum
atgaaagacatcgctgcgatcaccacatgcgtgaagaaacatatgcgttcacatatgtacgacatcgaaccggcatggccatttcccgtgccggtgggattgccggaccaagcatttttggaaaccaatgcgattgcggtgcatgacaacaacaatgagatacggcaatgggcaagcaagaatggttgcgaaatcataaccaagcatcgcaccataggcacctctgtcgagctgatctccaaagtcgtcgttcctgacgaatcaatagccatgcgtgtggttggtcgtacgctggcggcggaatgtcgcgaagcgcgccgccgcatagcatgtctggttgctgcttgtgacgttgctccggaaacaatcgaatcggccgctcgcatgacaggccatgaacagcctgacgacttcgatctgcttgtcagcgcagttcgatatttcaggcatcatgacgtgaccggtatgacgccgcgacagattccattgacaggattcagcggcaaatggctgaatgagtcaaaaaccaatcgtcgtaaggccatttgccgactgctcggtgtcgaaacgttgggtctgtcaaaacggccgaccgaactgcggttccgttatctcgatccggtccgcgacgatgctgagctcgaacgcatcatatggtgtccgtgggaaggcgaagcgttatccggcattaaatatgctgtcatcgttgagaacaaagacacgtatcagactatgccgccgattgcgcagggcatctgcatatggggttctggtcgcgctgtaagcgatgctgtacctgcggttcctgcactgcgtgacatgcgtatcgtgtattggggtgatatggatgcggatggactggaaatactttcgacattacgtgaatcaggtatcgaatgcgactccatcctgatggattgcgatgcatacgatcggtaccacagatttggtaccgatcgtactgaacgcagcgcgaagattgctatgcgggagcctaagccgacgcccggccttcaatcggcggagcgacgtctttatgaacgactgtgtgctggcaaaacaatcgcttatcggcgtatcgaacaggaacgcattcccatgcgtgatgcagttgacgaattacgcaagcttggcatccccgtggagtccattgaaaatcaggatttgccgatttag

SEQ ID NO: 47567 - DNA, 1470 bp, Xanthomonas campestris pv. campestris; identical to SEQ ID NO: 46719

SEQ ID NO: 47568 - DNA, 708 bp, Xanthomonas campestris pv. campestris; identical to SEQ ID NO: 46720

SEQ ID NO: 47569 - DNA, 4017 bp, Xanthomonas campestris pv. campestris; identical to SEQ ID NO: 41637

SEQ ID NO: 47570 - DNA, 1524 bp, Pseudomonas coronafaciens pv. oryzae
atgggataccaggttcgtctcgccacgagcagagatgctgcagctcactactattggagaggcgcgatgagtttgtacgagaagcaagcgcgttatcgtcgtttgcatagtgaacagtctgcctggcgcttgctgcgtgcagattcggcaccgattatcctggcgttcatcgacagcctgtttgctgacgaacaagaggtgttgttcgcacgtgcaaaagccgcccttgaggcggagttgccgacctggcagggagcgtatggcatgcaagacaacgccaactcgcacctgcgcaactggatccatgccggctggatgcgtgagcatgatgaccacctgacccgtactgacgcctttcatcaggcactgcgatttgtcgagggtcttgagagcagggataccacgacatctgccacccacctacgccgagtccaagacgctgtacgagacctagcagtcgctctcaacccgagtgctgaagagcgtttgctcgtactgcgtgaacggatggcagaactgagtgaagaagtcatgcggctggaagcaggcatcgtgcccgagctatccagtgccgaacagcgtgagcgagtacgcggtgtctaccagatggcctccgggctaaccggtgattttcgccgggttgaggatgacatccgtcaacttgaccaaagcatccgtgttcagatgatcgaatcggaaggcggtcgtggcctggttatccagaaccttctggataatgaagatgcacttttgcagacagacgctggtcaggcgtttgacggctttttcaggctcctctgcgacgagaacaggagcgtagaattccgtgagcaaatccggtcaattttgaatcgtccgactgccagatcccacctgaatgcacaagaaatccgttttctcacacatctggttcgtgagctgagtagcgaaagtcagcgggtaatttcgatacgtcgccgcacccaggaaagcctcagggcatttgtcgaggctggtgctcagagcgaacgcagggcagtcgagcaggtgttgcgccaactggaaaaactcgcagtcacctttaaggatcaagacattggcccacgcacctcactaaaggtatatgtagccagcgggccattctcggttagctcgccatcgagcattcgactgatgcaaccgcaagccagcctggataccagcaaggtggttccgcaaagtaaccagaccactgtgagtgacaccattcttgagtgtttagaggctgttcagattcaggaggtggccgaagccatgcgcgacctgctgaaaagccaagggccgatgagcctggctcagatcgccgagttgcgccctattcagggcgggcttgaggagttggtcgcccttgtccgcatcgctaaagccattgaagcggtttccctcgagggcgtcgagcatctggtggtcgctgaccgacaaggtcagaccatacgtgccaaaattcccgtgctactcctgagcgccgaccagttcccggagaatttagagagcctccccctatga

SEQ ID NO: 47571 - DNA, 360 bp, Pseudomonas coronafaciens pv. oryzae
atgccgctttacgacaccctggtgctgctggtgttgcgcaagtactaccaggagcgggaagtcattggtgagaacaaggtgatgatcgatgtcgacaccatcgccgaactcatgacccctttcttgaagctcaccaacagcagcgctcttgagcgcaagaccctcaatggctctatagctaagctgcgcgaaaagcgcctgctggcgaatgtgcgcggcgacggtgagcgattggaaatcaccccggtcattcggtacgtggtcaatgccgacttcctgaataccctgttaagcgagtaccagctgctggccgaacgggggagtgtgatgggtcaacaggaggtagaagacgatgtctga

SEQ ID NO: 47572 - DNA, 3390 bp, Pseudomonas coronafaciens pv. oryzae
atgtctgacacgaccaataccagctttggcgatctattctctacaggacagatccgcctagcggagatctcggcttacaactggggttccttccacgggttacacacggcagtgatcgaccctgaaggcaccctgatcaccggtgataacggtgcgggtaagtcgacgctcatcgatgcgcacatggcactgctcaaccgacctgggcaaacgtcattcaacatcgcagcctcgcaaggtgatcgttcagatcgcaacctgatgtcctatattcgcggcaattacgggacagcccacgacggttctcaaaccctcaacctgatgaagcgcgatggcgccaccatgaccgccttgcgtgccctataccgggccgacgacggctccgagataacgttggtttccatgttctggattcgccaagccggcgcctccatgactgacctcaagcgtttctacctggtaggtaagcggaatgtcagtctggaagtgctcctgcagcagtttggttccaacaacgtgcgccagctcaagcagtatgtcgatgacgacccaatgcttaagcacttcgacaacaatttttctgcgtaccaagagtatttcactaggctgctacgcatggaaaactccaatgcgccggcgctgctgcagcgtgcattgggtctgaagaagattgatgacctgacagcgctgatccgtgaactggtgctggagccaagcaaagttcgcgatctggctactggggttgttaaggaattcgacgatctgatcgccgtccacaatgagctggatacagctaagcagcaaaaggaggtgctgagcatcctgccagaccataaccggaactatgagagttccttggaggagcaagggcaggtcaattcagaggccgctgggttgactgcattcttcggtgagcagggcaaccgactctggggactgcgctgtgaagatctggatcgctcgctggatgacctgacgtcggacggtaagcgtttggctgaatcggtgtcgcagaatgaggagcgtgtaacctcgcttttacacgcctaccagcagcagggcggtgatcgccttgatagcctgcggcgtgaggttgaggatgcggagaggggcttccagaccacgaccaataaggcccatgactaccagaaggacactcgtgatcttgggcttgctgaaacgcttaccgcgagcgccgtgcgggacaacatcgcttcggccaaagctgtcctggttgatttacccgctcagattgacgatgcgaagaatgctttcggcgagtcgcggggcgctctctcgggcattacccaacagataaagaacctgcaggcccagatcagtgaaattgagaagcggcccaactccaacattgacgccgcgtttcagtgcctgcgggacgaaatggttgagagcctgcaactcaacaaagatggcgtcgtatttatcggtgagctgctcgacgtgcgcagtaccgaagcgcgttggcgcggtgctattgagcgggcgcttgggggccgccggacaacgttgctggtgcccgaagacaagttccgcatggttaccggctgggtaaacagccgacacaccggcctgcatgttcgtgtccaggttgtcagcaagaccgagcgcaacccggagttcctcggcggcgggttcctacgcaaactagaatggaaagaacatccgtatcgcgactggctaaagcgccatctggcgcgtttcgacctgcactgtgtggattccacagaagtgctcaatgataccccttactccatgacccgcgagggcctggtgcacatggaaaaggggcgttttgagaagaaggacgggacacgcgtcgacgataaaaagaactggcacctcggattcaacaacctcagccgactggcggcactccaggaagagggggagcgcctgcgggaaggcctcgattccgcccgatctgatgaatctgtaaaacgtcaggaaatggacatcctggtggcctctgaggccatctggaaacgtgtggctcaaaccctgtgggatcaaattgacgtcaccttggcaaagcaacacctggacaccctaaagaacgaccttgcggccctcaatgctccggacagcgatctgagtaaggccaaggcgctgcttgaactggctaaaaaagagctcctggaaatccgcactgcgcaaaaccaaaatgccagagcggtcggtgggttcgagttggagatccggcaggccaacaaaagtcgtcaggtctcagcccttgctgccagtgcaggcttggcagacgctgtgcgccagtcattgtccctgcgtgttggcattcttaccttggaacatctggataaactcaatcaactggagaaaacccagcgagagttcctagatgatgcattgaactcgattggcaaacgagcgaatcactacaacggccgcatgatcgcgatcatcaacagcttcaagacaaagtggccgttggttgccaatgactggttgacgactatcgagggtcgccaggattacatcgactacctcgacaagcttaataacgagggtctgcccgatctggttgagcgcttccagcagcgtctaaacaacaataccacccagtccctgggccgcatgcaacgggccattgatgacgagcgtgaggacattcaggatcgtatcgccactatcaacgaagtgctggagcgtactgagttcaaccacggcacgttcctgcggctgaaacatgaggatgaacactacgcgcatgtcaaagaattcacagccttactgggctcggttcttaaacatgcctcaagcgttgatcacgaggctcggttcctcgagctttgcagtctgatcagcaagctggaaaaggctaccaattcagccaccgccattaacctggagagtcaacgcctcttggattcgcgctaccgcatgacgttctatgccaacgaaatcgtgaaggaaaccggcgccgtgcgtgatgtgcttcgctcatcttcaggcaagtccggtggggagaaggagtcgtttgccggcatcatcgtggctgccagtctggcctatgtgttgaccccggatggtgctccgcacccgatgtactgcaccgttttcctggatgaggccttttccaacactgccgataaggtgagtcgccgcgtgctgcgggtatttcgtgagcttaagattcacgtcaatttgattacaccctacaagaacctgaacctggctcgtgattcagcccgctctctgatcatcgccgagcgtaagatcgatggccatgaaagtcgcctgagccagatcacttgggatcaacttgaccagcaaagcgctgaacgccgggaagctaagcaaacccaattggccggggtcgctgaaggcctgggcattcagatggagcaactctaa

SEQ ID NO: 47573 - DNA, 1197 bp, Pseudomonas coronafaciens pv. oryzae
atgcgcagttgggggcgtttgccaaccgatgtcatgcgcgaggtcgagcgccttgaatgggataacgcaactaatctacgggggcgactgcagggcacgcggcgctttccgatcagcttgacgcttaagccaccagcggctggcgatgcattgatggacattgaccacttccacaactgggtcaatgcatggcggcaatggagcaagcaaagtcaggttaagtgggtaacccgcaggtatcgagtggtgggcgatgtcgaggtaccggagcggcttgaccttgggaatgttaaagagttgattgaagccatcgggccagcagccgtaaagcgttcccatatctgggcggctctcatggaacccctgctggcagtggatcgaaatctgtatgacacccttattcgccagattcttgtggtcgagcaaatgagtcatcgtactgctcagcagatggctaatgtactgccacagttgcgtaagggtattggggctgggtatttcctgcggggggtgcctgtgcaagggattgataccaaatttctggaaacgtacaaccctctgctgaccaccttgcttgatgtcatccacagcggggaactgagtgaagccggtgggctggatgcctggctcggctgcctgccaaccccgagtaactggctctatattcgacccctgtgcccagaggttaggcaacaaatggggggcttttctgtaatacagattcctcttgaacagtttcttgagcaaccattgcctggccgcagggtgttggtagtggagaacaccaagccaggctacgccttgcccgaactgcccgaaacagtcgccatctttggcggtgggcggaacacccaatggcgtatggctccatggctttccgagcgggatgtagcatattggggagacatcgacagctgggggctcacaatccttgctcacgcccggcaggcactgccagggattacggccttgatgatggatcacgagaccttaatggcgcacatggattttgccgtggaggagccgcgctcaacgaaccttcctgctgtgggtttattgtcggaggagcgcctgctgtttgagtcgcttatcaaatctgcgcaaagcattatccgtttggaacaagagtaccttgcccagaattatgttttgtccaagctatacagctgggcgaagtgctgcaccacgaaatcgtaa

SEQ ID NO: 47574 - DNA, 1443 bp, Arthrobacter alpinus
atggactacttttcgatcaattccctgcgtgagaaccacgccggatggtccctgctccgcgcccaaaacgcacccctggccctgacgtttttcatgacagccttcaccgaccccaaccagcggaacctgggccgccaggatctcattgacgtccttgacgatgtcctgttcagcctgcgggactccctcggagaggacaggttcccgcggacggccggcgagtaccttgacgactgggccgaaccggacaaggcctggctgcgaaagttctacgctgaaaaccgggatgagcccgtctacgacctcaccgccgccaccgaggacgtcattcgatgggtcgagtccttacggggccgcgactttgtacccacccagtcacgcctatccagcatcttcaaccttttgaaggccctggtccacggctcggaaacagaccccgaggcaaggctggctgaattgcagcgccaacgcgatgacatcgacgtccaaatggagcagatccgttcaggaaccatcccggtcatgacaggcccggaagccgtggaccatttccaccagctcaccacccaggccaaggacctgctctccgacttccgggaggtggagacgaacttccgcaggctggaccgcaacctccgcgagcaaatttccatgtgggagggcggccagggcgacctcctggaatccatcttctcctcccaacaggacatcagcggttccttgcagggccgcacctttcagggtttttgggactacctcatgtccccgcagctgcgctccgaactgcacgaactgctggagcgcgccacccaaatccaggccctcgccacgcaggacggcctgaactcgatcacctcgatgcagaaggactggctgcccgccgtcgagcaaacccagtccacggtgcgccaactctcggcccaaatccggcgcctgctcgacgacaaggtgttccttgaaaacaagcgcatcatggcgctgatccgcaacatcgaatccggcgccgtcgcagtccgcgccaccccgcccaccggagtgtttgccgagctcaccggccacgacgtgcccgtcgcgctgcctttcgagcggcccctctacgagcccagccggcaggtggccatcgacgacgccgtcagcgtcgccgaagacctcgacgtggacgccaaggcgctctttgaccagttctatgttgaccagcaaaggctcgaagccaacattgacgctgtcctcgcggacgccgaacaggccacactcgcggacgtcaccgacgcctacccgctcagccagggcctggccgagatcgtcagctacttccagctcgccacagaatccacgtccgcagtcattgacccggacacggaacagaccctttcctggacgctacccgatggcagcctccgcgaagccaccgtcgaaaaaatcatctttgtgaggccgtcatga

SEQ ID NO: 47575 - DNA, 678 bp, Arthrobacter alpinus
atgaccaccatctccctcgaagaatgcggtgaactccaggaaccggccagcagaacgcctgacgggctgccgctggttgtcaccaagctgttcaagggcgtcgtgtaccgcgacggtgatgagcggctgtggcagcggctcatggaactctccgcccaaacccgtgattacgtggcagttttgggcctggaactggtcctcgacgacgccgaagggtacgcgttcctgcgctccaaccccgacgccgacgccggcctcccccgcctcataccccggcgccagctcaccttccacgtcagcctcctactggccctgctgcgcgcccggctggccgaatttgaccagcaaaacagcgaaacccgcctcatcatgacctccggacagattggtgacatggtctccgtgttcctccccgaatccagcaacgaggcccgcatccttgaccagcttgccagcaacatcaaaaaggtcaccgagctgggcttcctgcgcaaactccgcggccaggacgacacctatgaggtggcccgcatcctgaaggcctacgttgacgcccagtggctcgaggaattcgatgcccgcctcgccgactaccgggcaactctggacggtgacggatccgccgtcggaccttcatcaggtaagtcatccaaaacagcaaaggcggccacggcatga

SEQ ID NO: 47576 - DNA, 3339 bp, Arthrobacter alpinus
ctgaccattgacgacgccggcacccgcccgggattccggctgcaccgtctggagctgctgaactggggcacgttcaacaaggatgtgcgcacgttccggctcgacggcgagaacagcctgttgacgggcgacatcggttccgggaagtcgacggtggtggatgccatcaccacgctgctgctgccggccaacaagattgagtacaacaaggctgcgggtgcgcagaagaaggaacgcagcctgatgtcatacgtgcgcggcttccacaagagcgcccgcagcggcattggcgacacctcccggcccgtggcactacgcggtcccggcacatattcggtggtgctgggcgttttccacaatgccaccctggacaagacggtcacgctggccattacgctgtgggccacgcaggaagccggtcagcccacccgcttctactccatcgcggagggggagcagtccatcaagggcgacttctccgactttggcgcggacattgcgaagctgaagcggcggctgcgcaacgacggcacggccatctttgacgtgtttgaaaagtatggggcctcgttcaagcgccacttcggcatcggctcctcccaggccatggacctgttccaccgcactgtgtccatgaagcaggtggaaaacatcacccactttgtgcgcaccaacatgctggaggaggacgatgttgaaacccgcatcaaaaacctgctccaccactttgaggacctgaaaaaggcccacgacgccgtattgcgcgccaaagaccagatccgcatgctggaacctgtccgggacaacgccgcccgtcacgcctcgctaaccgttgactacgagaatgcgcaccagcaacgcgagcagctttccccctggttcaccacccgcaagctggaactcagcgaagcccacctgttggaattggaacgcgccagcgccaaggtggaggaacagcagaccgccatgactgcggaggttggacggctcaacctcgagctggcggacctgcgagatgacatccgcaacagcggcggcggccggattgccgccattgaaggcgagctggcccggctatccatcgagtccggcgcccagcgcggccgctacagctcatactctgaagcagccaaggttctgggcctgttcgagcccgaagaccaggtggtctttgacgccaacgccgcagcactgcccggggtggagaagcacctggccgaggccaatgcggaacttcaggaacagcgcacggcccttgaccgccagcgctccgaggccacggagcaggcggcagagtacaaagaagagctgaaaagcctgctgaaccggcaaaacctgctgcccggctggctgatctcactgcggcaaaggctctgcgacggaacaggcatcaccgaggcggagctgccctttgccggcgagctgctcaaggtccgcgattccgaggcagcctgggaaggcgccgcggaacgcacactccacggcttcgccctgtcccttttagtgaccggcaagcactacgccgcggtcagcaactgggttgactccaacaacttgcgcgcccggctggtgtatctgaaggttcccgacatttcctccccgcgcacagcctccgcaggcaccttggccgcaaaactgaacatcaagccgggaacaccgttgcgtgaattcctgctggatgagctgggccaccgctttgaccaccaatgctgcgaagccatggatgaattccgccgttatccgaaggcgctcaccatcaacggccagctcaagggcggcggcggacgccacgaaaaggacgaccgcaaggcgctcacggaccgctccacgtatgtgctgggctgggacaaccacgacaagattgcccggctgcgctccgccttggaccaggcagagggacaggtccgcacggctgccgacgggctgggccggatcgacgcccagttgggcaacctgggccgccagcaacagcacatcggcacggtgaccgccgttggaagttttgccgggctggactggcggaccacggtgcgcaccatggaaaacctggcccaggagaaggccgttctggagtcatccagcgacatcctgcgcgaactcaccgagcgcgaaaccgcaaccaaggcgcggctggacaaggccagcaagaaactcagcaacctggccgagcgcatcggcgccaccaaaaacagcatccagggcatcacggagcagatcgcggattgccgggattcccttgccgaggcgcctttgacgtccgacgccggactgctggctgaggtgggcaggctcgcccaggcggcactcgagtcggagaccctcacctacaagaacacctccaagattgaaagcaaggtgcgggacaaacttactgccagcatcgacgccctgaacaggcaggtgatccgggcagcggagaccaccatccggtttatgtccgatttctgcaacaaatacccgtccgagaccactgagcttgatgcgtccctggagtccgccggggagttcaacaagatcctgggccagctggtggataacgacctcccccgctttgccgaacgcttcaaggaatctctgacgcaaaacaccatccatgagatcgtggctttcaacgcgttcctggacgcccgcaagcaggacatcgtctcccgcattggtgaaatcaatgagtccctggcccggattgaatacaacccgggacggcacattcagctggaaccgcagccaacctctgatcccgaggtgcgtgagtttggcaccgagctgagggcctgctccgagggatccatcggcgcgcaggaacagtattccgagcaaaagttcctgcaggttgaggcgctcgtggaacgtttccggggccgcgaagggcgaaccagcctggacgagcgctggacggcaaaggttactgacgtgcgcaactggttcacgttctcagcctcggaaaaatggacggaaaccggtgaggaacacgagcatttcaccgattccggtgggaagtccggcgggcaaaaggaaaagctggcctacactattttggcggccgcgttggcgtttcagtttgggattgcggcaggcccgggcaaccaacgttccttccgcttcgtggtcattgacgaggcgttcgggcggggctcggacgattcggccaaatacgggctggaattgttcaaacggctgaaactccagctgctcattgtgacgccgttgcaaaagatccacgtcattgaaccgtttgtggccaatgtgggctttgtggccaacgaggccggcgacgattctcagctgcgcaatatgaccattcacgaataccgggcagaacgggacaagcgtggtagctaa

SEQ ID NO: 47577 - DNA, 1164 bp, Arthrobacter alpinus
gtggtagctaaaccgccagattggaccaccccggcggatattcgtgccgcctcgctccggtcctggaacagtggggagctactgcgcgaggcggccctgcccatgggactgtatccccggcgtcgtgccctgaaatatcccagcgccaccgcgttgcgcaccgactacgctctggcggcggcgtgggcgcatgcgtgggagccggcaccgcggggctgttcgctggagtacgtctcggtgggggcaaacacgattggtgccaacacactgccctccgccgccgtgtttggcactgccgcggacgagatcgcgttcctgggaatgggccgtgaggcggccagatttagcgtgctggctggccgcatcgccgagctcgacgccgggctcctggcttggtccctgcgccggcctttagagttactcaagcacggcgaggtcgctttgacggcagcccgggtggcggtctggctcgccgccaacccggccccgggcatctacttgcggcaactttccctgcccggcgtccacacaaagttcgtggaaacacaccgccggctcatcgacgggatgctggcagtgttggtgccggaccggcccctggccgggaagaactatgcgcgcaggcacggttttctggccgcacccgaacgggtccggatccggtatttggacccctccctgtcaccggtcccgggcatggcagacgtggagatgacggctaccgcgttcgccgcactggaggtggatgcggacacgatcatcaccacggagaacctggtcaatttcctggccctgccaccggcaccccgcaccctggccgtgtttggtggcgggtacggcttcctagcgctccgcgaggcggcatggctgggcaccaaggaagtgttgtactggggcgacatcgacacccatggcttcggcatcctggaccagctgcggtcccaccatccccatgtgcgcagcatcctgatggatgaacaaaccctgctctcacaccaggatttttggggccgtgaagacgcaccaacgcacgccatgctaaatcatctgtcaccggcggagagcgccctctatgcgcaactacaggccggcacgtaccggccggggctgcgccttgaacaagaactgctgcgctgggacttcgtcctggaacgcttaccctga

SEQ ID NO: 47578 - DNA, 1458 bp, Arthrobacter alpinus
atgcgccccactgacaatgccgttgaccagtggcgtgcgcaaaaacagttgcggcactcacccgcctggaagctgatgcagtccgcaccgtggactgtggccttcctgcggacagagttcaccccttcccggcagcgggtcgcgctggaggagtttcacgccgatctggcagccttcatgaaggagctccggtatgaaaacctgagcctgaacgacgcctggcaggcctccaactacgccgattcgtgggttcgcagccagttcttggcacgccccatggtcgatggccggttcatgtatgagcccacggccgccacggcccgggtgctggcattccttgagacgttcacggtggagcgcaccaacctgaacagttcacgactgaacaccttgctgacaagcattgagacgctttcgttccagacagaccccaaccccgagagtcggatctccgcgctggaggccgaaattgccgcgcggcgcagcgaaatcgaggcactgaagtccgggcacaaccctgccgtcctgtccgacgactcagcggtcgccgcaacccggagcgtccttgaccttgcagccagcctgcccgccgatttcaaacgcatgcgcgacggcgtcgagcagatgctgcacactatccgtcaggaaatcatggagtcctccgtgacgaagggcgtggcagtgggtcaggtgcttgagggcgacaaagcgctgcgcaacaccgccgagggcgagaccttccagggtttcaccgagttcttgaacgaccccgcgcagcaggcccgcttccgtcagtccgtcaacgaggtcctcgaacgcgacttcaccgaacaactcagcagtgaggagcgggccaacttcgccacactggtcaaggagatgcgccgccaggcagccgacgttcacaccatttatggccggctgtccgagagcctgcacagctacgtcagctctgatgagttcaaggactccatcttgttgcgcaaggctatccacgccgccgaacaagccgtggcggcggcagcgctgcgtcctcgcacacccgttgtcgccccgctgctgttcgcccccgccttggaaacactggcaggattgggcatcttcgaccctgacgatcacattccaccgcccaggctagcggcaccaccaaccctgagcggcgccgacatccaccgcacccccgtcaccccacaagccgacatggcagctgtgcacgcagctgtcgcccgcacccgcgccacccgcaagggcacggccacgctcagcgaggtgtacgccgaactcccgccggaactgcgccacatcaacaccatcaggggcctgattctggccgcccgtggcgccgatgagtcggttgacccggagcacacccagaccctccgcttcacccaaatcgacggcacggaacgcaccgcccttgttccactgatcacgttcacgaaggacaccgcgccatga

SEQ ID NO: 47579 - DNA, 681 bp, Arthrobacter alpinus
ctgtctggcggcaccgacgcgtaccgtgccgaaagggccttgtttaccggggacaccggtgcgttcccgctggaaatccgccaggcactagtccggctgctgcgtgggccctatattgacggcacagtcgacgcccacttgtggacaaccatccaaacccaccgcgcctcgttacagcagtatctatccgagatcttcttgttgctcaccatcgatgccgaccgcaagattgccatgttgacaccggcggaaatcgaggccgtccacacccagccgatcgttgcacgcaaacccctgcggcgggaggaaacgctgctggcattacgtctgcgcgtgttgttggaccgccacgccagcactggcaacgatgtcaccatcacccgctcgggtgcccgggaactcctggccgaacaccgccaacccggagcagtggatgacaaacgtttggatgaacaaaccgattcctcgctggcgcgattgctggcgttgaagttactgctccccaccgagctgggaggcgaataccgggtcagcaacgccctagcattggccttgccctttgattcgatcgagcaaattcctgcctatctggcggcgttggacagcagccccgacgacgacacacttgagctgggaaccggccacgacgtcgctgccacagcccctgaggagaacctctaa

SEQ ID NO: 47580 - DNA, 3303 bp, Arthrobacter alpinus
atgagcattgcagtgaccttgccgatcggcgaagaactcaaccccggccagtaccggctcagccagatccaaatcatcaactggggcaccttccacggccggcactccatgtatgtcgacagggccggcaccttactcaccggccacccgggcgtgggaaaatccaccctttttgacggcatccaacacatcttttacgcggcaccgcgactcaacgagtccgcgcacgaggcgtccaaccgcaaagaccgccgcaccaccttcagctacatgcgtggacgaaagatcaaaaatgccgagggcaccgtataccaacgcccgagtgccacctggtcggccaccgccttggtgtttgaggacggtctgggccgacaggtgagcattgccgcactctttgaccttccagccaacggattggagggtcaggtggggaaacactacatcatccacgacaagcccttggataccgaagcgctggaaaaccatggcagccgccgcttctcaccgtcctcgctccatgcggcgctgcccggcgctgaggcgttcgacgtgcacaggacttttgccgaacgtttccgccgccggctgggcatcgacaatgacaaggcgtttagtttgttgcgcaccctgcaaaatggcaagggcctggacaagggagtcaataggttcttccgctacgaggtgttggacattcccggcaccctcgcagcagccaaatcagcagtggaggattttagtcacctgcgcgggatttaccgccaattgcaggacgcccgcggccagcgtgacgcattggctcctgtcccggaacttcacagaaaactgcgcgaattcaaggcaaaccacgcccgtacagctgagctaaaaaatgttcaactacccttgttgcgccagcagttccaggctgaactcttggccgcaaaggctgtgtccctggctgggcaacatgccgaaaaagccatgcagatcgaggctgcgaccgcggccaaggaaacgctttctgagtcgttgtcgtcgctggaggagcaccacgccaaccatgggggccgggccatcgacggcctagagaaggacattcgtactgccaaacgtgagctggaggagcgcctgcggcgcgagacgtcggtacgcgatgaactcgatgcggccggtctggactacaactggagcgcccagggactcgcagcggcacgcttggaggcagcggacggcgtcgagcaccagcaggcagagaccgaggccgcccgcactcgcgagtacgaggccgtggcggccagtatcaacacgaaggtggacgagaagaaactacgtgcggagatcgcctcgtaccagcgacgcggcagtaacatcgatggacgcaacgccgcagcccgccgcgccatctgcgccacgaccgggctggatccggcactgatgccgttcgccggcgaattggtggacatcgccagtgaacacagctcttggcgtcccgcaacggagaaggtcctgcgttcgctggccaccacactgctggtacgcgatgaggatatcaaggctgtcacgggcgccatcaactccctcgacgaccatggcaagctgcgctggatcaacatcggaacccatattccggcccaaagtgctgggccccacgacctggtcaccaaactggaattccagacttccgacgccggcgactggctccgcgcgaaaattacccgcgacttcggcttccgctgcgtggaaagcgatagcgaacttcacgctcacaatagggccatctccatggctggcacgttgaaggtcaacgccgccacctatgagcgcgacacccggtcagtcagccccagcgactacttgctcggtttcaacaatgtggagaagattgcgcagttggaggcacaagccgcagaactggccgctgcctaccaaagcgccacagctcttgcggaccagcgcagccacgccaaggatgctctgacgggccgccttgaagccttgcttcgggtttctagggatcagcgcccctttgaggaacttgatagtggttccctctcagcggccttgacctccttgcaggcatccttgcaagccaccatcgagagcagcgccacgttggcacagatccgtgcgtctctgactgccgcgaaggccgagctggaggcctgtgtcggaaaactggcaatcctgcaacacgatctgtcccgcatagactccgaactcaccacggcacattcctcaggggagcggctgtccggggaggcagcacagaatccggcagccgactgggcccgcagtgaattcgacccctacctccttgacacctggcccacatcgttggatgagctggagaaggtattcactacagcaacagttgatctgggcgaacgcctggccactgtcaaggaacgggtattccgcacggaagcagcactcagcgagacgttccgggcctttgcccgcgagttcgggcccgtggtcagcgctagccacggcacgggcgcggaggccgtagaggcctacgaggcactgcatgagcgcatcctggctgatgggctcccgcagcggcaagtcgaattccgtgagtacttcaacaaccgctcctatgagcgtttctcagacttgctgcagcttttggaggaggaacgccgtgggattgaagagcgtatcctgcccctgaaccagattttggaggacgtgccctttgaaaagggcagccggctacggcttgaggttaagacagccatccccgatgaggcccgcagcttccgcaccgagctcaaagaggccctaggcaacgcttatacgacggccagcgaggaaaccatcgccagcagctacctgcagttggagcgtctggtagatgccctcagcgacacttcacgccagcactgggcggacaccgtattggatgtccgccagcatgtgaccatcagctgcaatgaacaccgccccaacggtgaggtggagcttggcttggagccgggcaccctgtcgggaggggaaggccaacgcttcacctctttcatcatgggtgccgcgttggcctaccaacttgggatcgacacccagggatacagcacctacggaaccgtgatgatcgacgaggccttcattcaagccaactctgagtacgccggtgccggaatcaacgccttgcaggagtttggtttccaactgctcctggccgcccccgaggacaaggttgacctttccaagcaccttggctcggtcaccgatattatcaagcacccgcaagccaacgtctcaggttttgtctccacaggacgttcccctgccactgccaccgccatcattttgcgctag

SEQ ID NO: 47581 - DNA, 1461 bp, Mycobacterium immunogenum; identical to SEQ ID NO: 45554

SEQ ID NO: 47582 - DNA, 741 bp, Mycobacterium immunogenum; identical to SEQ ID NO: 45555

SEQ ID NO: 47583 - DNA, 3348 bp, Mycobacterium immunogenum; identical to SEQ ID NO: 45556

SEQ ID NO: 47584 - DNA, 1461 bp, Mycobacterium immunogenum; identical to SEQ ID NO: 45554

SEQ ID NO: 47585 - DNA, 741 bp, Mycobacterium immunogenum; identical to SEQ ID NO: 45555

SEQ ID NO: 47586 - DNA, 3348 bp, Mycobacterium immunogenum; identical to SEQ ID NO: 45556

SEQ ID NO: 47587 - DNA, 1461 bp, Mycobacterium immunogenum; identical to SEQ ID NO: 45554

SEQ ID NO: 47588 - DNA, 741 bp, Mycobacterium immunogenum; identical to SEQ ID NO: 45555

SEQ ID NO: 47589 - DNA, 3348 bp, Mycobacterium immunogenum; identical to SEQ ID NO: 45556

SEQ ID NO: 47590 - DNA, 1461 bp, Mycobacterium immunogenum; identical to SEQ ID NO: 45554

SEQ ID NO: 47591 - DNA, 741 bp, Mycobacterium immunogenum; identical to SEQ ID NO: 45555

SEQ ID NO: 47592 - DNA, 3348 bp, Mycobacterium immunogenum; identical to SEQ ID NO: 45556

SEQ ID NO: 47593 - DNA, 1461 bp, Mycobacterium immunogenum; identical to SEQ ID NO: 45554

SEQ ID NO: 47594 - DNA, 741 bp, Mycobacterium immunogenum; identical to SEQ ID NO: 45555

SEQ ID NO: 47595 - DNA, 3348 bp, Mycobacterium immunogenum; identical to SEQ ID NO: 45556

SEQ ID NO: 47596 - DNA, 1461 bp, Mycobacterium immunogenum; identical to SEQ ID NO: 45554

SEQ ID NO: 47597 - DNA, 741 bp, Mycobacterium immunogenum; identical to SEQ ID NO: 45555

SEQ ID NO: 47598 - DNA, 3348 bp, Mycobacterium immunogenum; identical to SEQ ID NO: 45556

SEQ ID NO: 47599 - DNA, 1461 bp, Mycobacterium immunogenum; identical to SEQ ID NO: 45554

SEQ ID NO: 47600 - DNA, 741 bp, Mycobacterium immunogenum; identical to SEQ ID NO: 45555

SEQ ID NO: 47601 - DNA, 3348 bp, Mycobacterium immunogenum; identical to SEQ ID NO: 45556

SEQ ID NO: 47602 - DNA, 1461 bp, Mycobacterium immunogenum; identical to SEQ ID NO: 45554

SEQ ID NO: 47603 - DNA, 741 bp, Mycobacterium immunogenum; identical to SEQ ID NO: 45555

SEQ ID NO: 47604 - DNA, 3348 bp, Mycobacterium immunogenum; identical to SEQ ID NO: 45556

SEQ ID NO: 47605 - DNA, 1461 bp, Mycobacterium immunogenum; identical to SEQ ID NO: 45554

SEQ ID NO: 47606 - DNA, 741 bp, Mycobacterium immunogenum; identical to SEQ ID NO: 45555

SEQ ID NO: 47607 - DNA, 3348 bp, Mycobacterium immunogenum; identical to SEQ ID NO: 45556

SEQ ID NO: 47608 - DNA, 1461 bp, Mycobacterium immunogenum; identical to SEQ ID NO: 45554

SEQ ID NO: 47609 - DNA, 741 bp, Mycobacterium immunogenum; identical to SEQ ID NO: 45555

SEQ ID NO: 47610 - DNA, 3348 bp, Mycobacterium immunogenum; identical to SEQ ID NO: 45556

SEQ ID NO: 47611 - DNA, 1461 bp, Mycobacterium immunogenum; identical to SEQ ID NO: 45554

SEQ ID NO: 47612 - DNA, 741 bp, Mycobacterium immunogenum; identical to SEQ ID NO: 45555

SEQ ID NO: 47613 - DNA, 3348 bp, Mycobacterium immunogenum; identical to SEQ ID NO: 45556

SEQ ID NO: 47614 - DNA, 1470 bp, Stenotrophomonas maltophilia
atgaagcatcgcgaacgcattgcccgttaccgccacctgcgcgaacagccccagtggaagctgcttgccgccgaccacgccccggaaatcatcggcctgttgcagggcctgctgatggacggcgagcgcacgttgccttcgtcggtgctcaacgagcgcctgcagcgcgcgctggaccagctggccggcgacgaactctcgcgcgagctgccgcgtaccgcgcaggcctacatcgcgcactggctggcccagggctggctggaacgccgtttgcccgaaggcgccgaccaggagcagtacgagctgtccaccgccgcactgcaggcgatccgcttcgccgacggcctcgagcaggcccgcgtggccgccaccgaaagccgcctggcgctggtcattgagcagctctcggcgctggctgcgcagaccgaagccgatcctgatgcgcgcctgtccgcgctgcacgacgagcgcgaccgcatcgatgccgaaatcgcccgggtcggcactggccgcgtggttgcgctggacggcaagcgcgcgctggaacgcacccgccagatcatcggcctggccgatgagctgaccgaggacttccgccgtgtgcgcgacgacttcgagcagctcaaccgcgatttccgcgaacgcatcatcgacgacgagggcgagcgcggcgatgtgctgtcgcagctgttcgaaggtgtggatgtcatcggtgaaagtgacgccgggcgcagtttccaggccttctggcgcctgctcaacgacgccgaacagagcgcccagctcgacgccgcgctggaagcggtgctggcgcgcggctttgcgcgccgcctggaccgcaacgagcgcaacttcctgcgcggcttcaccagcaccatgctggagcgtggtggacaggtgcacgacgtgctgcagaacttcgcgcgcagcctgcgtggtttcgtgcagagccgtggctacctggaacagcgtcgcctcaaccagctgctgaagcaggcgcagtccgaagcgctggccctgcgcgacgagttccccgcacagcgtggcatcggccgtgacctgcagttgaccaccagccgcctgcgctcgtggtcgcagtggaggctgcacgatccgcgcagcgcccaggtcgatggcaacgtcgagtacaacgacgccgccgcgatcagcctggaaagcgtgggtgatctggtcgcctcgtccgaaatcgatttccgcacgctgcgccgcgacctgcacgacctgctcgatgcacagccgcggctcagcatcgcccaggccctgtcgcagcgtgaggcgccgcagggccttggcagcgtcatcggctacctgtcgctgggcacgcgcttcggcaacgtggtcgccggcgagcaggagcttgccgaatggcgtggtggcgacggccagatccgtcgtgcccgcatcccgctggtttggttcacccaggagagacgccatgagctggcatga

SEQ ID NO: 47615 - DNA, 702 bp, Stenotrophomonas maltophilia
atgagctggcatgaagatcccatcgacgcaccgcaggccgacgtggcggaagacgcctacgaggccgagccggtggcggccgtggcgcagccccgccgtggcaacgacgtgtattacctcggcgataccgggcgcctgccgctggatgcgcgccgcgcgctgtgccagctgctgatcggccccagcatcgaccagctgcgccacgccaagctgtggccggcgctgatccgcagcgaggcggccatccgctcgtcgctggcggacctgttcctggaactggtgctcgatcgtgacagcggcgtggccttcacccgccaggccgataccgaagacgttgatgcgccggtgctgctgcgtacctcgccgctgaccttcatcgactcggtgctgctgctgtacctgcgccagcagctggccgaggccgatgcgcgtggcaaccgcgcggtggtcgccgacgccgagatggccgaagcgctggccatctacgagaagaacctgtccaccgaccgcgccggcttcaatcgccgcgtcgcttcggcggtgcagaagatgaaggacaaccacatcctgacccgcctcagcggccaggaagaccgccacgaagtctcgccggcgctgaagctgctgttctccgccgaagacgtgtcccagctctcggcggtctaccgccagctgcgcgaaaccccggccgccgaggcctga

SEQ ID NO: 47616 - DNA, 3381 bp, Stenotrophomonas maltophilia
atggctatctccaagcacactcccgccctgttcaacgaaggcctgccggacccgcgcctgcagcagttccgcatgcgccgcctgcaggtgcacaactggggcaccttcaacggcctgaccgaagtgccgatcgccgagcgcggcttcctgttcgtcggccgttccggctcgggcaagtcgaccctgctcgatgccatgtccgcgctgctgacgccgccggccatcgtcgacttcaacgcagccgcgcgtgaagccgaacgcagtggccgcgaccgcaacctggtgtcctacgtgcgtggcgcgtgggccgaccagcaggacagcggcaccggcgaaatcgccacccagtacctgcgcaagggcgccacctggaccgcgctggtgctggaataccgcgccggcgatggccgcgtggtcagcctggtgcgcctgctgtggatctccggcaacggcacctcggctggcgatgtgcgcaagcactacatgatcgccgagcgcccgttcgacatcgccaaggatcttggtggtttcgacctggacctgcgcaagctcaagcagaagctgtccgacctgcaccacttcgacaccttctccggttacgccgagcgcttccgcgacctgctcggcatcgacaacgagatggcgctgcgcctgctgcacaagacgcagtcggcgaagaacctgggcgacctcaatgtcttcctgcgcgacttcatgctcgacacgccgaagaccttcgacgccgccgagcgcctggtcagcgactttgccgagctcgatggcgcgcaccaggcggtggtcaccgcgcgccgccaggtggaaaccctgctgccggcacgcgcctactacaacgacctgaaggaaatgcatcgccagcgtggcgacgacgaagcgctgaagctcggcgtcgacagcttccgcgaaagccgccgccaggcgctgatcgaagcgcgcctgcgcgagatggacgtgcgtgaccgtggcctgcttggcgaagaagcccagcgccgtgctgcactcgacaaccacaccgagcgcctggccgagctggaactgcagcgccgccagcagggcggtgagcgcatcgaggaactggaacgcgagcagggccgtgctgaagctgagcgcgaccgccgtcaggccaagcgcgagcaggcacgccaggcggcgcagcagctgcaggcggaactgccggacgacgcccacggcttcgccgagctggtcgagcgcgcgcagaacgagctgcaggaccgccagcgtgcctcttcggcgctggacgacgcgatcagcgatcgcctgggtggcaagcgcgatgacgagcgccgcttcggcgaagtccgtgcggaactcgaagcgatgcagcgcacgccgtccaacatccctgcgccgatgcagaagctgcgcgcgcgcctggccgaggaaacgggcatcgccgaagcagcgctgccgttcgttggcgaactgatccaggtccgttccgaagagcagggctggcagggtgccatcgagcgcgtgctgggcggtttcgcgttgtcgctgctggtcgatgacaagcattacaacgacgtcgccgagtgggtgaaccgtacccacctgggcatgcgcttcacctactaccgcgtgcgccgcaacgatgatgcgttcgcgcgcgagccgtcggcgaagtcgctgctgcacaagctggaactgcgcgagcacgtgttcgaaagctggctgcgccgtgagcttggcaagcgcttcgactacgagtgcgtggatgccaagcagctgcgcaacgtcgatcgcggcatcacccgcgaaggccaggtcaagcatccgggcgaccgcttcgagaaggacgaccgcagcgcggtgggcgaccgccgtcgctggattctcggcttcaacaaccacgacaaggtcggcgccttcgagcgtgaagcacaggaactggccaagcgcatcgccggctgcgagaccgacatcgcgcgcctgcgtggccagcgtgaccgcgacaacgaacgccgcctggcctgccacgagctggtcagcatcagctggaatgagatcgatatcgccgccccgcagcagcgcctcagcgatatcgaagcgacgctgcgcgacctgcgcgaaggcaatgccgacctcgccaagctggccaagcagatcgatgcggtgcgcgcggacatcgaacagtcgcgccgcacctatgaagacgtccgcgtcgagcgtggccagctggtcaaggagcgcgatcgcctcgaccgcgcacgccagcagagccgtgcgctggtgctgccgagcctggcccaggagcaggaagccggcctcgccgagcgcctgcaggagcagggtccgctcagcctggaaacgctggaagcgcacatgcgccaggtcagcaacgcgctgaacgagcagctgtcctcctcgcagcaggacctcaaccgcatcgagaaccagctgatcggctgcttccgtcgcttcatccagcagtggccggaggaatcgggcgacttcaccgtgtcggtggcctcggccgaggacttcctcgcacgcctcgaacgcctggagcgcgatggcctgccgcagcacgaagagcgcttcttcgatctgctgcagaaccagagcaagaacaacctgctggccctgcagcggcacagcgccgaggcccgcaagtcgatcggccagcgcctggacgaagtgaacgccagcctggaacaggtgccgttcaaccgaggcacgctgctgaccatcgaactgaacgaccgacgcctgccggaagtcggcgagttccacctgcagctgcgcgaagtgctgtcgcagcagcagaccgagcagcgcgagctggccgaatcgcagttcaccgtgctgcgccagctggtcaatcgcctgggctcgcaggaaggcgaggacaagcgttggcgcgagctggtgctggacgtgcgcatgcacgtggagttcatcggcgtcgagctggatgcggagacgcgccagcaggtcgagatctaccgcagcggcgccggcaagtccggtggccagcgccagaagctggccacgacctgcctggcggccgcgctgcgctaccagctcggtggtgccgacagccagctgcccagctacgccgcggttgtgctcgacgaagccttcgacaaggccgacaacgagttcaccgcgctggcgatgaacatcttcgacaacttcggcttccagatggtggtcgccaccccgctgaagtcggtgatgacgctggaaccgttcatcggcggcgcctgcttcgtcgagatcagcggccgccacgactccggcgtgctgttgatcgagtacgacgaagaaggcaagcgcctgaagctgcccgagcgcagccgccagcaggccaacgaaccggaagaagccgaggcctga

SEQ ID NO: 47617 - DNA, 1353 bp, Pseudomonas sp. RIT-PI-q
ctggacgatgctctgcattcgctggccgacaccttggccaactacgcagatgaagagctgtatcaagtcgaggcaggtactgagcttcagcaggcaaaccgagagctcggagagtggatcaagcgtcggctcatcgtcgagcgcaatgggcgactgtacgcgaccgatgctttggaatcggcgatccggtttaccgagtcgctcgataaccgagtcatgacctcgacggcttcacgactgtcagtcgttcagcgtgaaatcgaaaatctcgaaacgcatcttaactctgacccgaaaagcagggcactcagcctgaagcggcgtattcgcgagctgcagatcgaactcgaccaggctaaagcagggcatatcccaatttttgacgaggaaaaagcgattgaagggatccgagaagtctatgcgctagccattagtctgcgggcggacttcaggcgtgttgaagactcctggagcaatgccgaccggttgcttcggcaatcgatcattagtgagcaatgccacagaggagagatagtcgacaatctccttgatggtcaggatgctctgctgaatacgccggagggacgggtatttgacagtttccagcaacagttgagggcgcccatagagctcgacaggatgaggactcgcctgcgaaatatcatgcaccacccagccgtccccttagcgctgctacggccacagcaaaacgaactgttacgcttggtgccgcgattgctacaggagtcagaggccgtgttgcgggcgagggctcgaagcgaacgcgacgtcaaaggtttcttgaaaaccgggctcattgctgaacatcaccgtgttggtcacttgctgaatgaattcttgagcttggcagtgaacattaactggcagcgccaagcagtcaggcgactgccagtacccattcctgccgtcggcatggcgttagcaaaggtgcccgcaattgagcgccttcgattcaagggtatcgctgacgagagcgcacctgatcttgatctgagtcgacatgcgacagctttggatcagatagaggaagagttttggcagtcgttcgatggcttggatcgcgaagccttcgtgacggagacactgcgaattttggaagagcaagggcggcccctttctttggctgagctaggggctttgcttcctccaacgcatgacctggagtgtttcacgttgtggatcacgatggcccgggaggccggcatcgccatcaatgacaaggaaatcgaagcgtttgatttggcggatgcagaggattgtcggtggcggttccatctgcctttcacccaacttgagtcgcagaagctgcgcgatatcaaatgggagctttga

SEQ ID NO: 47618 - DNA, 708 bp, Pseudomonas sp. RIT-PI-q
atccaggaagggctcaatgaagacagcgagcaagaatcagattcggaggagtctcaaatagagcctttcgaagcacaagacgatgacttacgtaccactcgcgttgtacgagaggctgtccagcaattatacaaaaatggagatattgaggagtcggaggatccgcgtctctacagggccgccgttgcgaatgcagagctgattgagcggatcctggagccctttgatctcaacgtgcgttttgacgaaatcaggggcttggcatttgtcgtcgtacggcagcaaccagacgataccgcagatggctggacacatcccttagtccgccgacatacgttcagcctcgaacaaactctgctgatcgcgctgctacgccagcatctcatcgctatcgaaatggaaagcggtgtaggagccggcatcgctcaaatgaccgttgatgacgtcatcacgcagctccatgcctatctaggcgatccgggcagcgacctcaaagaccgagcgcgtgcagtcaaccttcttgagcaattgaaaaaccatcatctcgtaacgacgattgacggcagtgaccgcttcaccattcgcccgttaattgctcatgtcgcgaaccctgagaatctctctgcattgatccaatggctggaaacctacggtgtgagcctggatcgtttgaccccagcaggtgacgacggggaggatctatcatga

SEQ ID NO: 47619 - DNA, 2961 bp, Pseudomonas sp. RIT-PI-q
ttggccgcgctcttctcgttcgagggcacaagctcagctgctacagagatggaaaagtgctggatactcacacatcatcctgagcagaccttggagtcctgtctcctcgcttatcacgatgaaggtaaacgcggcttaggtcgaatcgagaagaatgttcaaaacttttggctacacggaactcgaaaggaatacctggctcgggtgcgggctttgtttcaagtcggcgacaacgcgttctcgctgctgaaccgcgctgcgggcatcaagcaattaaccgatattgattcaattttccgcgagctggtattggatgaccgctctgcgttcggccgtgcggcggaagtggttaagagtttcgaagatttgagtgagattcaccaggagcttgagatcgcacgtgcgcagcagaaatcactgaagccgattgcggaatgttgggaggccttcaagaaacaggcagagagccttcaggagctgaaggcggtcgaagcgatagccccggtctggttcgcagaacagtcccatcaactctggttggccgaaaaaagcaggctggacgttgcagctgaggattcggcgttgcttctgaagcaactcgcagatcagcgaattgagtggaaacagcagtgtgatatgcatctccaagcctatcttcagaaaggtggtgccagcattgatcaactgcgcaaacgggttgaggagtgggaaaacgttcgggaaaccagagtcaattactccgcacaataccagcgccttgtgcggaaactaggtctgccagaggagctgtcctccgacgctctgactttgaacaaggcgcatgcagccaagcagggtgttgccctggcaaatgaaatgaaagggcagcgtagcgagactttccagcgtgggattgtcgagtcggacgttcgcacccagcttctgaccttgaatcaggaaatcgatgagataaaacgccggcctgggtcgaatataccaggcgagtatcatcagtttcgcggccaactggcggcataccttgaggtgaatgaagcagagcttccatttgtggcagagcttgtacaggtcaaacctgacgaacacatatggcggggcgctatcgagcgagcaattggttggcaccgccttcgtgtcttggtttcacccgagaaggttagggctgctttgcaatggattaactctcgtgacaatcacctgcacgtgagagttctcgaagttgcccttgacgtcgagccgcgtagatttttcgaagatggttatgcccgcaagctcgagttcaaatcacacccttttcgcaaggccgtggaatcattgatcgctgacaatgatcgccattgtgttgctgatccggctgttctgctctcaactcctcatgcaatgaccaaagaggggctgatgtcagggaagccgcacttgtacgagaagcgggatcaaagtctgctcaacgctcactggttcaccgggtttgataaccaagaccgtttggcgtatctgagccaagaggttgccaccgtcgacctgaagcttgctgctgccgtgaatgcggtacgcgcagctcaagatcgtttaggaagtcttgaggacgctaatactgcttgcctgctgctcagggacgtcgagttcaacctcatcgatcttcctggtgcggataatcaactcattgacctgaaggggcagcttgattacctgacacgcccggacactgacgttgctttggcgaaaaggcttctggatgaggctatggccaagagagatgcggtcgaagatgcgcatgtgaacgcgaatgtcacttacgcgctgtgtgtaaaagggcgtgacaacgcagccgtgatggtcgagaaaacgttcagtcgcgccgagcttgggatgacgaatgcagagcgctccgctgccaacaagtaccttcgcaggctcgatacccatgagctgcaggatcttaatgacattgagcggcaaagctacgaaaccctcagtaaacgcattaataacaataacgatcagcttgttgagctacagagtgatctggtcagaaaaatgtccgatgccaaaagccgggatactggggcattagcagacgtgggacgcgacctgatcgatgtacctgcttacatcgaacgtttgagggtgctcactgaagaagccctgccacaaaaggtcgagcgttttctcacctacctcaatcgctcatctgacgacggtgtcacccaactgctcagctacatcgaccaggaagtgttacttatcgaggaacgtatagacgagctgaacagcacgttacgtcgggttgagttccagtccggtaagtaccttcgcttggttaccagcaaggtcgtacacgaaagcctgcgttccctgcatgcctcgcagcgcaagctgacttctgcccggttcgttaatgacaccggtgagactcattatcgagcgttgaagagcttgatagaggtgctaaaagaggcgtgtgagaaaagccggaacgtctcggcaagggcaatgctagaccccagattccggttggctttttcagtgtttgtagtcgactcggccagtggcatggccacagaagggaggaaaggctcccaaggcgacagcggtggtgaaaaggaaattgtcgcttcgtacgtcctgactgcgtccttgggttatgcgttgtgtcctaccggtgaaagccgacccctgttcggtaccatcgtgttggacgaagcgttctcgaagagctcaccaagtgttgcggcgcggatcatagcggcccttaaggagttcgggcttcatgcgatcttcattaccccaaacaaagagttgcgcctgttgcggctccatacccgctctgcgattgttgtacacaagaaagacggtctatcaacgatggtatccatgagctgggaggctctcgaaaattactacagggcccgtaaggggaaaggtgatacagctgtggacagcacccccagcgagccgcagtaa

SEQ ID NO: 47620 - DNA, 1164 bp, Pseudomonas sp. RIT-PI-q
atgaaatcgccggaggagctgcgccagaagctagcccgccaatgggatctgccaagcgtacgtctcaatcagctactcaatcctttggcgtggcccatggtgctgaatattggcaagccttcagcccagtgcttcaactcacatacctcaaaggttcaaagacatgttgaagcttggcgtgaggtgaaagtcggaacgattgaatgggctgacattgcgtatcgctgcggcgccgaaacggtcagcgtccctatgaagtggtgcctgcgcaacccatccgagtgggttgcagcggcatcccgtcgttcggtaagcgacgagtatgctgcgctgggatacctggtagagcgagtacctgctcattttcgacagttgctgatctcgcggcgtaatctctggagggacaagccaaaagaagaagtcattcaggccgcagtattggcatcgcaattgtctccaggatgtgcgcagggactaccgctcaggttgctgtccggatacggcgtagacactaaattctttgagcgcaacgaattgctcttaagaaagatgctcgacgtcatgttcgagggggaagcatcagtgcagggactctgtggttttttggatgcgtacgacgatacgagccattgggtgctggttacaccactcgaatcaggtctcttgccattcaatcgacagcaggtcacgacctccgagctcgctcaagttgcgctgcctgggacgcgcctcttaatcgtggagaatcaaaaatgtcttcatcaactgcttgagctacctgagaccattgcggttttagggtgtgggctagatttggagtggctgtgttctggtcagctacgtgacaagtcagttgcttattggggagacatagatacctgggggctaaggatgctcgctcgtgcgcgagtgaagcatggaaaagtgacctcattgctgatgtccgaagacgtgtatgacgcgcacaagtccaggtcagctgtcagggagcccgtacgggcccaagacacgccgccagctggcttaacgtcagctgaggctgcattgtttgtgcggctagtggcgagtcgcaagggccggctggagcaagaattcatacctcgacaggaagtacgggcggtattggagcgatgggtatcgtctcaaggagaagcaaagctctga

SEQ ID NO: 47621 - DNA, 1707 bp, Frigoribacterium sp. RIT-PI-h
gtgaaccacccgtcgggacacgacgacgccctgagccgcgacgacgtgcgcgcggcgtacgaagacgaccccacctgggccctgctccgcggctacaacgcccggtggatgctgccgctgttctcccgccacctcgagcacgccgagggtccggtgtcggccgactggttccaccggcaggtcgccgacgccctcgagcagaacgccgccgagcaggcggcatccgagcaggcggcatccgagccagccgtgtccgagccggcgacgacgtcgcggccccccgaggaggcgcggcccgcgtccccgacgcccgtcgccaccccgacccccaccgagcagaagaccaccccggccgagtactgccgcagctgggtcgagagccgctggctcgtccgcacccgcgcctccggaccggacgcccgcgccgagtaccgcctgtcgccgcacgcgctcaaggcgctgcgtctcgtgcgcgacctcgtcgagcgcgacaacgccgtcagcgaggcccggctcggcagcatcgcccacgccgtcgggcagctcgcgggcctcgccgaccccagccgcgagtcgcagctcgcgcgcctcgacgagcagatcgccgagctcgagcgccgcaaggccgagatcgagcggcacggcaccgaacccaccgctcccgacgtgctgcgccgacaggtccgcgaagtggtccgtctgaccgcgtcgctgcccgaggacttccggcagctcggcgccatggtcgagcagcgacaccgcgaggtcgcgcgccgggcgtcgtccgaagacgtcggcaagggcgcactcgtcgaccagtacctgcgcgacaacgacctgctcgagcagacccccgagggtcgcgcctaccgcggcttcgcccagatgctctcgtcgcgcgggatcgacgtgatgcgggccgacatcgagaaggtcctcgcgcaacccgacgccgccgcacagctcaccgagcggcagcgcgcacagctcgagtcgctcatctcgtcgctgctcgccgaagagcagagcgtgcaagagacctacggtcgctggacgtcctcgctgcggcgcttcctcagccggtcgggctccgaccagcagcagcgcctgctcaccctcgccgaccgggcattgcacgcgggcggcgtctgggccgagcgccggccgggccacgccatgctgccggccgagcacggcgacggactgggcctcggggcgctcgacgtccgcgacgtcagccaggtgcagctgcacaccgaccgcgcacgcccgacggtcgacgtgcaggtgacgatcggcgatgcgaccctgcccgaggccgaccgggccgcactccgcctcacctcgggcacgagcacggcggccgtctcggcgacgatcgaccggctgctcgccgaccgcgacgaggtcacgagcgccgacgtctaccgcgccaccgagcccgagttccgccgtctcgggctcgtcctcagcatgctcgacctggcgctcgagcgcggcgtcgtcggcgacgacaccgagaccgtcgagctcgccggtggtcccaccggcctcggcgcgtcgtcggacgcgagcccgggaggcgcgggccggcaggtcacgctgccccgcctcgtcttccggcgcgaccctgcgagcccgcccgacgccgcccccgccgcggcaaacctcacgacccgcacgaccaccacgaaggacctcgcatga

SEQ ID NO: 47622 - DNA, 981 bp, Frigoribacterium sp. RIT-PI-h
atgagccccgcagccccctcggacgagaccggcgtcgacgaggcgacccgcgcctccttcgccgaggcgaccgctccctccgtcgacgagtcggcgcgcgcctcccgcgatgccttcgacgacggcgacgccgacgacgacggggcggccggcgttccggacgcgccgccgctggccggacgcaaggccctggtcacgctgctgacccaccggttcgtgtcgcgcgcccggcagcaggaggcctgggccggcctgctcgcccacgagcccgagatccgggcgcggctcgaggagatgttcctggtgcgcgtcgtcgcccacgaccacgaggtcgccttcaagcggcagggcggcgaggacgacgtgcccgtgctgctgcgccgcgagaagccgctgtcgcgggacgcctcgctgctgatggtcttcgcccgtcgcgagcacgccttcaccgacggcctcgacgaggcggtcgtgatctcgaaggacgccgtcgcggagttcctcgggcggtaccacgacgactcgggctccgacgaggtgcgggcccgtcgccgcgtcgacgccgcgatcgccgcgctcgtcgcccgcgacctgctcacggccgagcccgacgaccccgagctgttcgtcgtctcgcccgcgatcgtgccgctgatgaccgccgaccggctggtacacctcgagcgggtgtacctcgaggcggcgggggtcgagggcgacgcgaccggcgagggcgaggccgacagtccggccgacaccgacgccgagaccgagaccgacgacacggtcgaaccggaggtcgaagccgaccccgtcgacgacgacgactccgccgtcccggccgacgacgacgctcccgagaccgaacccgatccgaccgccgtcccgctcgacctcgacctcgagcccccgcacgactccgacacgaacacagacaccggcacagacaccgacaccgacccggaagcaccccaggcatga

SEQ ID NO: 47623 - DNA, 3465 bp, Frigoribacterium sp. RIT-PI-h
atgagcatcgccgacacctcgcccgacctcggcatgttccactcgggccagtaccgcatcgagcaggtgcagctgctcaactggggcagctacgccggcctgcaccgcatgcccgtggggcgcggcggcatcgccatcctcggtcccaccggccgcggcaagtcgaccgtgctcgacgccatggccgcggtcatcatgcccaacccgcaagagttcaaccgggccgcccgcgacgacagccgccagcggtccgagcgcacggtctacagctacgctcgcggcaagaccgacgaggtgcgcgacgccgcctccgaccggacgacgacgcggttcctgcgaccgctcggacaggcgttcccgagcggtgccgcgatcacgtggtcgaccgagctcggtcagaccgtcacggccgtccgtgtcgcctggatcggcgaggacaccgcgagccaggacgacgtcacccaggcgagcgtctacctgctcgtgcagggccgcttcgacctcagccgcctgtccgaggtgacccgcgagggcacgagccagaacccgctgacccgcggctcgctcgcccggctgctcgaccccgcccacgatcccgcgacctcgtcgcagcccgagctgcgggtgcagctctgcggtcagctcggcatcggcggcagcgacgagtcgcagctcaaggccctgaccctgctgcggcgggcgcaggcgtccaagggcgtgttctcgatcgacgacctcttcaagcagttcgtgctcgtccagccgcaggcgctcagccggtgggagaccacgctcgccacctaccgcgaggcgtccgccctctacgacgtgttcgagacgacccgcaagaagctcgacgtgctcgagggcgtgccgacgctcgccgaccgctacgagctcgccggccgcgacggatcggccaagcgccgcctcctcgcggacgccgacgggcccagccgcctgcgcgtctggctggccgaacgcgtgggcagctgggtcagcggcgaggtcgaccgcgtcacgaccgagaagcgcgagcagggcgaacgccggaggcgcgcccaggcggacgagcagctcgcgttccggtcccgtgaacaggccctggcgcggatcagcgagctcgggggcgatcccacgcagtcgctccgcgagcacgtggccgccgccgaggccgagctcgccgccgtcgagcgcacccgcggccggctcgccgccgccctggacgggacgggcgagtccctcccccggaacgacgagcagctcgtcgccctcgggcagcgtgccgaccgcctcgcggccgacgacgccgcggcccgcgccgcgaccgccgacgcccgcagcgacctcgccgcccgcctcggcgagacgaagcgggccctcgccgccctcgagaagcagaagcgctcgttcgagccgcgccgcagcaacgtgcccgacgacgcgatcgagcgacgtcgccgcatcgccgagggggcgggcgtgccggtgtcgagccttccctacgccggcgagctgttcgaggtcgcgcccgagcacaccgggtgggccgtcgcgatcgagagggtgctcggcgatctcgccacgcacctcctcgtcgaccgcgcgcacttcgacgccgtgcgccgctgggtggacgagaacgacgtgcgcggacgcgtcacgctcgtgccggccaccgccggggccgagccgacgctcacgcccgtcgaccacaccgtgcccgcgatggtgcggctcgacccggccagcccgttccgcggctggctgcacgacgaactcgtcgccgaccgcagcgtgctctgcgtcgagggtcccgacgacctcgacgacccgcgtccggccggcacccgcggcgccgtcacgcgacggggcctccgcaccgggtcgcgcgaccgcgtgatcaaggacgaccggtcgacccgctcgtggatcggcctcgacaacgcggcgcgcatcgccgagctcggcgacgagatcgtcgacctcgaggccgcgctggcccgggtccgtggcgagtacgacgcgatcgaggccgaggcggccgaccgccgccgtgccgccgacgccgtcgcccgggcgaaggagttcacctgggacgagctcgacaccgcccccgcgcagacgcgactcgacgacctgcgcgcccaactggaccgcatcgcggtcgagcgtcccgagctcgcgacgttgcaggccgaggcgacgcagcacgacgacgaccgctccgccgcgacgcgccgcttggccgagatcgatcaggtgctcgcgcagctggacgagaagcacgcgacactcgccgacatcgaggacgagttcgcggacgccgccgacgccgagcccctgaccgacgacgagcgggctctcctcgcccccctgccgttcgccgcaccccgcgaggcgaccgacgtcgcccggctccaccgggacgccgcgtcgccgctgcgggcccaggtcgacgctcacgaccgcgaccgcgcgaacgccgagtcgacgctcgtcgtcgtcttcgagcgctacctcgagctcgaccgcaccgcgggcatcgacgcgacgatcgagagcctgccgtcggtccgggcgatccaccggcagctcgtcgaggacgacctgccgcacgcgaagcagcggcggctcgagaaggccggcagcgacgtgggcgacagcctccgggcgctcctcgtccagatcgaggaggacggccacgtcatccgccgcggcgtccgcccgatctcgcaggcgttgcggtcgatcgagttccggcagggctcgacgctcgacatcgagccgcggccggtgtcgaacggcgacctgctcgagttcaagcgcaccctgcgcgagcacaccggcggggccgagggcacggccgaggcacggtcctcggacggacggtcctcgcaggcgcagtccccggaggcgcgggacgcgtccgagggcgagcgccggttcctgaggctccgccgcgacctcgcccacctcgaggagaagtcgaaggtcggcgacgcctggcgccgtcgggtgctggacgcccgcgagcactaccagttccgggcgatcgagacccgggccgacggcacgcagatcgtgcacgagggcgtggccggcaagtcgggcggcgaggggcaggagctcatcgcgttcgtgctcggggccgcgctgcggttccggctgggcgacggcaccgaccgggtgccgacctatgcgccgatcgtgctcgacgagggcttcgtcaaggccgacgccgagtacaccggccgggccctggcggcgctgacctcgctcggcttccagctcgtggtgggcgcgccacgcgacaaggtcaacgcgttcgagcagcacgtcgagagcgtggcctacatctcgagcgacccgtcgaaccccgagctgtcgcgcatctacccgctgacgatccgccaggcgatccaggtcgagcagcacggcctcgacccggccgcgctcgcctga

SEQ ID NO: 47624 - DNA, 1473 bp, Actinobacteria bacterium OK074
atggagtacgacgacgtggtgcggctgcgcaagcaccacccggcgtggcggctgctgcgggcggagaacgcggcgctcatcctgagcttcttcgacaaagtcttcgtggagcaagggatccgttcgatctccggcgtggagttggccgaccggctggacgacgagctgtacacactgaacgaccggctcggggagcagacgttccccaagtccgcgaaggcgtacctggacgactggtcggccacgcaggcgggctggctgcgcaagtactatccgcctgattcggaggagccacactacgacgcaacacccgccgtggagaaggccgtcgcctgggtccactcgctggaggcccgttccttcatcggcacggagtcgcggctcaataccgtcttcgagctcctgcggcagatgaagttcggtgccgagagtgatccggaagcacggcttgaggaactgaagcggcggcgtctggagctcgatgaggagatggctcgtgtcgagcacggcaatgtgtcggtactcgaccgggcagggctgagagaccggtaccagcaggtgaccgcgaccgctcacgagttgctggccgacttccgtgaggtcgaggcgaacttccgagacctggaccgggagctacgtcagcgaatcgctgtgtggaacggagccaagggtgaactgctcgacgatgtcctgggcagccgggagagcatcgcggagtcggaccagggtcgcagcttccaggcgttctacgacttcctgctgtcctaccggcgccaggaagaactgaagcagttgctggccgaggtcgaggccatggacgcgatcggcgagcccgatccacggatgcgccgcatgccccacgcctggctggatgccgccgaacgcacacaggcgacggtgcggcagctgtccgagcagctgcgccggttccttgacgaccgcgtctggtcggaggaccgccgcgtcatggagttgatgagcggcatcgaggcgcgcgccgccaccctgcgggacatgcccgtggacctggtcacggagatcgacgccatggcaccgacgttcacgctgccgatggaacgcccgctctacacgccggttacccggaccccgatcgacagctccgacatccaggccggtgacgaggagttcgcggcctccgccttgtacgaggccgtctacgtagaccctgcccgactgactgcgaccgtggaacgagcgctggaagatcaggcgcaggtatcgctgtcagagcttgtgcgtgtggttccgctggaacagggactcgctgagctcgtcgcctatctcgcgctgtccagcgacaccttcaccgtcgttttcgacgacgttcgcaccgagaacatcacgtggaccgacccagacggaatcgagcacaccgcgctcgctccgattgccacattcgtccgggcgtcgggcagcgccaccctggcacatgcagtatcggaggagccgtga

SEQ ID NO: 47625 - DNA, 621 bp, Actinobacteria bacterium OK074
gtgaccaccccacccaccccgaaatccgggcagacgcacaacccttctctgccggtgaaccagctactcaagggaccggtcttccgtaaccagcacgagcgtgcctgggaggcactcctgcatctgcgtgcccgcgtgcaggaccacgtcgacgtcatgggtctgaccgttgtgatcgacgagaccgagggatacgcgttcctgcggtcgaagcccgacgacgagcatgacgaccctcgttcggctcccccacgcctcatgcatcgccgctccctctcctacccagtgagtctcctgatcgtgttgttgcgcaagcggctcgcggagttcgacgcgggatccggcgacacacgactgatgatcacccgggacgagatcgtcgaaatgatccgcatgttcctgcccgccagcagcaacgaggcacggctggtagaccagatcgacacccacatcggcaaggtcgtcgagctgcagttcctgcgccggtccaagcaacaggagcagttgtacgaggtgcaacgcatcatcaaggcgtacgtcgacgggcaatggcttgccgacttcgaacagaacctggcccgatacacagccgctctcacctccacggagcccacgcagtga

SEQ ID NO: 47626 - DNA, 3417 bp, Actinobacteria bacterium OK074
gtgatccccacgcaaaccggccctctcggcagcaccagctccctggcgccccaccttcccgggttccggctcgaccgcctggaggtctacaactggggcacgttcaaccaccgggtgtggaccttcaccgtcggcggtgccaacgccctgctgacaggtgacatcggctccggcaaatcgacgctcgtcgacgccatcaccaccctgttcatgcccgccaaccgcatcgcctacaaccgggccgccggcgccgagacccgcgagcggaacctgcgctcctacgtactcggacactacaaatccgagcgcaacgagaccaccggctcgacccgccccgtcgccctgcgcaagcccggcaactactcggtgatcctggcagtgttcaccaaccccggatacgacgcgacggtcaccctggcccaggtcttctggatggccgatgccaacgccacccagcccgagcgtctcttcctcaccgcggaccgcgccctctccgtcaccgaggacttcgccgatttcggcaccgacgtgcgcgcgctgaagaagcgactgaccgccagcggcgtgcgggtgcacccgtccttccccacctacagcaaagacttccgccgtcggatgggcatcgaatccgagcaggccctggacctcttccaccagaccgtgtccatgaagtcggtgggcagcctggacgaattcgtccgcacccacatgctcgagccgttcgacgccgccgcactcaccgacaccatcgtgtcccacttcgacgcgctgaccagcacctacgacgcggttcagcgagcccgcgcgcagatcgaagccctcacaccgctactcgccgactgcgaccagcacgacgagctcggccggcgcatggccgacgccgccgcccagcagtcggccctgccgtacttcttcgcccaccggacctccaccctgctggagacggaacgcgcaacactcgagaagaccctgctggacaaacaacgtgaggaacgcgaggccaaggagcgcacgaacgacctacggcagcaacaacaaaccctggagctgcggcgagcgggtctcggcggcgagcggctgggcgagctggaacggcagatcgcggaaggagcccggctgcgcgatgtccgtcgtggcagagctgacacgtacgcgcagttcctgggacaggtcggtctcgaccccgtggacagtgcccaactcttcagtgtgcgccgtgccgagatcgcgtccgccagggacgccacccataccgcacaacagcagagccaggacgaactcgccgacatcgcggtggaggtggaccgtctgcggcgtgctgcggacgagctcaactccgagctggtcagtctccgttccaggcggggcaacatccccaggaagcagctcgatctgcggtcccgcctgtgccaggagctcggtatcgacgaggccgagttgccgttcgccggcgaactggtccaggtacgcgaggacgagcaggaatgggccggtgccgccgagcggctgctgcatggcttcgccctgtccatgctcgttcccgtcaaccggtactctgtcgtgtccgactggatcaacgaccaccacctccgcgcccgtctggtgtacttccgcgtccccacctcctccgcggccaggcgcccagcgcacaccactgcgcccctgctgtcggccaagctcgagatcaagtccgactcccccttcgctcactggctgcttggcgaactggaccgacgggccggatatgagtgcgccgagaccatggccgccttcaagcaagctgatctggccatcacccggcaggggttgatcaagggggtacgtggccgtcacgagaagaacgacaccactcgtatcgacgaccgcagcacttacgtacttggttggagcaaccaggcgaagatcgacgccctgatcgagcaggccgccacagtacaacgcgagcaacagcagaccgccggcaccaagaaggtcctgacaaccacccaggccaaacacatcgcccgaggtgaaacgctggcgcagctccaacagaccacggactacgccgacatcgactggcagggtgccgtcaaccggttgggccaactggaggcagaaaagagactccttgagaagagttcggcggagctggacgatctctcccagcgcatcgacgcctgtgccaaagagatcgaggaggccgaacacgcacgggacgccgcggtccgttccatcggccgcctgaacagggatgtggaggacaccatccgccgactgggcacagcactcagtctgctggactcgtccgagtccaacacagcctctacgcatttcgcctcgttggcagagcgtctcgcacaagcccgtctgtcctgcgccaccgtggacgcatgcgccaccgccgagaagcgtcttggggacgacctcagcgcggcgaaggagcgctgggcccagcggcagaaccgcctcggccagtccatcgcatcccgcatgggcgcattccgccgcgaccaccaagtcgagaccaacgaactggacgactcggtcgcctccgcgcgcggctaccgagaactgcaccagcgcctcgtcgccgacgacttgccccgcttccaggaacagttcaagacctatctggaaaccaacgtcatccgtgatatcgcaggcttccacgcacagctggccggacaagccgagcagatccacgaccgagtgaccactatcaacaactcgctggccgacatcgactacaaccccggccgctacatcacgctcaagaccgaccggacccccaacatcgacgtccgcgacttcatcacggaactgcgcgcctgcaccgacggcgtcgtgtcagagggccagtccgacgtctactcggaagagaaattccaccaggtacggcgcctcatcgaacgcttcaaggggcgcgaaggacacacagacgccgaccgggcgtggacgaagcgcgtgaccgacgtccgtaactggttcgtcttcagcgccagtgaacggcgccgcgaggacgacgcggagtacgaggtctactccgactccggcggcaagtccggcggccagaaggagaagctggcctacaccatcctggccgcgtccctcgcctaccagttcaagctggacccggacgccacccggtccaagacattcaggttcgtcgtcatcgacgaagccttcggccgcggttcggaagagtccgcgcgcttcgccctgggcctcttccaacggctcggtctgcagctcctcatcgttaccccgctccagaagatccacgtcatcgagccgtacgtctccgccgtgggcttcgtcgagaacccgaacgactgcgactcgcgcctacggaacctgaccatcacccagtaccgacaggagcgtgctgcccacaccctgtccgccctgaagacgaccgccggtcggagggcgtga

SEQ ID NO: 47627 - DNA, 1182 bp, Actinobacteria bacterium OK074
atggcaacacgcccccaacaacactggaccgcccccgacgacgtcatcactcgcttgcgcaaaagatgggacaaaggcacctacctcacggcacttgccgagcagaccccctgggaacccttctgcattcccctgactgggcccaagcccggcgacatcaccagcgacttcaccgccgtgctcgcctggagccggtcatgggctaccgacgccgggcctctacgagtcgcatatcgccgtttggggggccgcatcgccggtaccaacaacatcccacaccaggcatggatcgaccgcccggagcacctttgggaactcctcggcgtcgaggaagacgtcaaccaataccgagccctcatagattccgcggcaagaacagcgccccagctcctgacgtggatgagcgccaacccgctgaaggtgttggccctctcctcggagtggccgcgcatccaagcaaccgtcggctggatcaccgactatcgcggaccggccctccacgtacggcagatcgatgtacccggcgtggacaccaaattcatcgaacgtcatcgcgctgttctaagcacactcctggacatcagccttccgcccgaacgcatcaactccaccgttcagcgggcaaacttcacggaacgtttccgattcctgaggaagcccacgtatattcgcttccgcatcctcgacggcgaatcgcgactgtgcggttttagtgaactcaccgtacgagcggaagaattcactgaagcacctcgtgggatcacgaacgtctacgtagtcgagaacgagactacgtaccttgcgttcccatccgtatccggcagcgttgtcgtccacggtgggggctacgccgtcacacaactcgcatcgcttccctggctccacaacatgcgagtcatctactggggcgatctagacacccacggcttcgcgatcctcaatcgcctgcggaaccacttccctcacacggagtcgatgctgatggaccgctccacgctcaccgcccaccgcgatcactgggcccgcgagaccgttcccacgcatgagcacctcgaactgctctcggtcgacgaggcagacctctatcgaagcctggtggacgacgaattcgggcacttcattcggctggagcaggagcggatccacttctccgcactcgaatcggccctgtcggagaaatag

SEQ ID NO: 47628 - DNA, 1515 bp, Mesorhizobium plurifarium
atgctatttggccagctgaaccccgatatctttgcccttttcgctggatccaaccgtttcttgtacgaacgaatcctgattggcctctatgagggtttctatcgttccgacttgcactttccttctcagggcgaggttcttcacctgatctacggattgttgggcgagcatgccgagttctggcgcgaggatgaggccccggtccttctcgaccagttggccgctcgccgcgggcgacgtatcaggcgacggaagctggaagcggccgatccgcaagcttccaacgaggctatgatacgggcacgccacatctactaccgattggtcgcaacaggctggatggaagagagccgttatggcctgaaggtgaccgtggacatgccggcgggcgccatgcggcttgccgagtttctgtgcaatttgaaagagggcctggcggagcaattgggcggcctagtcattcaggtgaagaatgagctcgatgcactacagctcaatgcacgggagaacgcactcgggctgcacaaagctgcgcgcgacgccgccgcatttggccgctatctgcgcagcgtactgagcgcactacgtgaaatcgacaagcaggtcttggcaagcgacagcgtcggccgcaggctgcgccattacttcgaggatttcattgggcgaatcctgctgcaggactatgccgcgatctcgacgacttctcacccctaccgatttcgccatcgcatcttcacggcgctcgattcgatcgaggattcgatcgccgacgtcggtgcgatcgccgaagtctatggcgaggcccggctcgccgcggacatcaccgctgcacgggatctcgtgtacgacgaccttcacaaggttcggcgcgtcttcgaccagatcgaagaagcgttcgagcgcattcagcagcatcgaagccgccttgagacgcgcctgcgtaacacagtgcgctacgcaggccgtcgtggtggcactttccttcaacgaagcgagccgatcctgcttcggcttgacaagctcctcgggagacgcgtcggcgatgttagcctttccgggttgctggagccgcggcagacatattggtcgccgctgctgctcgcgcgggcccgcaacttccgtaccagcgtgacgggaggcgtcatcgtccttccgcctccagatcccttgcgcgaacttcgaaagcggctcgagcgagagtatctcaatcgcctcgcagtgacgccagaacaagtcagtcgcttcttagagaaacgcgttcccccttcaggtgtaaccgatgccaggtacttctggatcgacaccatcgacgattttcttgcgttcgagactttgcggctgtcgattctcgcagcagaccaggatggccgcggcaacgcaattgctgatcatctcgcttcggcgtttggcttttcgcctggggagtggattgacaatgcctggctgagttgcgcgggcttcgccgtcatacgcaagggtgacagcgtgacacttgaggggtcccatgctcagtga

SEQ ID NO: 47629 - DNA, 666 bp, Mesorhizobium plurifarium
atgctcagtgagttccaggcgctcgaagcgcgcgatccacgccgcatgcaacgagtgagacaggtgatcagtcatttgctgcgcaaccagttcttacacgtggaggatcgaggctcgtcaggcctccttgacacattgctcagagcggacgtcgaacgacttgcttccgactatttcgacgttgcaggatatcggttaatcgtacgcgagagtgaggggtgggctggcattctgcccgatacagagcagatcagtcatacgcgtatgcgaatcgatgagaccctggtgttactcctctttcgcaggctgtgggaggaaggcgttcaggaaggcgacatcgaacgctacggcagcgtgcttgtaacgctcaatgcggcttacgacgcataccaggacatggtggcgcgcgctcgccggcccaccctgtcgatcggtgactttaaagcgctggtggccacactggagcgacgtgccatcgttcggctgggggacctcgacgatgagcttgaggatattccgcttacaatccgcgccctggtggcaaccgtcgccggtgacgagttcctcactcatctcgaagagttgctcatgcgacctgatcttcaagacaccgatccggagccgctggataacaacacggacaccaacgaggacgacgaagcatga

SEQ ID NO: 47630 - DNA, 3444 bp, Mesorhizobium plurifarium
atgatgcagctcgtccacatcgcgctcgtacaatggcatttgttcggccgtgaagatctggcgattgcgggcgacacagcgatcttgggtcagaaccgttcaggcaagtcaacgctgatcgacttgatccagaccgtgatgacaggcggcacccggcgctggtaccagttcaaccgctcggcgggcgaaaccggaagtcgcaaatcggagcgaaccttgcgcggctattgcctcggccaactcaacgagcatgaatttttgcgcgaggaggctgtgactaacatcgcgctcgtattcgctgacccacaaggtgttcggccgccggtgagtgtgggcctgtgtatcgaggcttcggccaccgaagaggcgcaagtggtcgggcgctacattgcgcccggaatccgtgtggataccgagcttctcgtcgaacagttggaaggcaatcagcagcggtcggcctcgtgggcattggtgcgcgatcgcctggagcaatcctgcaacgctaagggaacggcgctaatccgccctgacgggccgcgcaaccatatccgcgaatatatgcgccagttgttcactggcaggcgacatagcgatcctgagcgcttcattcgcgcgtttgtgatggcgctttcgttcgaagacatgcggtcggttgaagacttcatctacaagttccttttggccaagaacgacatcaacattggcgagctgcgagagagcattcagcgttaccgcgacatccaaaaggacatccacgaactcgaacgacggcttgcggcactgcgaatacttgcagaactggtagccaaattcgttagcttgcttgagcgcgaggaaatcaccaggggtgtcgcgcgactggcagcactgatcgaggcgggctcagctcttcttgccaacatcaaagagcgccgggacaatcgtgcttcggtcgagcaaacgcagcgcatgatcgagcgttgcgaggaggagatcaagtcgctaatcgagcagcaagacagtctcgttgcgcagtccctagcagaaggtgtcgccggcaagcgcgcggtagtgcaaagcgaactcagggccgtcgagcttgcccaagaagcggtctcgcagcgcttgcaggcacgatttattgccgttgcgcgcgccgccagcttgcttgatcatcgcgagcgcctagcatcgctgaagctcggggcactattccagagcctagaagctctcaagaggaagagcgaggggctggcgccgccgacatggccacgcgagccgcatgagatggaagaggtcatcgcgggggcgcgcgaaactgccttagccaacatcgcaaagatactcgaccgccgcgacaacgcgatcacccagcgccgcaagttgcaggaagaaattaccgatcttgtcgagcgccgcgaccgagcacgtactggtcaggtcgcgctcgatgagcgcaccattcggctaatggctacgctcgagagggaaaatatgcggccacgggcgctctgtcaggtcgcggagatcatcgatcctgattggcgcgaggcggcggaagcgctgctgggacgcgatcgtgaggctattctagtcgagcccgcgcatgctcctcgcgcggtcgaaatcctacgctccggccgcgacagctttcgcggctgccgcgtggtcaatacgcgacgcttgaacgaacaaccatccggcttcgaggctaattcgctggcaaccatcttcgccagcgaggatcagctcgctatggccttcattcgcttccgaaccggtcaggtgcgtctagctgacacccaagctgagttgcttggtggtggtcgcgcgattatgcgcgacggcgcatataacagcggaatcgtgattgaagtgctgcgcacgcaggacctcaagatcggccgagccgctgctccgttgatggaggctgagttggcacgtcagatcgcggagcgtcagggctgggtagcaacacatctggaggccgagcgattccacgacgatatccgacgcaagctggagccgctgctggaggaagtgccagtcgccgaccgcctcgacttgctggctgaagcgatcgaccagcataatgtgacgcgcatcgaactgcagaagaggttggaccgaatttctgcgacggtcgatccagcgattcaacaaggactggatcgcgtgaagcttcagctacgcagtgtcaacgacgagaaggacgagctcgttggtcgccgcggccaactgaagcaggccgatctcgatgttcaacgccggctaggggccggcgatgggcagccaggctcctggaattgcctgaaggcccggcgtctggcgttcagggatcgtgtgcgaacgcgcgcccaattggttgcactgcgtgagacctatattgctcagcgctcgcggccgctgtcgcgggtgacgcaggagatgtcgaagcgtgcggacgaggctcgagatacatatcgagcgtgcgagggagagattcgcgaagcactcggtcactaccgtgcaagcttcgacagcactgcaccggtcgcaacacaaggatcaatcacctctgagataaaaccttgggtttcctcgaatttgcaggcgctcgaggagaatgagctcattcagtatcggcgacaggccgatgaagcggcagcacagatcggccaactgttccgtacggctttcatccacgagctcaacgctaggttcaatgacctcaggaccgagctcgacaatctcacccgtgcattaaaggcccggccgcttcacggcgaaatctacacgttacatgcgcggccgaaagaagagtttgcgtcccttcaccggttggcacgagagagcgaaaatgatgatcaggtcttcgaggcgctgtttgggcgaggcacgccgcgcaatgaagaacatgcccaagcactcgctgaggtcgagcggttgctcagtgaggacgcgctcgatttcacggcttatcaggactaccgcaactactttaccttcgaccttcgcatggaagacgttgcgaagggtcggcagaccagcttcgataaacgtaagggaactgcgagcggtgccgaacgccaggttccctattatgtagtgatcggcgcagctttggcgagtatctaccatggcgcccgacgtcaatacgaggcgagcgagctcgggcttggattggccgtcttcgacgaggcattcagcaaaatggacggcccgaaccaacgcacgctgcttgagttttatgatgacatcgggcttcaagtggtgatcgcagctccttccgagaagcgctccgtcgtctatgagaacctcgatagtgttattgacgtattccgccacggcgacagtgccagcgccgagaccgtccggatcaaggcccatgcccgcgcccaaatgcgcgctgctaacccacagcatttgagcgacgccgtgctcatcacgcgtctcaactcgccggcttcggatgcagcagaatga

SEQ ID NO: 47631 - DNA, 1200 bp, Mesorhizobium plurifarium
atgagccgaaggcagttcggaaacgtccaccgcctaatccatgatctgcttgaccggtacgagagcaatcctcaagcgtcgaggattctggcctacatcgatgaagatgctctccagactgttgaggaacgtgatcgtttcattcaggcgctgtttggcattgaaaaggcgggcggcatagtcatccaacgtaagcgggccgaaggcgcgttcgtcttagggagtgttcgtcttgcggaccccacggttctttatgctcatgtcaatcggacgcctgcaaaagtgagcgcaggcatcgcccttggtaaagcgcgcgtacggtcagatcttcccgaaggggcgctcgatgtgctcgatgaaattgcgaatgcttggtcccgtggagtcggccgattcgggctcgcacctggggatagctccggtctttccgcatcgctcgatctcgttcatgcgctcgctatccgcgcagaagacggcggcgctgcgccggtagactatcgtacgttctctcgcttggctggcacccccagcaaagcacttgagcgcttagtctcgaccgtccccaggctgttcgagcgcttctatccagatcgtgctccttcggcagaactagactcggcggactggctcgcaactctcggcgtgacccgaacacctcaacccctgattgtcagcggcccgattgcgatcgctggtcagccgcttccgcccctttgcttttacggggtaccgccggaacagggagagcagcttggcttgtctgaccgggtggactatctcctaaccattgagaactacacttcattcgtccggcatgcccgcgagatcaataacaatcgatcagcgctcatcatctatactggcggctttccgtctcggtgtcatctgcaacaaatcgttaggttagcggcggaagcccaagcgccgatattccactggggtgacatagatgacggtggtgttcgtatcttcggtcatttggaacgcacgttggcagagcgtggattgtccttgtttccccatctcatggatgtcgccgctcttcatgagcatggagttgtgagggacaaacaaatgcggaccgcagatgcgccaccgagagagagtgccgttcgtggtctgtgggaggcgctggtggcctctgctctggtacttgagcaggagagcttgtctccacagtatccaagcagacgcacgtga

SEQ ID NO: 47632 - DNA, 1464 bp, Achromobacter sp. 2789STDY5608620; identical to SEQ ID NO: 47451

SEQ ID NO: 47633 - DNA, 690 bp, Achromobacter sp. 2789STDY5608620
gtgaatttgcccgttgacaccgacctggaatgtttggacagcagttccgaagatcagggcgatgctgctctggagagcgaggcccggtttgcaggtgataccggaacgttgccggttcccgcccgccgcgttcttgtacggctgttacagggaccctcacttgacgcgcggcgtcacgagaagctgtgggaggtgttcaagcggtatgagaaggacctcaagtctcgcctccacgacatcttccttgaacttgtggtggacaatgaggccaaggtggccttcactcgccaagtcgtctccgatgaagtggacgtgccgattttgttgcgcaagcagagtttgagtttcatagaatcggtgctgctattgttcttgcgccagaaactcacccactcggatgcgcaggccgaacgagccgtcgttgatctgatggagatgacggagtacctcaaagcctacgagcgtagcgacaacgttgatatgtcccggtttgggaggcagatggagggggcgatcgaaaaggccaagaaactcggggtgcttctcaagctgtctggggcagatgaccgcttcgaaatctctcccagcttgcggttgttgtttcctgctgaggaaatccaggcgctaactgaagcctttcgtcggcacttgcctgtggacgtgttacccgggcaggaggaggatcactga

SEQ ID NO: 47634 - DNA, 3453 bp, Achromobacter sp. 2789STDY5608620; identical to SEQ ID NO: 47453

SEQ ID NO: 47635 - DNA, 1212 bp, Achromobacter sp. 2789STDY5608620; identical to SEQ ID NO: 47454

SEQ ID NO: 47636 - DNA, 1464 bp, Achromobacter sp. 2789STDY5608612; identical to SEQ ID NO: 47451

SEQ ID NO: 47637 - DNA, 690 bp, Achromobacter sp. 2789STDY5608612; identical to SEQ ID NO: 47633

SEQ ID NO: 47638 - DNA, 2853 bp, Achromobacter sp. 2789STDY5608612
gtgcatttcaccgacgagttcagtgcgtatcagacccgtttcacgcgtctgtttgacatcaagagcgaccgggcgctgcggctgttgcataagacgcagtcggcaaaggatctgggcgacctgaacaagttcttgcgcgattttatgctggacccgccagaaactttcgcagtcgccgagacgttggttaacgagttccaagtactaaacggagcgcatgaggctgttttgacagcgcgtaatcagattgaggccctccgacccgtccgcgaccggttgaccgaatatgaccagactcaatcgctcttgtccctgctggctgaggaaaaggtcggcgttgactattggcgtgaacaaaatcgccgagacctgctacaggcatacatcgctgaactcgcgatgagggccgagggcctggctgcaagaatcgaggagcttaagacaaaggaagagcgggaagcgcgcgaatttaactccttgctcgccattcgcgccggtgcgggcggcaatgtgctcgcagacctgcaggctcaagttgaacgcgccgagcgggtacggctccctgacgcgtcggcgaacaactcgcgcttagtaagtagttgcaaagcgctgggatgggccttgcctgcttcccctgaggcgttcgcgcagatccaagcagaagcacgaatcatctttgacgatcgtgattcgatggcggaacgccacgaaaagctcttggataggctgaaggatgagaagcgcgcgttggatgatcgctttgccgcattgcttaaggaaatacgggcaatggaggggcgaacatccaatatgccatcgcgtctcctggaaatccgcgaacgcatgtgtcgcgacctgggcattgtcgaagacgagttaccctttgtcggcgagctgttgcaggtcaaagccaaagaaggtcagtggactggagccatcgagcgtgttcttgggggcttcgcccgtgacctgctcgtcgaggagcgctattaccgggaagtggctgcctgggtagatcagacgcacttggggctgcgccttggctatcgccgcatgacgaccagggcgaatcagagtgccgcaacccaacctgctaccaactcacttctacgaaagttggacgtcgcgccaagacacaaggattgggtgtccgaggaactgcgtcggttcgactacgcgtgtgtcgacagctccgatgatttgcgcttggtggagcgcggcgtcacgttggctggccaagtcaagcacaaccgcagcttgcacgagaaaaacgattcgcgccgagtggatgatcggggaaattgggtcttaggcttttcgaatgcggagaagttgcagacatataaggtcgaatttgaaacactccaggtagctgtcgccaaggcagaaaaggcacttgaacaggcgcgggaaatgacgcggaacgaaagccgccaagtcgaacattgccaaaacctcgtgaacgtcacttgggagaacagcaacgttgccgccttgcttgatgatattcagtcgctcaaggaccgcatcgcgcaggaactccggtccaggccgcagctttccgaactggacaataaggttgaccgacaacgcaagacgtgggaccgagcggttgatgcgagacagacggctcagggcgaggcggcagatatggaccgtgagcgttcgaaagcgcagaagcgccttgatgaactgcccccggaacagcttcggtttccgctgtcgcctacgcagaaggagcgacttgccgcgcggttcgaggctaccgggaaaaagatgacggtggagcaacttgattctgcctgcatggcgatggttcgagccatcggtgatgaggagaacgcagcaacgagtaagactgccgagatcaagcagaaaattgaacacggcttgtttgtcttttgtcagaggtggccagcggaggcgcaggggttggaccccaagatggactccgcgcctgatttcatggccaagctagcgagactggaaaccgacggcctgcacgaatacgttgcgcgcttcaaagcgctactgcgtgagcagagcgaccagaaccttgctgtactgcatgccaagttggaccaagaacgccgcaatatcggcgagcggatggagcaggtcaatgacagtcttcgccgctgtgcgttcaacgagaacacgtacctggaaatcaactacgatgaccgaccgacccaggaggtagtcgagttccgcagcttgctcaaggctgccttaagtcacagctttaaggaggacgacgacgaggaaatggagcggcgcttctctgtcttgaacgctgttgttcaacgacttggtagtcaacaacctgcggatgtgaagtggcgcagcctagtgttggacgtgcgccagcacgttgtcttctccgccacggaatttgacgacactagcatcgaagttgagacttatgacagtggagcgggtaagtccggtgggcagaggcagaagctcaccacgactgttcttgcagctgcgttgcgctaccagcttgccggcgaggagggggtctggccgacctattcgaccgtggtcatggacgaggccttcgatcgggcggacaacgaattcaccgcgatggtgatgaacatcttcaagagcttcggtttccaggtcgtggctgccacgcctgtgaagaatgtgatggcgttggaaccgttcatcggaggcggcacgttcgtcagcattagggacagaaaacactcggaagcgttggccatcacgtacgtggaccagactggacgactcgatctgccgcgggaggctcacgaggttcttgccgaggagctggcagccgacaccaccggaacggcagagggaggactgcagagtgaatga

SEQ ID NO: 47639 - DNA, 1212 bp, Achromobacter sp. 2789STDY5608612; identical to SEQ ID NO: 47454

SEQ ID NO: 47640 - DNA, 1494 bp, Achromobacter sp. 2789STDY5608607
atggctgttcatgacttaacagaccaaattcgccaagagaaggtggctgaacgctatccgccgctcttcaaacgcctgcccgaccgcctgttcgcgccgctggcttcggccaatcgcttccaatattggtcactgctgtgtgttctgcacgccaaacgcttcggcccagaggccccgttgccgccgagtaccggcttcttgatgcgcgaaatcacggccgacatagccgaagaactccagtaccaggactggactccggaaggcgatgacgtaacgccagccacaccgctggcaatccgagccatcatggtcttcaatcgcttgcgcgacgcgggatggatccgcgtggaccgagtgggcgtgcgcgagatggtgacgatggctcccgccgtcgcccatttcatgaaccgcctcgtggagttcgctcacaccggcccggagttcgtctccggcaagatccgcagcatcgaagccaacctgaagctgcttctggacgagagcacagatggtgcctcgctgcaggaagcagcccgccagtcgcgcgccctacttgaacacgtccgcatcgccggcacgaatgtgcgcgatctaatgctggagatcggtcgcgtcgacgccaccggcgagttcgtgagacgcttcttcgatgactacgtcgagcgcatgttcatcggtgactacaaggaattgcgcacgcgcgagcatcccctggcccggcgtcaggagatcctgcgcctggtgacccatatccagcagacgcaagacctgcgcgctcggttaatccagtggtacctcgagaagcaagctggccgcgaccctacccgcgctgaagccatgttcgagcgtgacgtccagaaggtagaggatctgcgccggatcgacgaatacctggaccggctggacgacgaaatccggcgcgccaacaagctggcgttggcctatctagactaccggcttcgggccgcccgccctctcgacgaattgatcaatcaagccatcgacgccgttgtcaagcacggcagcaaggcggccgcgctggcaccgtttgctcccggggactgcgtcggcggcgaacggttggcttcgcctcgcatcgagaccaagcgtccgccgcccagcggactacgcaagcaagtgatgtcccccgagcaggaggccagggcccgcctggccctgatggctcgggacaggcgcaccatgtcgctaccaaagctcgcggccttcgtgcgccaacaactaggcgaggcggatgcgttgcctagcaccgccctccaagtaaatagcattgagtcgacccgagcgctgcaggtcttgtgcaccattgccacagcgaacgcgacatccagcaagctactccgcgccaacgcacgagcaatgagcagcggattcaccacggtccgaatggaaggcgaagaggttcggagccagggcatctctcaccaacccttcactatcgcaagaacaaccaagccagccaagggaggaagccaatga

SEQ ID NO: 47641 - DNA, 663 bp, Achromobacter sp. 2789STDY5608607
atgagtttctggacggatgcggctacggccaccaagaacgtggccacggaggatgatttcgaggcagcggcgaatcggctaataaccgagcaggttttgtacgccgcggatcgcggcagcaaggtggcctacgggctgatccgagactttgagcgtgagttcaagcgggccttggaacccctgggttacgtcgtgagggttaacagccaactgcgctatgcctgcgccatccccaagcacgccaggacgtcaccagtcaccgttgaccagacgctgctcgcactggtgctacgcaagatcttcgacgaggaaactcgatccgggcaccatgacgaaaacggcgaggtggcctgcgatctggtcacgctggaggtcaagtacaagcaaatgacggggggccgcgaattggccaccggaggtaagctcgcggcgctgatccagtggatgcggcgctggggcctcgcccgagtgtcggacgaggacggcaatcagttcgggcacgatgcggatcagccctacgtggtcatcatccgccccggtatcgccgaggtcctaggagaggcggcgctggcacgcatcgccctcttcaccagcccggacgacgagattgacggcgtggaccctgcggtcgcctccaccgtggaagaaggcggtgccgcatga

SEQ ID NO: 47642 - DNA, 3444 bp, Achromobacter sp. 2789STDY5608607
atgaaaaagctgatacgcatccgggtagtccagttcttcttgtacgaaatgcgtgatgtcgaagtcggcatgaactgcggcatcttcggcgccaacggcagcggcaaatcctcgctcctggacgccgtgcaaatcgtaatgctaggggccaacgagagccgcggtagcgcaggcgtcgccttcaacgcgcaggccgacgagtccaaccacaacagccgcaatattcgcagctactgcttgggccagtatggtgactcgccggatgcacgcgttcgcgacagtgccaacacctacatcaccctggtctgggaggacaccacgacccaggaaattgtctccaccggtgtgagcatctacgtgagcgccgaccgcgaaaaatctgacgtgcagggtcgctatattctccccgcggatatcgcgctcagcgaccatctcgagctggttgacggtgaatatcgaccgcggccctgggctagcttcaggcagatgctctcgcagcgcgcttacggtgaagaagtgctcttccacgactctgagcgcttcgtcaacgctatgctgttccgactaagaggcacgcggggtgcgccgcgcttggatgcctaccgccaagcgttccgtttcgggctacgcatgaagttcgacaagagcgtcgatgacattgtccgccagcaagtgctggagacccggccgaccaacatcaagcgattcaaggaagtgctgcacacgttccaggagatggcgaccctggtgcgcaacgtgcaggccaagcttgacgaggccgaattgatcgagacggattttgctgatgcacaccgacgcaacacccattcggtctctctcgctgctttggcccaagctgccgaactcgaggtcgccatcgaggcagtgaccgccgcagaggaagccgagagccaagcagcagcagcactggaagccgccaatacccggcgtgacgaagtcaaccgtcaagtcgaagcggcggagcaacacgcacgcgatagcgcctctgcccgggacaagcacgcgtcccacgcggacgctgcgttgctgcgcgaaagcctcgccaaaatacaaaaccggctcactgaacaaagaacgggactgcatcgcagcatccaagccatcggaagggctatcgacgcacagatccctggcaagctcgtcgccgacagcgccgaggcaacggcacaggcgttcaaggacgttcacgccctgctagagggggataaagccaccagacgcgatgcagtagagtcgacagtccgcaaggcgctacgcgcagccaagctattaagcaacgagctgttcgaggagatgcaggccgttggtcgcgcgcagacggcagccgaggccgagctcgctggcgtgcaagagaatcaggagcgcatcgccaagggcaagccacctctggaggggccggctgcggcgctcaagcgcgcgctagccaacgctggcgtggacgctactccggtgtgcgacctggtgcgtgtcgacgacccagactggcaacctgccatcgagtcctatctgggtacgtcgaacatgcaagctctgctggtcgacgaggcagacgaacgcaaggcattccgggtgtctcgtcaggctgcgatctacgatgcgaaggtcgtgatgcccagcaagttctccaatcgcagcagccccaggcgcggtgccgtggcagagctaatcagtggtaacagcgctgcagcggtcaactacctgcgatccaagttcggcgacacgcaacgggcagagactgaggacgaatgcttcgctcatcgcttcgcaatgaccaaggacggcatgttgctggctgatggcgagatggtacgcaagaagccggcgaatcccgccctcttcaagatcggcccgacctctacggcgactcgcacttccatcgccgaacaagcccgtcagctccaagagaagattgatgaattcaaggagaggtacgccaagctcaaggagctcttgaacaaccttggaccattcgtgggtggagagcaggacaaggttcacgaagtcctcgaaatcttcgatcggataaccaaagaggcggccgatgaggaggatctgacgcggcgcctacaagccctcaatactgaagagtatcgacagttggtgcaggtagccaaagcagcagaagcgagcttgggcgacgtgcgcaaacaactgcttactgcggcccaggcggtcggtgcagcagagacggcatgtcagcaaaagagcgaagacaccaagaagaagcaggctcgggccgttacccaaaagggaatcgctgaagcagcacgtgcggttgacggttacgacgccgattacgcatcggaccaatgggaaaggctattgacacgccagggtctgtctttcagtgagatcgtcgccgactgcaaacaccgcagcaaccgtgctgagacagactcccgtcagaaatggtccagcgccatgcagaagctgtcggcgttccttgtcaggcacaacgagttcatgccagcaggaacccaggacgactggcgcagcgcccgcgcttggctggacgcacgggtcgtagtgctcactgagaccggtctgcgcgagaacaaggcccggatggaagatgccctgagcgccgccaagagcactttccgcaacgacgttgcggtggcgctgcacgagcaccttgagtggttgagtgacaccatcaatcggatgaacgaggccttgcgcttggcgccgatgttcaccaacaacgaacgctaccagttccgcgcgcatgtgcgacctgccttcgccgtgctgctgaagttcatcaaggacgtcgcccaatacggcccgaccgaggatttgctcggcggtgctggagagctgcccaaagagttcgaggagctgatgcgcgaaaagacggtcaccggcgcggcagcggtgaagtccccgctggacgactatcgcgagttcttcgacttcgatgtcgaggtgctccgcgaagaggcctccaccggtacgaccaagcacataggctggcttagcaaacgtgtcgggtccggctctggtggcgagcatcgcgctccgctgtatgtgatcgcaggtgccgcactctcgtcagcctatcggctggagcgcggcgacgataccggtatccggctgctggtaatcgacgaggccttcatcaagatggacccgaggaatatcgtggccaccatgcgctacttcgaggagcttggcctgcaggtcttcatggccagcacgggtgacgccttgggtagcctgaccgctttccttgatcgctactacgacatcatgcgcgatgccgagagcaatgtagtagtactcgagggccacgacgttcctctcgagacgcgcgagatgttccgcgccgatctgccagaattcaacccggaactggtcgaagcggagatcagaaggcaatacctaccgcaggccacctcgacggaaggtgccgcagcatga

SEQ ID NO: 47643 - DNA, 1188 bp, Achromobacter sp. 2789STDY5608607
atgagccgccaagaccagtccgagatggatccgctggccagaaaggcgttggagcgactactgaagtctgccgacaagcacgaggctggcgccgccgtgcggcggcctgccctgacggactccgcgctgtccgagtaccgtgagttgcgcggcctgaaggccaaagaggacttcgaggcggtgatggcctacgctcaggccgagggcgcaatcatggctctgcgtcctcggcgtgacccccaaggcctcatcgagcgtatagaactgatcgacgtcgtcaaactagcctgtatcttgggcaaggtgccccatgcagtgcgagtccaatcggcgagacaaaccctcgcctcgcgccttggtgaacatccgatcttgaacgacgtcctgtccagttgggagaggctcaaaaagatccgcggcaccgggcctgatgtcgccgccaactgggacatggcctgtgacgtcatcacctactgccagagcctggtagcacacggcgtcacggagacgccagtgcgagacgccagcgcacgcctgttcaaggacagcaagcgcatcgaggccctagtgccttgcctcgatgtgttactggcaggaaacatcgacgatgatgcacgcccagaagcagaagtgttgcaggaacttggcctctaccgagagccgcagccagcgcggctcgccggcaacatcgtagtccgccgggaacgtggcgcgttccccctggaccgcccctacggcgccctacccccgtccacagtgctgggcctcgggtccatgcccagtcgggtgctgactatcgagaaccagactacgttccatgtatgggcgcgccagcactgcgactccgacacgttgtgcatctacaccgccgggatgccttcccctgcttggcgggcgatgtatctccggctgctttccgaactccccgtttcagctccagtgctgcactggggtgatgtcgacgaaggcgggttccgaatcgccagcgtcctgagccggtgtgtagccgagagcggccacgctctgcggccttggaggatgcggccctcggacgtccctgaatcgctacgccgagcggcgccaacgcgcactgtggagcggatggtcaagtacgcgcacgaagccgggtggaccgaccttgcgcaacagttagcggaaaccaagtttgtcgccgagcaagagggataa

SEQ ID NO: 47644 - DNA, 1464 bp, Achromobacter sp. 2789STDY5608624; identical to SEQ ID NO: 47451

SEQ ID NO: 47645 - DNA, 690 bp, Achromobacter sp. 2789STDY5608624; identical to SEQ ID NO: 47633

SEQ ID NO: 47646 - DNA, 3453 bp, Achromobacter sp. 2789STDY5608624; identical to SEQ ID NO: 47453

SEQ ID NO: 47647 - DNA, 1212 bp, Achromobacter sp. 2789STDY5608624; identical to SEQ ID NO: 47454

SEQ ID NO: 47648 - DNA, 1464 bp, Achromobacter sp. 2789STDY5608616; identical to SEQ ID NO: 47451

SEQ ID NO: 47649 - DNA, 690 bp, Achromobacter sp. 2789STDY5608616; identical to SEQ ID NO: 47633

SEQ ID NO: 47650 - DNA, 3453 bp, Achromobacter sp. 2789STDY5608616; identical to SEQ ID NO: 47453

SEQ ID NO: 47651 - DNA, 1212 bp, Achromobacter sp. 2789STDY5608616; identical to SEQ ID NO: 47454

SEQ ID NO: 47652 - DNA, 1461 bp, Glutamicibacter arilaitensis
atgcagccctcgcaccgcgcgaatagtttgtggcttcaagctcaacagttcaaaggctcggcagcatatcgtcttctgacggcccaaccatgggcggttgccttcatccgagccgagttcaccgccgatcgctcccgcgtagcgctagagctgttccatgcttcattggattcgttcttgaagcaggcgcgtcaaagcgacgagcagattccgcagtcatactctgcccaggattttgccgagacctgggtcaagcaaggaattctcgcgcgaccgctgatcgatgggcgattcgtttatgagcccagcgcgcagaccctgcgcacattgcgcttcctctcagatttttccaccgacgattcccacctgaactcctcgcgattgaacaccttgctttcatcgctggaatccctggtgcatgaaacggacccggatcctgaagcccgaatccgcgccttggaatcccagatcgcccaacgccgggcacaaattgagcagttgcgcagcggggatgatcccgcggtgctctcgcgcacaacagccttgtccgcaacgcgttcgctgttggacctcgcctccagccttcctgcggacttccgccgcatgcgcgatggtgtccaagacatgctgcactcccttcgcgaaggcatcctcgatgcttctaccgccaagggcgtcgcggtgggccaggtgctcgaagccgatcgccaattgcgctcaaccgctgaaggggaaaccttcagcgggttcaccgaattcctgaattctcccgatgcccagcagcgcttccgttcagcgttagcagaagtgctcgaacgcgaatttgttgacgacctcgatgccaccgagcgccaaatcctcaccaacctgctgcgcgagctgcgccggcaggcggccgaagtccatgcgtcctacggcaagctttccgaatccctgcatgcgttcgtccagtccgaggactacaagcaggcggagcttctgcgccaggctgtcaggcaagccgagctggccatcaccaagtcgtcggcgctcaagccgcgcagcggcctggccccgatggatctgtacactccacagctgatgacgctctccggcttggggatctacgatccgtccgaacatgttgcgcctcccccgctggcccaggcaccggaattcagcgaggccgacattgtccgcagtcccgcgacgccacaagccaatatgccattgctgcgcgagtcgattacccggcagttgaaccacgcgccagccggagcagtgcgcatggatgaagtattcgccgctttggacgatgagcatcggcatttgaataccatccgcgcactggttgagattggacgcaccaatggcgaatcgctcaacgaggctgaattggtcaacatcgatttccagcaacttgatggttccctgagaaccgccatcctgcccgccttaagcttcacgaaggagccgctatga

SEQ ID NO: 47653 - DNA, 687 bp, Glutamicibacter arilaitensis
atgaccacgagcgatgcctacgccgcaccgatcgccgaaccgctgttcgacggtgataccggaaaatactccctgccgttgcgccaattgctggttcgcctcttgcgtggaccctaccttgatggcacggtggatgcctccgcatggcagctcttgcttgatcagcagcagacgatcaccgattacttctcggagatcttcttggcgttgaccatggatatggaccgcaaaattgcgatgctgtccccggtccagattgaccaggtccacaccgcgccgatcgcgcctcgccgtccgctgaaacgcgatgaaaccctcttggccctgcgccttcggcttttgctggagcagaactccggcaacggcagcgacgcggtggcctcacgggccaccatgcacgagatcctggccgagcaccgtcaggccgctgaccgtgatgacaagcgatttgccgaatcctgtgatgccgccatctcccgtctgcaatccctgcgattgctgaccagcaccgagctggagaacgaattccgcatctctccggcgttggccatggcactgccgctaagcagcattcaagacattccgcgctacatcgcggcgattgatgccaacgagccggcttttaacctttcgcccgacgacaacgatgaacttgctgaacagtcccccgagttggtgcaggagtaa

SEQ ID NO: 47654 - DNA, 3327 bp, Glutamicibacter arilaitensis
atgagcattgaaatgactcttccgctgggcggcgcgatcaaccccggccagcatcgcctcagccgggtgcagatcgttaactggggtaccttccacgggctgcacgacctgtccgtggaccgggccgggacactggtcaccgggcaccccggtgttggcaaatccaccctgttcgacgccatgggccacgtatttttcgcgactccccgcctcaatgaatcagctaacgacgcggccacccgcgaagaccggcgcaccaccttctcctatatgcgcggacgccaattcaagaccagcgaaggcaccgtttaccagcgtccgggcgccacctggagcgccatcatcctcagctacgaggacggcatgggcaatacggtgactgccggggccgtttttgatctgcccgatgctgggctggaaggccaagtttccaagcactacctgttgtgcgaaggcaaggtggatattgctgagctggagaaccacgggccgcgccgcttcaccgtttcctcgctatccaaggcgctagcacccaccgaagccttcgatacccacaaggcgtttattgagcgtcttcgccgccgcctcggggtggaaagcgataaggcctttgccttgttgcgcaccctgcagaacggcaagggcctggccaaaggcgtcaaccagttcttccgccatgaagttctcgaagaaccggcaacactcaaagccgccgcggcggcagttgaggacttcgcgcaccttcgcggcatctatcgccaattggacaccgcccgtgcccagcgtgacgcgctggccgaggttccccagcaggatctggcctaccgccagttggccaagaaaatcgccgaaacccgccacctgctggacagcgacgtgcaggccctggaagcccaggtccgccagctggtgatgcgcaatgatctctcctcccaccagagcgaactagctgccctgcagatcgaagaaggggaacttcgagcgcgcaaggagcagctcgatgaccagttgcagtccttggaagcggcgcacgattcggccggttccgcctcgctcatgcttctggagcgcgaggccgacgttgctcgaaaggcgctgagcgaaaaggaaaatgcccttcgcgccctgcagcaacaggcgacagatgctggtttgagctttgagttctccgccaccggcttggatgagttgcgtgccaatgcggcccgcactttgcagcagctgtcttcgatcacccacgacgcgcaaaccgtggaatatgaagccatggcatcgctggtcaatttgcgcaagcgcgccgagacgctggccgagcagatccgctcctatcaacgccgcgccagcaatattgatgaccggtccatcgcagcacgccgggcaatcgcttcggcgtgctcgctgagcgaagaccagctgccttttgccggcgagctgatggatgtttccgctgattcctcgacctggcgcctggccgcggagaaggccctgcattccttggcccgcaccctgctggtgccgggcgacctgctggggcaggtgacccatgctatcgaccagcttgatggcctgggacgtgttcgatggatcgatatttcccagcaacccaaggagggtacggcgggcccggcagatctggtcaccaaactcgactttgccccaggcgatgcgggcaattggctaaagtcgaagatcaccgcggattatccgctggcttgcgtggataacgatgccgccatgcatgtgcatcccaaagccatcacccctgcaggcaccatgaaaaccggtgccggaaccttcgaacgcgatactcgcggacttccggcctccgaatacttgctcggcttcaccaacgaatcaaagatttccgagctgcagtcaaaggctgtgcgcttggaggaaaaaatcgcccaggcacaagcgtctgccgatgaacgcagcgccgccaagaacaaggtggttgccaagtcgctgctgctcaaggcgatcattgccgacgagcgcagcttcagccaattggattcttccccggctttggaagcgttgcggcgtggcgagcagaagcttggcgatgccctgtcgctctcgggtgattcctcgcgagtgcgccagcagattgaagcagccaaggccgaagcggaaaagcttgtcggcgaccttgcactggtccgttcccgcatccgggacctgcagctccaggtagaacgtgctcagcaggtcctggccacggcacaggagccggctggcgattgggagcaatcgattccggcgccattgcgccagcatcagttgctcggtccggtccttgaccaggccatttcaggcaagtgcccacccagtgagcaaatcagcgaggccttcgccgaggtcaagctgcagctgggaagccagatgaactcgctgaacagccagcaccaggaaattggcagcgccctgagtgaaactttccgtcgctttgcccgtgatttcggcacctcgcacgcccagacccacggtacctccgcggaggcagccgagcactacacacagctgcacgatcagattgttgccgatggcctgccgcaccacgaagcgcaattccgtgaatacttcgccaaccgctcctacgagcgcttcagcgatctgttgcaattgcttgatgaagagcgtcgcatgatctccgaacgcatcaagccattgaaccagattctggccgaggtgacgttcgagcatggatccatcctgcgcctggaggtcgagaattcgattccggtggaggccgggaacttccgcaaggagttgaaggatgccttgcaggaggcctacacgaccaaggatgaaacgaccttggccacgtcctaccaggcgctggaatccctcgttaccgccttgagcgatccttcactcaacgcgtggcgctccacggtgctggatgttcgtcaacacgtggtcatcagctgcaatgagcacaagaccaatggtgaaatcgaaaccggcttggaacctggaaccctttccggtggcgagggccagcgctttacttccttcatcatgggtgctgctttggcctaccagcttggcttcgcttcggcgggcttcacttccttcggcacggtgatgatcgatgaagcgttcattcaggccaattcggagtatgcggccgccggtatacgcgcactgcaggaattcggcttccacctcgtgcttgccgcgccggaagacaagatcgacctgagccggcatctggggtcgattaccgacatcatcaagcacccgggatccaatatctctggcttcgtgaccaccggccgttcaccggccatggccaccaccatcacgctgcgcagctag

SEQ ID NO: 47655 - DNA, 1458 bp, Gammaproteobacteria bacterium SG8_11
ctgtttttctccgattcccgcaaacattttttccggccgtttaacagtaaataccgggaacaggtggtggaatgcctgcgcttgttttatgtgcggttatacagctcactggcggactacagccgggcgttcagccgcgatcaagtgctggaggtgtttcaggaggccatcacccgcgcgcccatactggaggaagaatcgcaagacccggatgatgccaatctgcctgtgcgcggtgagcgcgaacaagctaactgggtgttaaatctgttgctggagcacggctggatcgagcgccaggtggatgaagccaccttgcaaagcagttacgctttcagccgcatcggacgtttgttcgcccagccctttgtagaaacctcatcggggcgtttccgtacccgccaccgcaatactcgcaatacccgcaatgccttgaattcatttttggaacaaggcgaggtatacgatttattggatgcttttgaatactccgaacgcatcatcagtgatttcagcgatgtcatttccgagttggatgaacgcaaacgccagttggtcaaggaagtggaggcgcaacaagtaattcagcgcgccagcgacgaattttttgattttatggaaaaacgctttatgcccgacttggcgatacgtttgtcggctgatagcgtggaaaaataccgtgatgatattcaaagcttgatccgtaaagccaaacgcaagagcaaggagttcaaggccaacgcggaaaaagagctgcgtaagctggcaccggagttgttgagcgatccaaaagtgtctatttatctgatgatactggatggcttagaaagtcgcctgcacagcgccagcgaaatcatgttaccggccctgcgccatgccttgcacagttttacccgccgggcggacatcattatccgccagctgagctttaccagcagcggattgcaaaatgacattcttgccatatgcaaacaattcacagaattgactgaagaagaacaagagcagtgtttaagtgaagccggtgaccgaatggccgaatggcagctgaaactggtggatcccaatatgacccgattgtacgaaggtcggcgcaaacgcagtattaacacccgagcggaagaacatggcgatgccaacgccgagcaccgccgtgccatgttcgtgcagcgcgccgtagagcaagcgtttgccgtcaataaccaagagttgcgccaatacataatacaggcgctcaatcaaggccatcgcatccacagccaaaacctgccggtacaaaacgccaaagatttgttattaaacgcccacgccatcgaaattggctccggagggcagctgtccagcgaataccggtttcaagtggagcccagcggccaacaggtgcgcacggactatttcgattccacggacgaattcagtatagagttaatcgaattggatcaacatgaatctgactga

SEQ ID NO: 47656 - DNA, 684 bp, Gammaproteobacteria bacterium SG8_11
ctgactgacactattgcgcagcaactggagcgcgaaaacgtaagcctcagcgagttcaaggagctgctgatacgcttgctaaactatggtgtgttgtgccgtggcgaaagccaaaccgaacaactgctgtatgaccgtttcttgcgcattgaagacttgttgagagaatatctgcacttcatagatgtacgactgtttcacgatgagcgttttgaatatgtgcgtttgtatccgcccggcagcgaagtgcccggcatggaagaggcccaggagaacgcctacagcggaagcctgcgaaaccgcttaaaccagcaggaagtggctttggtgttggtgttgcgggcgcaatacgacaaagccttgcatgaagggcaggtggatgaatatggttttgtcaccgaatccctggaagccttgagtatcgccatgaaaaacctactggggagaacgttgccagacaaagtgaccgaaagaaaacgtttgttccaacgcttgcgccagttgcggttgatccaataccgtcaggatgaagacatcgacagcggtgaggcttggataaaaattcatcctatgattgtcagttttgtcagtgatcaagtactggaagccttgcagaatgaatctccgcaaagctcaacgcatgaaaacgccgaaccggatgaagtagaagccgaactgcactaa

SEQ ID NO: 47657 - DNA, 1587 bp, Gammaproteobacteria bacterium SG8_11
atgtttttgaaaaaattcatcttcgtcaactggggcaatatccccaatctggaattcgatttcgggcccattaatttgttctccgggggcaacggctcgggtaaaaccaccgccgccgacgccatccagaccattatgaccgcggcgcacgaaaacctgtttcaatacaatcccggacaggacgaaaccacccagcgtggtcggggcggaaaacgggtgcgcaccttgggttcttatgttctgggctgcgatgatggcagttatgcgcgcctggaaccaaccgacggttacttagccgcggtgtttcaccccacccagggcgaatccgccgagccgttcacggcactcattggggtgcgggcgtggctggataaaaccgccaatcagaacgttgcgcgccaagaagagttgtcattttttattttaccgggagaacagttgcggttaaaccaattggtgcatggccagcaaaacaacaaacacattgtgcccttggataaactgcagaccctattaatcaaagaatacggcaaaacacgggttgaaaaatacgacagtaaaaaagcttatttacgccgactatacgccgtattgagggggcgcaacgacgccgtaaccgaacgcgaggccatggcggcggccaaagcgttttcccgttttatggcgtataagccggtgcaaggcattaataaatttgtcgccgaagaaattctggaaaagaaagatttgggtgatgccatccgttctatttccgggcaattgaaaaccatccatgctatggagcgggatgccggccggttggtggattccatcgccattttggaaaaagcccgtgactacagccaacaatatatcgaacgctggatcgacttaaacactttggactacactctggcgcaacaccactatcaacaacgccagcgtgaatacttgcacgctaaagcgcaacaaaccgaacaccgccaggccctgcagcaaaatgaaagcgaaaccacgctggcgcgcgaacgccgtcagcaaatccatcaacaactggtgcaactggaagcccagcgcatgggtatcagcgccttgcagcaaaaagacgacttggagcgccagcgtgatgaccaacaacagcaattgatcgccaaagccaaacagctgctggaacaggacaacctgctcaatcatagttttgaattgagtcgtagcatacttaacgatttgcaggatgccgaactcattgcggaactgccggtggccactgatttaaacagcagaggattgtgcaagcaagtcatcgaacaaggcggacgcggcgatatagattttcacgccttattaaaccgagacatcaccggtgatctggccgcgctggagagccacctggatcatgcccgcaccgcgcagcgcctgcacaaccaatgggtgcagcattggcatggtttggacagtgaagacaaggaaaaaagcttgcgcggccaattggcgcgcctgagccaccagcgtgaaaaccgttacgaacaattggcgaatcaacgccagcaaaaactgcacgaaatcgaacgtctgcaatcccagcaagtgagttatcccgcccacgtg

SEQ ID NO: 47658 - DNA, 1467 bp, Gordonia sp. QH-11
gtgcaattcgacgagatcgtcgctgtccggaagagcagcgccgcgtggcgcctgctgcgcgcagacaacgccccgctgctgctgtcgtttctgggccgcgtcttcgtcgacgacaacgtccgcgagatctccgagtccgccctcgtgaatctcctcgacgacgagctgtactccctcaacaaacggctcggccccggcacctacccccgcaccccgaaggcctacctggacgaatgggccgccgccgacaccggctggctccgcaagtactacgtcatcgagagcgacgagccgcactacgacgccacgccggcggtggaacgcgccgtcgcctgggtccgctccctgcgggaacgcgggttcgtcggcaccgagtcccgactgaacacggtgatcgaactgctccgccagatcgtgtacggcggcagcaccgacgcggagatccgactggcagaactgcaccgccgccgcgcggaactggatgtcgagatcgaggcggccgagcgcggcgacttccacgtcatggacgcgaccagccgccgcgaccgctaccagcagttcgccgacatcgcccgcgcactcctgtcagacttccgcgaggtggagtcgaacttccgcagcctcgaccgcgagatgcgcgagcgcatcgccacctggcgcggcaccaagggcgagctccttgacgaggtggtcggcagccgcaacgtcatctccgactccgatcagggccgcagctttcaagccttctacgacctcctgctctccgccgaccggctcgacgaactcgacgacctggtccggcagacgcagtcgctcgacggcctgcccgacgacgacgtccgtctcaccaacatccaccacgactggctcgacgcaggcacccgcgcgcagggcaccgttcgtcgcctgtcggagcagctgcggcgcttcctcgacgaccaggcgtggctggagaaccgtcgcgtcatggacctgctccggaacatcgagtcatccgcgtacacgctgcgcgaccaccgcatcgacgacttcgcgcacgagatcgactcccccaccccgcaggtgcacctgccgctggaacggccgctctaccgccgcgccagcaccgtcgaggtggccagcgacggcatcgaggaggggcatgccgacggtgactccaccgccttgttcgagcagatccacatcgatccggccccgctcatcgagcacgtccgctccatgctgcgccgccgcgaccaggtgacgctcgccgacgtgatcgccgagacgccgatggagcagggcctcgccgaactgatcacctacctgtcgctgaccgacgagggcttcaccaaggtcttcgacgagtccgcgacggagaccgtgagctggaccgacgacgtcggtgcccaccgcagcgcgcacgtcccgcgcgtcatctacctgcgccccagccacgatcctgaccaccccgaggagaaccgatga

SEQ ID NO: 47659 - DNA, 600 bp, Gordonia sp. QH-11
atgagccgccccgtgccccgcgacgagctgaacctcccgctcgcggtcacgtcgttgatgaagggcgtcgtctaccgcgacaccgccgagaccgcgtggcggcacgtgctcggtttagccgcgcagatcagcgactacgtggcgacgctcggcctggccgtggtgatcgacgaggccgagggctacgcgttcctgcggtccaagggcgacgacgagctcgccgacctgggcatcccccgactcgtcgcccgccaccagctgccgctgcacacctccctgctgctggcgctgctccgcaagaagctcgccgagcacgacaccaccgacgcgggcaaccgactcatcctgacttcggaccagctgcgcgaactcatcacgccgttcttcccggtgtccgccaacgaggcgcgcaccgccgatcaggccgacaccgccattcgccgcgtcgtcgacctcggcttcctccgccgcatgcccggccaggacggggagtacgaggtgcgccgcgtcatcaaagcctacgtcgacgcgcaatggctggccgacctcgacacccacctggccgaatacgccgacacgatgacgcaggagcagcgatga

SEQ ID NO: 47660 - DNA, 3417 bp, Gordonia sp. QH-11
atgaccggactgttcgcccccaccgaactcgagagcgcggcgtcggcccggtcgggcttccgcctccagcgcttccaggtcctcaactggggaaccttcgaccagcgcgtctggacgctcaccctcgacggtgagaacggcctgctgaccggcgacatcggctccggcaagtcgaccctcgtcgacgccctcaccaccctgctcctgccggcgcaccgcgtcgcgtacaacaaggcggcgggcggcgagtcccgcgaacgcgacctgcggtcgtacgtcctcggctactacaagtccgaacgcaacgaggtcaccggctcttcgcgccccgtcgccctgcgcggcatgagcaactactcggtgatcctcggcgtcttcgcgaacgagggctacgacgagaccgtcaccctggcgcaggtcttctccatgcggcacgacagcggtcagcccgaacgcttcttcaccgtcaccgaccgtccgctcgacatcgccaccgacttcgccgacttcggctcggacctccgcgcgctgcgcaagcggctcaaggacggcgacacccgcatccacgagcacttccccgagtacggccgcgactaccgccggtcgctggcgatccgctccgaacaggccatggagctgttccaccaaaccgtctcgatgaaggccgtcggcaacctcaacgacttcgtccgcgaccacatgctcgagccgttcgactcctccggctgggtggacaccatggtcacccacttcgaggacctcaccgccgcgcacgacgccgttgtcctggcccgcacccaactcgcggagctggagccgctgctggcggaccacgacaagtaccgcggccacaccgagatggccgccgagttgaaggaccggcgcgccgccctgcgcttctacttcgcacagcagcggttcgacctcctcaccgcaggcctggacgtccacaaccgtgacctgcacgccacccgcaccgcgctggagaccgtcgaacgcgacctcgccgatctgcggatcgccctgcgcgaactggaactgcggcaggcagggctcggcggcaccgacatcgcgacgctcgaacagcagatcgccgaagcgacccggcagcgcgacgaacgcaccctcgcctacgaccgctacagcaccatgatcgacgacgcgggcctcgcccccgtcaacgaccgaggccagttcgaccagcggcgcaccgaggtcgccgacgccgtcgccgccctcgacgccgaggtcgccgacaccgagaactccctcaacgaagtccgcttcagcaagcgcgagtacgacaccgagggccgccgcatcgccggcgagatcgccagtctccgcggccgcaccaccaatatccccgaccgcaacctccggatccgcgagctgatctgcgagggcgtcggcatcccgcgcgatgagctcccgttcgtcggcgagctgatcggcgtccgcgaggacgagagccgctgggagggcgccgccgaacgcgtcctgcgcggcttcggactgtcactccttgtggcgtccgatctgtacgacgatgtctccgcctggatcgacgccaatcatctcggcggccgcgtcgtgtacttcaaggtgtccgaccacgtcgcgtcgaagggcgtgccgacgccgccggcgaacgccctcgcccacaagatcgacatcaagcagggccgcttcgaggcctggctggagcgcaggctcttcgagcgcgcccgccacatctgcgccgagaccctcgacgagttccgccgtgccgacgtcgccgtcaccgtcaacgggcaggtccgctccggcggcggacgccacgagaaggacgactcgcagcgcgtcgacgaccgccgcaactacgtcctcggatggagcaacgagcagaagatctccgcgctgttctcggccggccagctgctgcaggatcgcctcaatcgggtcgacggcgagatcgacgaactcgaggagcgtcgtcgcgcgctgatggcgcgccgcaacgcgctcaccggcctcgacgcctaccccagcttcgacatcgtcgacgccgcctcgtcagtggcgcggatcgccgagctcaccgcccgcaagaccgagctggagcagtcgtcgtcggagctcgccgaggtcaccgacgcgattgccgccacccgcgagcagctgtccgccgccgatgcgacgcgcgacggcctgcgcgacaaggtctctcgcctggagatggcacgcgggcagagcgaacaggcccgcgacgccgcccagcaggtgatcggtgaccccgagttcgacgacgcgcagccgcacttcgaggcgatcgccgccgacgtcgaaaagtaccgcgctaaggtccgcaccgccgacgacgccgatgacgccgagctgaccgtcgccgagtgcggcgaactcgaatcgtcgatgaccgagcagctcaccgacgactccgagcagcacgccagtcgcgcaggcacgtacgagacgcgcgtggtgaatcggatgtcggagttcaatcgcagtcacccggtgctcaccaccgagttcgacgccgatatcgcctccgccgacgagtaccgcgaactccatcagcggctcgccgaggacgatctcccgcggttcgaggcggagttcaagaactacttgaacaccaacgccatccgcgacatcgcgatcttcgccgccaagctcaacaaggaggtgcacctgatcggctccaagatcgacacgatcaacgagtcgctcgccggcatcgagtacaaccccggccgatacatccgcctcgacgtcaatccgaccgcatcgcaggagatccgcgagttccgcgccgatctccgggcctgcagcgacggctccttcgaggccgacagcgacgaccactacgccgaggagaagttcctcctcgtcaaggcgttggtcgaacggttccgcggccgcgagggcttcaccgatgtggaccgcaagtggaccgagctggtcaccgacgtccgcaactgggtcaccttcgccgcgtccgaacgatacgtcgacggcgacgccgagtacgagaactacaccgactccgacggcaagtccggcggccagaaggagaagctcgcgtacacgatcctcgcggcgtcactggcgtaccagttcgacctcaagtggggcgccaccatgtcgcgcgacttccggttcgtcgtcatcgacgaggccttcggtcgcggctcggacgactccgcccgctacgcgctctccctgttcgcccgactcggtctgcaactgctgatcgtgacgccgctgacgaagatctacacgatcgaacccttcgtatccgccgtcggttacgtcgagaaccgcggcggcagctactcgcagctgcagtgcctgacgatcgaggagtaccgcgcgcggcgcgatgtgcgcgacctggtggaggtcgtcgagtaa

SEQ ID NO: 47661 - DNA, 1401 bp, Herpetosiphon geysericola
atgagtttgttcgagaccattccagccaccctttttcgcccattggctagccgtggtgctgcaatttatagtcaggttttgctagcactatttgccgctaccaaacaacaatcacaaccacttagccgagaacgggcattaagccttgttgaacaacaattagaactcccaaacgccgaagatttgacgagcgatgcccacgaagaagaatcggaacttgagcaaaataaccatgcttcggcgattttacgctcgctgcgggcttggggctggctgcgctttgaacaacaaagcgattattcctcggcgattattttacccgattatgcctttcggctcttacaactttttgaagaccttgcgaccaaacagcgccaacatttgcgcggcatgatttgtggcattcacgatgtgctcgaaaaagcctgcaccggcgatgcaccccatgatcggctctcgaatgcctatgaccagacgctttttctgacgcaggcgctcaaagaattgcaacacaatattggtttacatattcaaaccgtgctcaaaaccctcaaaactaaagatgtgcttgaacatgtttttggcagctatcgcaaagatattgttgatcaagcctatcaccaattgcgcacctccgaccacctttcgcgctatcggcctgcaattttacaatttttgcacaaaattgagcgtactaatctcatcgatctatcggcgcagcatttggttagtcgtggtgaggctgctgattttgaatcagcctacaatcgattgactgatcaaattgagacaattcgtagtcattttgagcaacttgatcaattaattagggtgattgatctccgtcatagccaatttgttgattcggcagtgcgcaatattgaattatttctcagtgctagcaccagcactagcggccaactccacagtattttgagccacatcttacctaatcctgaagcctatgcccaagccagcccagaaattaacgaactcttgaatatttacgaggttcaattaactgatcaacaatcgttaactgcaccaacgcgcgcggctgtcccttttgaaagtcaggctgatagctatataccaattagcgaggcagatattgaacaagcacaggcggctaccctgcgccaattgcgtcgttcgatcagtcgcgatcgagtgcgccgttatgccttacaactattgggcgatgccgagcagcggcgtggctcagagattgagcttgaaagtattgacgatttatcattaattatctatttgcgctcatatggtgatggctcgctgggttataaagttgagccaatcgataatggtgtgtgggttgagcgcgatggcgtgggctttcgcgatttcttggtgcggcgggtttcaacggagcaaccagcatga

SEQ ID NO: 47662 - DNA, 633 bp, Herpetosiphon geysericola
atgagtttagttaattttgctgaagaatatagccaactttcatcaagcgagcaacaattatttgccgatagcgtgcggcgtttactcagcgacggcctgatttggcgcgaagatgagcaggatcggcggatttttgcatggttagtgcgccgcatcgatttggtgcgtgattatttagcagttgcaggttgggaactgcattacgctgaaaatttacatatttttcatgtctttcatcgtgatggcagccatcgccgccgctttgataaagaggaaaccctctggctgctgttattgcgcttgatttacgctgaacaatatgaatcccttaatccgagtttgacgcgctatcctactacgacggtaagtgatctctatacccgttatagtgagttttttcccaatcgagctattcgcaaaaaaggtgtttttgatagtgctttacgtctattcaatgagcttaaattaattcgtgccccgcagagtacggtgctgagagccaatgatcctgagaccgtgattgaattattgccagcccttgaggtgattgttcctgctagtggcatcgccgctttggccgaacgtctagccgaatatcaacgcccaagcagttcagacgaggagcaagcatga

SEQ ID NO: 47663 - DNA, 3282 bp, Herpetosiphon geysericola
atgattaagctgagtcgaatttttttgtatcattggcatcgcttcgattggcatgtgtttgatgtgcaagatagtttgtatttggctgggcataatggctctggaaaatcatcaatccttgatgcgttgcaacttgtgctcgtggccgatttggggcgagtacgttttaacagcgccgcccaagatcgctctcaacgatcgctcgatagctatgtgcgcggcaaaattggcgagcaacattggctgcggcctggcaatacgattggctatgtggtgctagagtggactgacgatctgaagcatcaagcctttatcagcgggatttgtatcgaagcccggcccatcaaccagaatcttgaaagaactttttttattgctgatggtcagcttaatcctgacctgtttgttaatcagggcaaagaaactacccgcagcgaacttaagaaattggctcgcaatcgcacaagctttaacagtttcgatcaaactggcgaatatcaggccgagttgttgaatcgacttggtggcctcaatcagcgctttttcgatttatttctgcgcgccttgaccttccagccaattcgtaatattcgtgagtttgttgaacaatggttgttggagccgaattcgcttgatgtgcatactttgcaaaatgttgttgaacgacttcgtgatttggaacgcaaagccaaacaagtcgaagatcaattaaaaagcctcaacgcaattatcaaaacccaagatgaagcgaaacgatttcgagatttgcaaggtaagtttgaaattctagcggcgcattacaacgttgcggcaattcaacaacagattaatcaacaccaacaacgattaatcgatacccgccgtgattatgaattgaatcagactgatttagaacaacaacttggtttgcaacaaaatgtccagatagcttgggatgaagctcgacttcaattaagtcaatcggatgttgtacggcgtaaacaacaacttgccaacgaaattcagcaattgcagcaacaaattcaaaaaattaatcaacgctggcggcaactccaagcaaaattaactcaaattgctcaatcattgaatacattaccaggaattgctgagcaagatttagttaatctattgcagcagcctgagcaaattcctcaaggacagcaaattgtgcctttattacagcaacagaacatggcgactggatctgctttaaaattgcagctccaagcactgacgagaactgatgatacgattgcgcgcttaatggaacaagaagggagcttaaaaaaggaaatcgcgagccttgaacaatcaaatcgccaaaatcattatccacaaaatgtggaaaatgtgcgtaactacttaaagcaagaattaaagattgaactttttttgctttgtgagcttttagaaattcctgatcaacattggcaagatgctgttgaagcaatgcttggtcagcgccgattcaatattattgttgaacctaaatattatagccaagcactagatttgcttgaccaattacgtgataaacagcggctctatgatgtgggcttggttgatttgcagcaagcaagcgcggaaactcgcccagcacgactattatcattggcaacgaaagttaaagccaaaacaggcttaattgataaatatattgcagcgattttaggcgatattatcacatgcgaacgagttcaagatttgcgccaacatcggcgggcaattaccgctgaagtgatggtttatcaagaatggacggcacgttcaatcgatccacgcaaatttcggccttggtttatcggcgaacgcgcacaacgctcacaaattgaaagtcgccgccagcaattaaccgaaatccaagctgagttggcgatattacgtcctgaacaacagcgccaacgtcaatattctgagcaacttgaaaaattacaacaaatgttattaggtttagattcatattttgaggaagaacttgatgcgagtgaattacaacgaacgcttgtagaattacaacatgagcacgatagcattgataccagcggcgtggcagcacttgaagcagaagttaaacgtttgcgaataatatatgatgaatattctataaatattagccgctttactgagctaaatggtgcttttaaaactaaaattagccaacttgaacaccaaattcaacaagataaccatcaattattgaatgctcaaagcctgtttgaacatatgcagcagcagtatcccaaccaaattgaagatgcaagcgccgattttcagcgtgaaaatactgaagctgcgcaatttagccgtttgcaagaaaccgctgagcaacagagtcgcggctatcatacgcgcttcaataatcgccaagaagctttgcgtgaacaagttctgctctataatcgcgattttggcgcacgtgaactagcagatattgagcaaactagcttccaaaccagaaaagctgaattagaggctacagatttgcccaattttggacagaaaattgctgaagcgaaacacgaaactgaaaccgagctacgtgagcatgttttacacaagttacgcgaaaatattggccgtgctaaagctgaactcgatcgaattaatgatgctttacgaggcttagatttcaatggccagcgttatcattttcgctatgaaattgccgattcgctgcgcgatttttatcaactaatcgaacaatcagccaatgtgaccagtgaaattattcaagatagtgacttttatcaacagcataaggcaacctttgatcgcttcttccaattattgattcagcctggattaactgatcaagaaaagcttgaacaagctcaaattaccgattatcgacgctatttgagctacgatatcgatgtgattgatcgtgatggcacgcgctctcgtttgagcaagattatgggccaaacctcagggggcgaaactcaaacgccattttatgtgacaattgcagcatcgtttgtgcaattgtataaaattagcgaacgcagcaaacgctcaaccatcagaattgtggccttcgatgaggcattctcaaaaatggatcaagatcggattggctcgaccctcgatctgttccaccattttggtttgcagattatcactgctacgccgattgaacgttgcgaatatctcgtgccaaaaatgtgcacaaccttggttttaacgagcttgaaagatcagcaacagcgagttttggttgagccatatcggaattatgcagcacgtctagaggcgccgaatgctgaatctgaccaaaactag

SEQ ID NO: 47664 - DNA, 1206 bp, Herpetosiphon geysericola
atgctgaatctgaccaaaactagcaccgctattttgcagcaattgcttgaccaacatgaacaacgcgatcgccagcgggttaatcgggtccaggttaaagcagccaaattttcgcgttattttgatgaaaaacaggttgatgagcgccaacaaactaatagttgtttgcttgaattggcgcgaacaaaggtagttaaactccattggcgcaaatgggaagagcataattggcttgaagctgttgatttactcgatgcggcggcgctgtatcgtttgctgaaacgccaaccattggctgagcaagaacaggcgttgcgcgcattgttggccgagtatgcgaacccacaggcttggtttgctgagtggttggcgtggctcgaacagcaattaattcaacaacgttcaatccaaccacttgatttaaccgaccccacttggaatcgcgatctgctacgggcgatttatggcctaactcaactagcaaccccaatcttagaacgcttatttagtgttcgctggcttggccagagcaaacgatttagcgagctagaaggtgcagttttgcgagttttgcgccaatttgcaccccaagccaagcagtttggcgatgatgatcgtgctttgctgcaagcctttaatctcgaaaaagtgccggagtatgtgctgcttgctggtgatgtccggttgagattgaatcaaaaaattctagaattgggtgattttcgaccaagtttgggcttacctagctcaattttgcgccaggctacggtgctcgattcagcttgcagtgaaattattacgattgaaaatttaaccagcttccacagtatgcttgcccgtcagccacaagcgatgctgatctatactggtggttttgctagtccaagcctttgccaatttctggtcaagctcgcaaccgcattgccaagagtcggttggtatcattggggtgattatgatgtaggtggcttgcgaatcctagcccatttacgccaacacgttgcccaaattcagctatggcagcctgagtcaaccatttttgagcggatgcccaatgcgacgcaagcgttgcatcaaaaagagcgccacagccttggcgaacttcaacagcacccgctgcttgctgattgttgggccttaattgacgcaatgctggcccagaatgtaaaacttgagcaagagcaacttgatcttttaggtggctaa

SEQ ID NO: 47665 - DNA, 1497 bp, Frankia sp. R43
gtggacggctcgctcgactacgacaccgttgacctgttgcgtcggcatgcggcgtggcggctgctgcgggccgatcacgccccactcgtcgtcagcttcctggcccgggtgttcgtggcggagaatgtgcgggagatcgcggcgtcggcgttggtcgaccggctcgacgacactctgtatgcgctcaatcagcggttgggcgccggtacctatccgcgggccgccaaggcgtacttggacgactggtcggcgaccgagcacggctggcttcggcggttctacccgcctggctcggacgagccgcatttcgacgccacgccggcactcgagcaggccgtgtcgttcctgtccagcctgcgttccagggcgttcgtcggcacggagtcgcggctgaacacgctgttcgacctgctgcgccagatggcgttgggtaccgagaccgaccccgaacggcggctcacggagctgcggctgcgccgcgacgcgctcgaccgggagatcgagcgggtcagccgaggcgagctcgacatgctcgacccctccgcccagcgggaccggttccagcagttcggcgacatggcacgtgagctgctggcggacttccgccaggtcgagacgaacttccgcgagctcgatcgggccctgcgggtccagatcgcctccttcaacggcgcgaagggcgagctgctcgacgaggtgctcagcagccggggcagcatcaccgactcggaccagggcaggagcttcggcgcgttctacgacttcctgctctcggctgaccggcaggcggagttcaaggcgctgctcgaccaggttctgggactggacgcactcgccggagccgacgagcggctgcgcgacatccactacgactggctggcggcgggtgaacgcacccaggcgaccgtccggttgctgtccgcgcagctgcgccggttcctggacgaccgggtctggctggagaaccgccgaatcggggaaatccttcgtggcatcgaggcgcacgccctccaactgcgcgacgccgccgggccgctgccgggagccgaactggaggagaccgcgccccggctcgtgctgccgatggaacgacggctgtacacgccgaaacgccggaccgcggtcgacagcgacggcatcacggccggagaaggtgacttcgagtccgacgcgctctatgagcaggtctacgtcgacccggcggagctgggcggggcggtgcgcgacgcgctgaccagccgaccgcgggtcacgctgacctcgttggtcgccgaccggccgctgcggcgggggctcgccgagctggtcacgtatctatcgctcagcggcgacggattcaccgtggtctttgatgaggacaacacggacgagctgagctgggacgacgacgatggcacccgcgtcgccaccgtgcccagggtgaccttcgtccgcgctggattcgccgccgtggcccccgacgcgaacgatgacggtgaggagcgcagggatgactga

SEQ ID NO: 47666 - DNA, 636 bp, Frankia sp. R43
atgactgacgccgcgtctgctcgtggttccgcgcggggcgcggcaccgcgcgccgagctggatcttcctctggtcctgaccagcctgatgaagggtcccgtctaccgggaccagcacgacaaggtgtggcgtcacctgctcggtctgcgggcccaggtgagcgactacgtcgacgtcatcggactgcaggtcatcgtcgacgaggccgagggctatgcctttctgcgctcgcggccggacgacgaggcgcaggacgggccgccccggctgatcgcgcggcgggcgctgtcgttccccgtcagtctgctgctggctctgctgcgcaagcggctcgccgagttcgacaccgacaacgccgacaccaggctcgtgctcgcgcgcgccgacgtcgtcgagatgatgcgcatgttcctgccggcggggcgcaacgaggcccggctcgtcgacgagatcgacactcacctcgggaaggccgtcgacctaggattcctgcgcaagctgccgggctccgaggagaccttcgaggtgcgccggattctgaaggcgttcgtggacgcgcagtggctttctggattcgacgagggcctcgcccggtacgcggcgtcgctggccggccccaccgaggagaccgcgtga

SEQ ID NO: 47667 - DNA, 3396 bp, Frankia sp. R43
gtgacgacgcgaccagcggctccagccgaggagaccgagcccgcgcctggccgtgtcggattccggctcgaccggctggaagtcctcaactgggggacgtttcaccagcgggtctggacgctgcgggtcggtggcgacaacgcgctgctcaccggcgacatcggctccggtaagtcgacgatcgtcgacgcggtcaccacgcttctgctgcccgcccagcggatctcctacaatcgggccgccggcgccgaggctcgcgagcgcacgctgcgctcctacgtcgagggccactacaagtccgagcgcaacgagtccaccggtggatcccgcccggtcgggctgcgcaccgacgggacgacatactcggtgctgctcggggtgtttgtcaacgaggccgtggacgccaccgtcagcctcgcgcaggtgttctggcaggcagccgacgagccggggcagccaaggcggttcttcgtcacggccggacgccaccttacgctcgcggccgacttcggcgacttcggcgcggacatcaccgcgctcaaacgccggctgcgaaaatccggcgcggaggtcaacgacgagttcccggcctacggtcggacctttcgccggctgctcggcatcgagtccgaccaggcgatggagctgttccaccagaccgtgtcgatgaagtcggtcggcgacctgaacgagttcgtccggtcgcacatgctggagaagcaggacgtccagcggcggatcgacgaggtggtggcccacttcgaagatctgaccagggcgcacaccgccgtccggcgcgcacgcgaccagctggcgatgctcaccccgctactcgccgactgcgacgagtacgacgcccttggagagcgggagcaggcgctgggcgccgaggccggcgccgtgcgctacttcgtcgccgacaggaccgcgacgttcctacgtggtgagctggcgcagctgggcgtccggatcacggcgggccgtggcgaggccgcccggttggaccagcaggtcaccactttgcgtgacgaggacgtccggctgcaactgcagcgcgcgggcctcggcggtggccggctcggcgagatcgagaaggacctggaacgcgcgggcagggaacgcgcccagcgagcggccaaggccgagatcttcgagggtcgactcgcgacgctcggcctggcggccgtcgtcgacgaggctcggttcgacgagcgccgccgcgagtttgccgccctggccagccggctcgccgaggagcgcggcacgctcgaaacgcgtcgttccgagctggacgtccagctcgcggcccgccgggcggagtcggatctgctgggtgaggagatcgccagccttcggcagcgtcgcagcaacatcccggcgcagagcctggacctgcgtcgccggttgtgcgccgagaccgggcttgacgccggcgaccttccgttcgcggccgagctgatccaggtctcgtccgagcaccgtgcctgggagggcgcggccgagcggctgctgcgcggcttcggcctgtctctcctcgtgccggagcggcactaccgggcggcatcggagtggatcgaccgcaaccatctgcgagcgcggctgatctacttccgcatcccgcaggcgccgccgccgcggcagcagcagttcaccggcggcgacgtgctgctcgtcgaccgcctcgacctgaaggcggattcgccgttcctcccgtggctgcgccgcgagctggaggtccgcgccgactacgcctgcgtcgacagcctcgacgacttccgccgggcgacgaaggcggtcacccgcgccgggcagatcaagcacaccggcggccgccatgagaaggacgaccggtggcgggtcgacgaccggacgaagtacgtcctgggatggagcaacgagcagaagatcgccgcgatcatcgcccgcgcgacgcaggtccagacggacctgaccgcgatagccgggcgtcgcgagaagctcaccaaggacatcgccgcgctcggccgccaggagctcgatctgagcctgctcggcgagacccgggcatggctcgagatcgactggcgttcggccgccgccgaactcgacgcgttgcgggcggagaaagcccagctcgtcgccgcgtccgcggagctcgccgcgatcgaccaccggctcgagagggtccggcgcgacctcgcggcggcggtgcgggacggcgacgcgatgcgcgagcgcgtcggcggtctcacgacgcgccagtccaacgccgagaccgagttcgcccggtccgaggcgctgaccgcgttacccgcgtacgcgctggcatgcgccagcttcgccagcctcggcgagcggcttccgacgccgccgccgacgactcccctcgactgggccgacgccgggcgcgacctcgacgacgcgatccggacggagtcccggcaggtggcggagcggcgcgcgcgggccgggcaacgggtcgtggcgaagatggggagattccgccaggggtacccgctggagaccgtggagctggatgcgtcggtggccgccatcggtgggtaccgcgagctgcacacccggctgatccgtgatgatctgccccgcttcgagcaggagttcaagaactacctgaacaccaacacgatccgcgacatcgcgatgttccaggccaagctgctcgagcagcgcgaacagatccgtacacgggccgagatcatcaacgcgtcgctgacgtccatcgagtacaacgcgggtaccttcatccgcctcgagctcgaagacaccccgaatatggaggttcggcagttccgcgcagacctgcgcgcgtgtaccgaaggctcgctcggatccgggggcgagtcggaccagtactccgaggagaagttccttcaggtcagccggatcgtcgagcggctgcgcggcagagagggccagaccgacgccgaccgggtctggacccgccgggtcaccgacgtccgcaactggttcgtcttctccgcgtcggaacgctcggcggccgacgacaccgagcgcgagcactacagcgactccggcggcaagtccggcggccagaaggagaagctcgcctacacaatcctcgccgcctcactggcctaccagttcaggctcgactccggcccgcggacattccggttcgtcgtcatcgacgaggcgttcggccgcggctccgacgggtcgacccggttcgccctgggcctgttcgcgcggctcggactgcagctgctgatcgtcacacccttgcagaagatccacgtcatcgagcagtacgtctcgtccgtcggcttcgtcgacaaccagtcgggcagctactcccgcctgcagaacctgaccgtcgtggagtatcgggcgcgccgcgcgcaccggctcgcggctgaactcgtgaccgtccggtga

SEQ ID NO: 47668 - DNA, 1215 bp, Frankia sp. R43
gtgacccggagacgggcggtcggatggacgacgctcgccgacgtacgcacacatctgcgccgccgctgggacgacggacaactgctcgccgcatgggccgcgggccagccgttccatccggttgacgtgactctgcgtgggccggtgggccgcgacctcaccgaccggttcgacgaggtccgcgcctggcgccaggaatggctcgccgtggtggaccgctcggctgacctgcagctcgtgatgaaatcggtcggccgtcgcagcatcggcgcgaacgagctacccgcccggcttgtcgtcgacggcggctgggaagcgctctggcggcttctccaggtgaccgccgaggtgcgccggttcacccagctccgggactcggttccgacgggcgcacacgcggcgatgctcgtgaactggatgaacgcccatcccctgcgagtgctcgcgcatcagccggacgccgagtggacgcgagttctcgcgacggtgcgctggctggtcagcgagcgaggccacagccggtacctgcgacaggttcccgtgccgggcgtcgacaccaagttcatcgagacccaccgggcggtgctcgccgaccttctcgacgttgttcttcccgccgacacgatcgaccagacggttccgaaagcgcagttcgcccggcggtacggcttccggataccaccgctctacgtccgattccgaacactcggcgcgaccccgccccggctgccaggtgtccccgaaatgaccgtgcggctcgacagtctcgaagccgccgcagccgacgtcggcaccgtgttcgtcctggagaacgaaatcacctacctggcgttcccagccgtgcccgacgcgatcgcggtcttcggcggcggttatggtttcacggccttcgccgcgctcccctggctttccgcccgccgcgtctactactggggcgacctcgacacccacggtttcgcgatcctcgaccggctgcgcgccacggcccccaccgtcgagtcgttcctcatggaccgcgccacgctgctggcccatcccgagcagtgggttcgtgaacccacccaggcccgcggccccctttcccacctcaccccggcggaggccgccctgcacgacgacctcgtcgcgggcacctacggcgccgcgatccgactcgagcaggaacgcgtcggattcccccacctcgaggccagccttacccgcctgctgagctga

SEQ ID NO: 47669 - DNA, 1470 bp, Xanthomonas arboricola pv. pruni; identical to SEQ ID NO: 44450

SEQ ID NO: 47670 - DNA, 702 bp, Xanthomonas arboricola pv. pruni; identical to SEQ ID NO: 44382

SEQ ID NO: 47671 - DNA, 4068 bp, Xanthomonas arboricola pv. pruni; identical to SEQ ID NO: 44383

SEQ ID NO: 47672 - DNA, 1470 bp, Xanthomonas arboricola
atgaagcaccaggcacgtatcgccggctatcgccaattgcgcgagcagccggtatggaaactgctggccgccgaccacgcgccggagctgattggcctgctgcagacggtgttgctggacggcgaacgccgcctgccctcggccgtgctgcacgagcgcctgcagcgccagctcgacgcgctgcgtgccgacgagctctcgcgcgagttgccacgcaccgcgcaggcctatctggcgcattggctggcacagggctggctggaacgccgcctgcccgagggcgcggccgaagaagaatacgagttgtcgcgcgcggccacccaggccatccgcttcatcgtcggcctgcgcgagagcagcagcagcgccaccgaaagccgcctgtcgctggtgatccagcagctggtgcagctggcgggccagaccgaagccgacccggagctgcgcctggccgccctgcgcgaagaacgcgcgcgcatcgatgccgagatcgaacgcgtggcctccggtcgcgtggccgcgctggacggcaagcgcgcgctggagcgtgcccgcgacctgatccatctctccgacgaactggccgaagatttccatcgcgtgcgcgacgatttcgaacagctcaaccgccagttccgcgaacgcatcatcgacgacgagggggcgcgcggcgatgtgctggagcagctgttcaacggcgtggacgtgatcgccgacagcgaggccgggcgcaccttcgaggcgttctggagcctgctcaacgacacccagcaaagcagccagctcgatcaggcgctggatgcgctgctggcacgcggtttcgcgcgcaagctggaccggcgcgaacgcgccttcctgcgcgggttgaccggcacgctgctggagcgtggtggcgaggtgcacacggtgatgcagcacttcgcccgcagcctgcgcggtttcgtgcagagccgcggctatctggagcagcgccggctcaatcaattgctcaagcaggcgcagggcgaagccttgcaactgcgcgacagcctgcatgccaccaccgccaccggttacacgcaggcattgagcgctgcccgcctgcgctcgctgtcgcaatggcgcctgcacgacccgcgcctgacccaggtcgatggccgcgtgcaggctgccgatgcggcagacatctcgctcgacagcgtgggcgatctggtcgcgcaatcggagatcgacgtgcgcagcctgcgccgcgacctgcacgagctgctcggccagcgcccgcgcctgaccatcggcgatgcgctgcagcagcgcccggccgcgcagggcctgggcagcgtgatcggttacctgtcgctgggcacgcgccacggcgtggtgatcgacggacagatggaaacggtgcaatgggaaggcggcgacggcgccctgcggcgcgcacgcattccgctggtgtggttcacccgggagaaacgcaatgaactggactga

SEQ ID NO: 47673 - DNA, 702 bp, Xanthomonas arboricola
atgaactggactgaggacacccgcctggatgcggacgaggacagcggcgcgtcggccgatgccggccgcacgccgctgacggagacatcgcctgcacagccgcgcggcgagctgttcctgggcgacaccggcacgctgccgttcgacgcgcggcgcgcgctgtgccagctgctggccgggcccagcatcgacgcgcaacgccacggtgcgttgtggcctgcgctgctacgcaacgaggcggcgatccgccaggtgttgtgcgagctgttcctggagctggtgctggaccgcgagggcggggtggccttcacccgtcaggccgacaccgccgagctggaatcgccgaccctgctgcgcagcgcgccgctgacctttatcgagtcggtgctgctgctgttcctgcgccagcaactggccgaagccgatacgcgcggcgagcgtgcggtggtggacgaggcgcagttggtggaggccttgtcggtctacgagaagaacgtgtccaccgaccgcgccggattcgcgcgacgggtgctgacggcgatcggcaagatgcgcgagaaccagttgctgtcgcggctgcgcggcagcgaggagcgctacgaggtctcgccggtgctgaagttgctgttctcggccgaagacgtgcaggccctggtggtggcgtatcgcggcttgcgcgagggggacgttgcgctcgactaa

SEQ ID NO: 47674 - DNA, 4113 bp, Xanthomonas arboricola
atgaattcccagtccaacctgtcgccggcgcagccgggcgcgtccctgttcactgattcgcttgccgagcagcgcgcgcagcagttccgcatgcggcggttgcaggtgcacaactggggcacgttcaacggcttgaccgaggtgccgatcgccgagaagggcttcctgttcgtcgggcgctccgggtcgggcaagtcgaccctgctggatgcgatgtcggcattgctgaccccgcccagcatcgtcgacttcaacgccgccgcacgcgaggccgagcgcagcgggcgcgatcgcagcctggtgtcgtatgtgcgcggtgcctgggccgatcagcaggacagcgcctcgggcgagatcgccacccaatacctgcgcaagggcgccacctggtcggcgctggtgctggaataccgcaatgcgcacggcgagacggtcagcctgattcgcctgttctggatcgccggcagcggcaatgccgcggccgacgtgcgccgccattacatggtcgcgccgcgcagcttcgatgtggccagcgagctggatggcttcgatctggatctgcgcaggctcaaggcgcggcttggcgaggaggtcgcgcatttcgacggctttgccggctacgcagagcgctttcggcatgcgctgggcatcggcaacgagatggcgttgcggttgctgcacaagacccagtcggccaagaacctgggcgatctcaatgtgttcctgcgcggcttcatgctggacgagccgcgcacgttcgaggcggccgaccggctggtggaagacttcgccgaactcgagggcgcacaccatgcagtggtcaccgcacgccggcaggtggaaacgctcagcccggcacgcgagcaccatgcggcgctgatggccctgcgccacagcgtcggcgaggtgcgcgagctgcagctgggcgtggacagctatcgcgaacagcagcgtctggccttgctggagacgcgcctgcacgaactcgacagccaggaccgcgggctggctggcgaagaaggccagcggcgtgagtcgctggacaatcacgaacagaaactcgccgggctggagcgcgaacaacgcgccgccggtggcgagcagatcgaggaactcgaacgcgagcgcgcccgggtcgagcgcgagcgcgacgagcgtctacggcgtcgcgtgcagatcgaacaggcctgccgccagctcggcaccgccctggccgcaggcgccagcggctttgccgagcagatcgcgtacgcgcagaccgtgctcgagaacggcaagcacgacgccagcgcgctggatgaggcggtcgccgagcgcatgggtgtgcgccgcgacgatgagcggcgctttgccgagatccgcgccgaactggatgtgttgaagcgtgcgccgtccagcatgccggcaccgatgcaggccttgcgcgcgcgcctgtgcgaggacaccggcattgtcgaagcggcgctgccgttcgtcggcgaactggtgcaggtgcgcgaggatcaatctgcctggcgcggcgcgatcgagcgcgtgctgagcggttttgcgcagtcgctgctggtggacgaccgccattacgcgcaggtcagcgaatgggtaaaccgcacccagctcggcacgcggctggtgtatttccgggtacgccgcaacgatgcgctgcatgcgcgcacgccggatgcgcgtgcattgccgggcaagctgcagctgcgcgagcatgccttcaccgagtggctgcgcaacgagttgatgcgtcgcttcgactacgaatgcgtcgataacgccgccgcgctgcgcaatgccgaccgcgccatcacccgcgaagggcaggtcaagcatcccggcgaccgttacgaaaaggacgaccgccatgcggtcaacgaccgcaagcgctggttgctgggccacgacaaccgcgacaagctcaaggtgttcgagcgcgaagcgcagacgcttgcccagcgcatcgccggttgcgatgccgacgtggccgcgctgcgcaagcaacgcgagcaggaccaggaacggcagctggccgcgcacacgctggtggagcgcgactgggacgagatcgatgtcggccccaagctgcagcgcctgagcgatatcgacgaacagctgcagcagctgcgcgaaggcaacagcggcctgcgcgcgctcggccaggcgatcgagaccgcacgcaccttgcgcgaccaggccaagcgcacctacgaggacgtgcggctggagcgcgcgcagctggcacgcgagcgggtccggctcgaacagcagcacgctgcctgtgccagccgtgccggcaccgccgcgctcacgcccacccagctgcagggcctgcgcgagcgcctggcggcgttggcaccgctgtcgctggacaatctggaggcgcatttccgcgtggtcgagcgtggcctggccgagcagctggccgagagccaggggcgcgacagccggctcagcgcgcagctgctcgattgcttccgcaagtactgccagcaatggccggaagacagcggcgatttcaccgtgagcctggccagtgccgacgattttctcgcgcgcctggatcgccttgagagcgatggcctgccgcgccacgagcatcgcttcttcgatctgctgcagacccagagcaagaacaatctgctggccctgcagcgccacaccgccgaggcccacaagggcatcaagcagcgcatggacgaggtcaacgccagtctggagcaggtgccgttcaatcgcggcacgctgctgaccatcgaggtcagcgaccgtcgcctgggcgaggtgcaggaattccagcaacagctgcgcgcggtgctgtcgcatcaacagaccgaagaccgcgcactggccgaagcgcagttttccaccctgcgcgcgttggtggcacgcctgggcgcgcaggaaccggacgcacgccgctggcgcgagcaggtgctggacgtgcgccagcatgtggaattcatcggtgtggagctggatgcgcagacccgcgcgcaggtggagatctaccgcagcggcgccggcaaatccggcggtcagcgccagaagctggcaaccacctgcctggccgccgcactgcgctaccagctcggtggcgaagacggcgaactgccgcgctactgcgcggtggtgctggacgaagccttcgacaaggccgacaacgaattcaccgcgctggcgatgaacatcttcgagaacttcggtttccagatggtggtggccacgccgctgaaatcggtgatgacgctggagccgttcatcggcggggcctgttttgtggaaatcagcggccggcacaactccggcgtgctgctgatcgaatacgacgagcaggcgcagcgactccagttgcccgagcgctcgcgcggggacgaggccgctgcagcggtgacggaacaggcggtgagtgctgcgcagcgcgaggatgcaccgcgttcgacgcagggtgaaacgcggatggacagcaccggtgccgtctctgccgctgagggcgcggcacttcaggacctctctacacaggacgcggcggcggccggggcgagcaagcgggccagcaaggtcgcgccggcatcgacggcggccgttcgagccgcgccgaagtccgcgaaaacagctgcttccagcgcacgtgcgggatcaggcacgtcggcagcggcgaagaccgcagcgggcaaggccgcatccgccaaacctgcaccagccaaacctgcaccagccaaacctgcatcagccaggcgtgcatcgcccgcagcgggcacagcgcgcaagtcggcaacaccgactaaatcggccaaaccgccagcgaacaccgggacggcatccaggcgcgcgactgcgtccgccaaaccgactgccaggccgaacaaagccgcgacaacagtggcagcgccgaaaaagcctgctgccaaatcgacggtagcgaccaggcgcgccaccacttcgctgggtggcgcaaccaaggcaaccaagacaactgcggcgcgcagcgcggccaggcccgcaccaaccaagcccgtgccaaccaagcccgtgccaaccaaaaccgcggccaaggcgcgtcccgcatccacgcgcggatctgcaggaaagccgcgcggaaaacgctga

SEQ ID NO: 47675 - DNA, 1461 bp, Arthrobacter sp. Edens01
atgtccttcacagaaaacgccgtagcccgctgggcggagctgcagcggctacaggcctcgcccggctggaaacttaccaacgcgaacccctgggtcctggccctgttccgcgaggccttcacgcgcacccgcccgcgcattcccctggacgaattccacagcctcaccgactccttcctgcagcagctcaggctcaacgggcagagcctgcgcgaagactggacaggcaagaactacgccgatgactgggtggcccgccgcttcctggcccgcccccgcgctgacggacgcttcgtctacgaactcaccgaacccgccgtccggttcctctcctacctggacggcttcaccggggacaccaccagcctgaactcctcccgcctgaacaccctgctctccagcgtggaaaccctggcgcacgaatccaacccggaccccgaagcacgcatcgccgtcctcgaagaagagatcgcccgccgcgaagacctcatccggtccctccgcgccggcgacgctcccccaccactggacgacgacaccgccgtcgaagccgcccgcgacatcctggacctcgccgccgcactgcccgccgacttcaagcgcatgcgcgacggcctcgagaagatgctgcacaccctgcgccaggaaatggtcgaatcgcaggcctccaagggcctgaccatgggcgaaatcctcgaagcggacaagcgcctgcgcagcaccagcgaaggccgcacctatgaaggcttcaccgctttcctgaacgacgccgaccagcagggacgcttccggcacgccatcgcgcaggtcctggaacgcgacttcgccgacgccatgacgcccggcgaccggcaggccctgtaccggatgatcagcgacatgcgtgagcaggccgccgaaatccagcggatctacggccggctctccgaatccctgcacacctacgtccagagcgacgaataccgcgaatcggtccagctgcgcaaactcatccgcgccgccgaaaccgccatccacaaggccccgcgcggccgccgccgcgccgccgtcgttcccgcaccgaagctctacgcgtccgcgttcgaatcgctcagcatggtccgcagctacgaccccgccgagcacgccgccccgcggaagctgcccgaaccgccgtcgttcaccgaagcggacatccaccgcgccgcccgcacccccaaggccgaccgccgcgtcctgcgcgacgcgatcacacgggccggcagccgccgcggccgcgccaccgtcgcggaaatcttcgccgaactgcccgccgagcaccgccacctcaacagcatccgcgcgctcctcgcctccgccgcccccaccggggacagcggaacaacgacggcggcaagcgagtccattcccttcctccagatcgacggcagttcccgcaccgctgtgctgcccgtcctcaccgtcgccgaaagccagtcatga

SEQ ID NO: 47676 - DNA, 768 bp, Arthrobacter sp. Edens01
atgaccgaaaaccccaccgccgaaaccgaagagtacgacgagctggacgaggacgctcagtttgacgactacccccagcccgcccgcgacgtcctgatcgacggcccggaactgttccccggcgacaccggtaccctgccgctgaagctgcgccaggccctgatccggctgctgcgcggcccctacctggacgccaattcctcggacaacgtctacaacaccgtggtggataaccaggagcagctgcgcgtccggctcagtgaactgttcctggaactggtagtggacgaggaccacaaggtcgccctgctgcgcccggtggaaatggccgaaccgcacaccaccgccctgcagcgccagcgcgaaatgacccgcgaggaaaccctgctgctgctgcgcatgcgcctggtcctggaccgccactcgggcaccggcaacgaagccaccatcgcccggcaggacatcatcgacgtcctggagcagtacgtggacccgcaggcgcacgacgccaagggcgtggaagacctcgccgacgccgccatccgcaagctcgtcaccgaacgccgcctgctgctgcccaccgagctggacgacgtctgggtcatctccaacgccctgccgctggccctgccgtacgagcacatcggcgacatcatcacctacatgaactcgctgaccgaggccccggcggagccggacacggctgacgaagcgcccgccgaagaagcggtcactgaaacacagcacgacggcgaggagccggcatga

SEQ ID NO: 47677 - DNA, 3324 bp, Arthrobacter sp. Edens01
atgagcatcgaaaccacccttcccatgggggacctgatcaaccccggccagaaccggctctcccggatccagatcgtgaactggggaacgttcgacggcgcgcacaccatccacgtggaccgcgccggcacgctgctcaccggtgactccggcgtcggcaagtcaaccatcttcgacgcgatcctgcaggtcatggacgcccgcccgaagatgaacgaagccgcgcagaacaacggcggcaccgccgcagaggaaaagcgcaccgcgttctcctacatgcgcggccggctcggcacccagggcatggaagccggcgatggcaccgcctaccagcgccccggtgccacctggtccgccgtctgcctcaccttcgacaacggactgggccaaatcaccagcctctccgtgctgatggacctgcccgcgaccggcaccgaacaccacgtgggccggttctacgccgtgcacaaccgtccactggacatcacctccctcgaaaccggcatgcgcggccggttcaccaagggtgcccttgaatcgctgctgccgggcgcgcagatcttcgattcgcacaaactcttcgccgagcggtaccgcaccgccctgggcgtggaggacgagaaggcgttcggcctgctgcgcatcctgcagaccggcaagggcctgggcggaacggtcaacgacttcttccgcaaccacgtcctggacacccctaagaccctcaccgccgccgacgaggctgtggaggacttcagccacctgcgcagcatccgccgccagctcgaacgcgcccgccagcagcgcgaccacctggccaacgtcccggaccagcaccgcctgttcctcaccacgaaggccgaactggaccgcgtccgcgccctcaccgccgacggcctgcccgcctaccgccgtcgtctggcgctggccagccacgagcgcgacgtcgaccgcctcacttccgccgccgccaccggccgcgaagcgctgaaggccgccgagaagcagcgcaccaagctgaagaagcaggtcgccgagctcaccgcccgctacacgcaggagggcggcggcgcgatcgccaccctggaacgcgaagtcgcggccgcgcaggctcagctggtttcccgtgaaaccgtggagaacgcgttccgcgccgacctgtgtgccgccggcatcgacacggacctctcccccgccgggctggtcaccgcccgcagccgcgccaatgagctgatcaagaccctgaacgccgacgtcgacgccgcccgggagcgcagctccgacgcgcacggtgaggcgtgggcgctgaagggttccatcgcgaagctggaaaccgagatcgcgtccttccgccgccggcgcagcaacatccgcccggaaagcttggaacagcgcgcccggatctgcgaagccaccggcatcgacgaggccgagatgcccttcgccggcgaactgatcgatgtcccggctgaacacgcgcagtggcgcgccgccgccgaacgggtgctccgcccgctctccaccgccctgctggttcccggcgagcacatgcccgccgtcacccgctacctcagcgaaaccaacctgcgcggtttcctgcgctgcatcgacgtcagcattcccgtggacggtccgtccgagcccggaccgcgtgacctgatcaccaagctcagcacctacgactccgccatgggcgactgggtagcccggaagattaccgcgcactacgacttcgagtgcgtcgagaacccggacgagctcgccaaggtctcccgcggcgtcagcctgggcggtgccgtgaagcggaactcctccaccacggagaaggacgaccggcacaccaaggcttcggacaacgtgctgggcttcgacaacaaggacaagatcgccgccctcgccggtgagctgctggccctgcgcgccagtttcgaagaggccgacgtcgtctcccgcaagcacgcctcggagcaggacgacttgatccgccggctcgccgccgtccgcaaggtcgccgcggacacccgcgagttcgaggagatcagcgccgaggagcaccgcgccgcggtgactgccgccgtcgaacgccttgaatccgcgcgcgacgccaacgcggacctggagcagatccgcttcgagctggacaccgccgagctggacctcaccgctgcgacggagaagatcggtgtgctcaagggcgacctggcccggctcgaggccgagctgactgccgccaccgaacgccgggacaccctggccggccgcggcccggatgccctggccgaggacctgcgtgcgcagctcgatgagctgttcgcccccttcggcgagatcaccgacgtcgtgcacctgaacgacgccgccgggcaggtggagcggaacctgctcaccgatgccgcgcggctggataagacgctgctggaaacccgcacccggctggagcgcaccttcgaaacgtacagcgagaagtggggttcggacttcggcacgggcgtggactcggccgaggagtacgtgcaccggtacgaggacattgtcaccgagggcctgccgcagcacgagtcggagttccgcgagtacttcaacaaccgcacctacgagcggttcagcgacctgctgcagctgctcgacgaggaacgccgcagcatctccgcgcgcctgctgcccctgaactcggtgctgcgccgcgtgccgtaccacgtggacagccacctggagatcgaggtcaagaccaccgtcccggacgacgcgcacaagttccgcatggagctgaagaacgcgctgccgatgatgggcgtgcggcaggacaaggcggacatggacgcccggtacgccgcgcttgagggtctggtggagaagctgaaggacccgcaggagcgccgctggcgggccgaggtcctggacgtccgcgcgcatgtgaccatcacctgcaccaacaagctcgcgaacgggcagtcgttcaccaacctgcaggcgtcgctgatgtccggcggcgaggggcagcggttcacggcgttcatcatggcctcggcgctggcgtaccagctgggcatcgtgtcccagggcttcagcacctacggcacggtgatgatggatgaggcgtttgtgaagtcgtcgctgtcctttgccgaggcgtccatcaacgccctgcacgagttcggcttccagctgctgctcgccgctccggaggacaaggtggatctgtcccggttcctgggttcggtcaccgagatcctgcgcgacgacgccgccaaccggtcgggcacgctggagcgggttccggtggggtcttctggcgggtcgcgggctgtggatattctgctgcggtag

SEQ ID NO: 47678 - DNA, 1476 bp, Mycobacterium fortuitum
atgcctgacgcaggcaccggtggcacgtcgctggaccagctctaccagctgcaccgcgaggtggccgattcacgttcgttgcggctgctggtgaccaacaatctggccacctatctgacgctgatggaacgtcacctggaccgcggcgccaagctgaccgagaccgacctggtggtgcggctggaacgcgacctcgccgacctcggctccgagaccgagcagtcgggcctgtcgctcatcaaatattgggccagccagggctggctgcaccgggtcaccgagcagtccggcgacaccgaacgcaatgtctgttacctgacctacgaggcgcgggccgtgctggatttcgcccgccgcatgcgccgggaggacaccatcgccaccggcgggtcgatctcggggatcgccgccgggctgcgccgggtggccggtcaggtcagcaacgatccggatcgcatccgtgcggacatcgaagctgagatggccaagctgcgggatgaattggaggcccttgaacaggggcagcggcccgaacctgatctggtcgacgccgaggacgaggctcgggccatcgcgttgcagatggagcagatcatctccgacatcgggcagtacggcgccatgctgaaccgcatcaccacccggttgctggatgcttccgccgataccgatctcgggtaccgggagcgtcagcgccagctgttcgacgactacgagtcccttttcgcctcccgcgaaagcgcctcgtacacggcgttcacccggatgatccaagatcccgagcagcgggcggcgctggtggccgacatcgaggcggtgacccgggaattgccgcacctcgatcccgatctgcgtgaggtgatgacaggtttcttcagcctggtctctgcgcagaccgccgaggtgggccgcacccggcagcgctgcgcgcgacggatcaagcgattcgtcgcctccggaaccctggagcacagccgcggcgttacccgtcagctcaacgatgccctgaccagtgcccatgacttgctcagcatctcgttggccgacagtcgcatcggcatcgaggtgccgctggtccgtaccgacttcaattcgatcggcgccgtggccttcaagattcgtgacgcgatcccgccgtcacaggccgagacctctcacggcgaggtgaacctgtcggcgttctcggccttggcgtcccaggtggacgccgccgagttggccgatctggtcaacggtgcggtcgccgccggtccactggcactgtccgacgccatcggcatgctggactcggcctacctcggtcatgtgatcgtgttgtggtcctgggctctcaaacagccaatgagtcaaccggaatccgatgccgaatccgttcgggtgcgtttccggtcgctggagggtgccgaccgcgaaatcgaaataccccgattggttttcaccgaaccgatccctactgccagtgagagcatgctatga

SEQ ID NO: 47679 - DNA, 765 bp, Mycobacterium fortuitum
atgaccgacaaccccgacacgtcgcccgtcaaagacgggtcgatcgacttcgatgccctaccgagcatcgacgccgtcgaacggtccaccgatcagcggcgtgctccgcgcttcgacggggacgtcagcgagctgcccgaccgcgcctgctgggcgctgcagcacctgctgtcgcgccggtacgtcagcaaggacaaccactccgagctgtggtcgtgggtcacccgctaccgcgccgaactcaccgtgcggctgtcggaactcgatatgcggctgtgcatctcggacgatcacgacatcgcctacgtcgagcaggcggattacgaatcgcagtggcggcgccggttgctgcggcgggagaccctcaacacctacgactcgatcctggccctgcacctggccaagctcatgcgcgcggcgtcccgtgacgagaacgtgctgatcagccgtgacgagatccatgagctgttcgccggggtgaacaacgacaccgatcgggataccgcctcgttcgacaagcggatcgacaacgcgatcgagcggctcaccgacatcgagatgctcacgcgcaaccgcgaggacgaggacagtttcacgatcagcccggtggtcaacgcgatcatgacggcctcgatgatcaccgagttgcagcagcagttcgagcagctcaagcgcgtcgcgaacggcacggcctacgatcccggtgcttccgacgatcccgatgtttccgaacggctcgaagacgaagtggacgcccatggctga

SEQ ID NO: 47680 - DNA, 3363 bp, Mycobacterium fortuitum
atggctgaaccgaccaaccagttctcgctgtcgcgcctgcaggtcatcaactggggcgtgttcgacggatatcactcgatcccgttcagccggcacggcacgctgatcaccggctcctcgggcagtggtaaatcctcactgctggacgcgatttcgctggccttcttgccgtcgcaccgccgcaacttcaatgcctccggtgacaccaccgcagcgggctcgggcaccggcaagcgcactgtcgacaagtacgtccgcggcgcgtggggcgagcgccgcgagggcaccagccgccagatcatgtacctgcgcgggaccggtccggcctggtcggccgtcgcggtcacctacagcgaccgcaccggacgctcggtcaccgggctggtgctcaaatggctggccgccgagaagacctcggacccgggcagccgctactacctgatcgatgccgaccgcgacatcttcggtctgtgtaaccgctgggcgtccaacgggtatgacgccgcggtgttccgtgatgacggctggaccggcggccgcagcgagagccagtacctggcccagctctactccagcatcggtatccgggcctccgaggcggcccagcagctactcggcaaggccaagtcgctgaaaagcgttggtggccttgagcagttcgtccgcgagttcatgctcgacgagccggccagcctcagcggtgtggaagaggcgctggagcagatcaacccgctggtcgaggcccgcggactgctcgacgtggcccggcgcaaacgcaacaccctcggcaatatcgctgcggtacaagcgcgttatgccgacgaggctgccaagttcggggtgatcgacaccatcgacaacgcgatgatccgcgattacgtcgaccatgtgcggctggcccaggccggtccggagatcgccaatctcgacgatcagatcacccagctcggcgcccagcgcgacgagttcgggacccagcagcgtcagctcaagaacgagcacaacgcacttatggcccagatcaactctgtggcagtggatctggttcccctgcagcaacggctgaccgaggccgagcggatcagcgaggaagtgtcgcgccgccgcagcgcctacgaggagaaggtgacctcactgggactgaccccgccggacaacggcgaggaattctggtcgctgcgtgagactttgatggaggaagccgaccggctgcatcgcgagctgttcaccggcaaccaaccctacgtggaggcctcggcgaaggaagtccgggcccgcgaggcgcgcgagagcgtcgaagccgagctggaacgggtgcagcggctgggttccccgctgcccagaaccgagtatgagatgcgggcccgcatcgcccgagcgctcgacatctccgaacgcgatctggtctacgtggccgagctcatggagctcaagcccgacgagtcgcggtggcggctggccgtcgaaaaggtgttgcgcggggcgggattacgcctgctggtccccgacgcctacatggaacgggcactgcgcttcgtcaacgagaacgacatgcgcggccggatccagctgcagcacgtccagcacggcgcgcaactgcgtaccccggctccgggcacactggccaccaaactgcagctcgccgacccgacgcacgacagcgccgtggaggcgctcaacgtgatcgccgccgtcggcgattacgtgtgtgtcgacgggccgggggagttcaccgaacaatcccgcgcggtcaccgaccaggggctgcgcaaggacagcggccggctctcgatcaaggatgaccggtcacggctgcggccctcggactacatcttcctgggtggcaccgcggccaaagtcgaggcgctgcaggatgatctgaccgccgcgcaggatgtctaccaggtggcgcgaacggcccgtgagcggctggatgagcaccgcggccagctgcaatcccgggaacgggcctgccgggcgttgtgcgaccagtacatgcagtggagcgacatcgacaccgattcggtcgacgcgatgctcgagcggctgcagggcgaacacgatctgttggtctcggacaatcccgacgctgagcggctgcaacagcgggccgacgattgttgggagcgcgtcgagaaggtcatccagcagatcggttcgctcaacgaacgcgagaccaccctggaccgcaggcgcacggcgctgctggagttgagcgagaccctgaccgagcggctcgggaccagcgagttcccgtcgcatgcccgggacaccatcgacggctatgccgccgacatcgcgctgaacctggagttgctcgagcccgagccctaccgcaacgaactggtccgcgtcatcggccgtgagcgggaccgattgcgggcggaccgcaaccgttcgcacgacgagttggccggcatcatggccgcctacgacagctcgttccccgacgcgatccccaatgacagcgatgtcttcgatgagcgtgtgcacgactacgtggcgttgtgccgccggatcgacgagcgggaattgcccgatgcctacgagcgcatgcagcggctgatcaccgagcaggcgcccggagcgattctgaacctgcacatgatcgccgacaacgaggcacgtcggatcaccgagcagatcgctcgcgtcaacacgggtctgggcgcggtggagttcaaccgcggcacgcggttgaccctgcacgccgggacccggcatctggctgccgtcgacgaactgaacgagaaggcccagcgcatctcgtcccgggtgtcgttggtgagcttcggcgatgagaccgcgatgttcgagcagtacaccgacatcctgcagttgcgaaagctgttggcgggcaacacccccgaggaccgccaatggacccgcgatgccctcgacgtgcgtaaccggtttgtgctgtattgcgaggagcgcgacgccgagaccggcgaggtcattcggacctacagcaactccggtgacaattccggcggtgagcaggagaagctcatggccttctgtctggccggtgcgctgagcttcaacctggccagcccggacagcgacgatacccggccgttgttcgcccagctcatgttggacgaggcgttctccaagtcggatccccagttcgctcagcaggcactgtcggccttccgcaagttcggcttccagttggtgatcgtgtcgaccgtgcagaacagcacgacgatccagccctacatcgacaacgtggtgatggtgtccaagtcggacgcgtcggcacccaacgcccggcccgtcgcgtcggtcacgtcagcgtcgatctcagaattcgctgatctgcgaaagacctcgggtgaggcggttgcgagcgcctag

SEQ ID NO: 47681 - DNA, 1509 bp, Stenotrophomonas acidaminiphila
atgccacaatcgccgccgcacggcaggaagctgcaggaccccgacgttttgaccaccaccaccgccacgaccaccccgccgctgttctcggtcgtacccgccggcatcttcggcccgctggcctcggccaaccgccagaactactggtcgctgctgtgccggatgttcgacgagttcttcggcccggacgcgccggtgccgcccagccacggctttccgcgccgcgagatcaccgccgcgatcgagcgctacctgctcaccgacgacccgtgggaagacgaggacggccaggccccggacgcgccgctgaacatgcgtgccggcgccatccacgaccgcttccgcgccgccggctggctgcgccaggaacgcatcggcgcgcgcgagatggtgaccatgccgccgatggtggcgcagctgctgtccaccctggtggagttcagcgagcatggcccgaccttcgtctcggccaagatgcgttcggtggagctgcagctgcagcaggtcgccgaaggccgcctggatggcggcatcctcgacgaggccgccgaccaggcgcggcgcctgctggtgtcgctggcctcgatgagcctgcaggtacgcgacctgatgccggaactgagcaaggccgagaccaccgcgcagttcgcccgccagtggttcgaacgctacgtcggccagctgttcatcggcgactacgccgagctgcaccgcgccgaccacccgatggcgcggcgcagctcgatcctggcgatggtgcagcagctcgagtccggtgcgcaacgcgaagcgctggtggcctggtatggcgagcacgtgaccggcggcgacgccgcgcgcgcccagcagcggctgtcgcgcagtctggggcggctgcgcgagctggaacgcatcgacgaatacctggcccgcctggacgaggacatccgccaggccaaccgccgcgcgctggcatttctcgactaccgcctgcgtgcacccgaccggctcgacgtgctgctgcgccgcgcctgccgcggcgtgctgtcggcgccggaggacgcgctgcggctgccggtggcgccgggtccgctgatggacgaggcgcgcctgcgcccgccgcaccgcaagccggcgccgattccgcgcagcgccaacgccaccacgccgcccacccccgagcagctggcgcggctgtcgctgctgcggcggatgaagcgcgcgcgcctggtcaacgccgaggacatggcgcgctacgtcggccgccacctgcagcagggcgcggcgatcgactcggcacggctggacatcgccagcatcgaggacctgcgcgcctaccagaccctgctcacgcttgccctgcgcggcaaccgcagcggcggcctgcgccgcgaggatccgctcggccggctgctgcgcggcttccgcgtcgagctgctcgatgccggcgatggcgacgacaacgattacctgcgcggcccgcgcttccgcatcctgcgggtcggcgcaaaactcccggaaaccgcatga

SEQ ID NO: 47682 - DNA, 627 bp, Stenotrophomonas acidaminiphila
atgaaacgcagctggaacaccctgagccagatgtccaacggcacctacgccgtgcaggacttcgagcgtgccgcctaccgcctggccactgagcaggtgctgtacgccgccgacacgcgttcgcgcgtggcctaccacctggtggaagaccattaccccgatttcgtcgccgcgctggagccgctgggcatccgcctggagcgcaacgcccactaccgctacgtggtggcgctgccggcgcatggcgaaggtacgccggtgacgctggacgaaaccctggccctgctggtgctgcgccagcgctacgacgaggccatgcgccagggcctgatcgaggaccacggcgaagtggtggtggaactgccggacctgcaggaaagctggcaggcgctgaccggccgcgcgatgccggacgtgggcgcgctgcgcgcgctggcgcgcacgctcaggcgctggggcgtgtgccggctggtggagtccgaaggcgacgacccgcagccgttccacctgcgcgtgcgcccggccatcgtcgagatcgtcggcgagcaatggctgcagcgcctggaccagcacaaccgcgacgaggcgggcgacgcgggcctggaggacgacgatgcagcagcttga

SEQ ID NO: 47683 - DNA, 3432 bp, Stenotrophomonas acidaminiphila
atgcagcagcttgaacgcatccacctggtccagttcttcctgttcgaggcgcagagcctgcagctggacgcgaccagcgccatcatcgcgcccaacggcgccggcaagagcgcgctgctcgacgccctgcagatcgtcctgctgggcggcgaccgcagccgcatccgcttcaacgcgcaggccggcggcagccaccgtgcgcgcaccatccgcgactactgcctgggcgtgttccgcagtggcgaggaagggcgcaagcggcgcaccgccaccacctacatctcgctggtgttccgcgacaccgagaccggcgtgccgctgaccgccggcatcgcgctcggcgcctcggtcgatgaacccgaacaccgcacgcacgggctgtacctgctgcccggggtggcgctggagctggacgaacacctggagcaggtcaagggcaaggaactgccgttggcctggaatactttccgcgagcacatcgcccgccgctgcaaggacgtgggcgaaacgccgcagctgcatcccaatgccgagcggttcctgcgcgacctgctgctgcgcctgcgcgccagcccgtcggccaaccccgacctcaatgcctaccgcaaggccttcctcaacgcgctgaacctgcagcgcgtcgaggacgtggacctgttcgtgcgtaccctggtggccgaggaccggcccaccgacatcgcccgcttccgcgcgctgctggacagcttccgccagatcaaggagaagatcgagcaggtccgccagcgtatcgacgccgccgaaggcgccgagcgccagtacgaaaagatcgccgcgcaggccacccgcgccgcctcggcgcgcgcgctggccgccgagtacgcccgcgacctgtacagcgagcagctggaccaggccgaaggcgcgctggccgccgctgaggacacgctggccgacacccgccgccgccttgccgatacccgtgtcgaacgcgacaccctgcgcgaggaacaggcccgcgccaacgcgcgcctgcagggcagtgccggctacggcgagcaggcgcagctggacgaactggccggccgcgaccgcgatcgccttgcccagctgaagaaggacctggcgcgcgaagtcggcttcgtgcgcgagcagttccgccagctcgatgcgctcgcgctcgacgacgtcgacagcaccgcgctggccgccgcgcgcgaagcgtgggatgtctggcacgccgaactgtcggcgctggccgccgaggacgcgctgccctgggctccgcaagacctgttcgcgcgcgcccgccaggcgctgcatgcggccgcgccgctgcgcgagcgtgtcgaccgccatgcgcgccagctgcatgccgcgcacgacaaggcgcgcgatgcgctggaaaccgcgcgccagaaccagaagcggctggctgccggccaggccgagctgaacccggataccgtgcggttgatgagctacctgcgtgatgccggcatcgacgcgcgcccggtgtgcgacctggtgcgggtcaccgacgcgacctggcagcacgccatcgaggggtacctgcgcagcaacgtcgaggcgctgctgatcccggacaaggacgaggaacgcgcggtcaagctgtaccgcggcctgtccggcgggcgctcggtgtatggcgtcaagctggcactgtccagccatgcacgcaggtcgcgtggtgccgacgagccggagagcggcagcgtcgccgcgctgctggaaggcgtcaatgccgacgcattggcgttcctgcgccgccagctcggcgagctgcgctgcgtggagaccgaggccgaactggtgcgcagccgccagggcctgacccgcgacggcctgctcgcgcgcggcggcagcatcgaacgcctgcgcctgccggccgcgggcgacctgcgcatcggcgcgtccgacaaccgcgcacggctgcgggtactgcacgaggaaatcgagaaggccgaacaggcgctgcgccagatcgaaccgcgcctgcgccgggccgacgactgccagcgcgggctggcacggctggccgatgccgacgccgtcgcccaggcgctgcacgagcgcgtgctcgagcatcgccaggtggccgagcgttaccgcagtgcgcaggaaagccggctggcggcgctggacccggacctgctgcgcctgtccgaacagctgcgcgaactgaatgcccagctcgccggctgcgagcagcgcgccgatgcgctggtcggccaggaggccgtggcggcggccaatctcgaacgcacccatggcctgctcgagggcctgcgccagcaggaggagctggtcgcgcggcgcgcggtggaagccttcgccgacccggacgtcgaccccaaccgggtcgagcgccagcgcgaggaactggacgaaaagcacccgtcgctggaagaacgcgcacgccgctgcgaagagcgtgccagggacagcgacgcgcagctggcgcggttgctgccggaggcctggagcggactggcgcagtacgcccgcgaccatgggctggaactggatttcgatgccagcgcctggcgcccggcgcgcatcgtgctgcagcgcgaactcacccagctgcgcgacaccgagctggtgcagtacgaggaggaggcgcgccaggcctatgccaccgcggtggacaccttccgcaccggcgtggcgtccaccctgtacgacaacttcacccggctcaggacccagatcgccacgctcaaccgcaccctgcgtgccagcccggcgttctccaacaacgagcgctaccagttccactacgaggtggtgccggagttccgcgacctgcaccgcttcatccagcgcgccgccgacatcggtggcgaggacacgctgttcgagagcgccggccaggtgcccgaggcgttccgcgcgctggtcgaggacaaggccgccacccacgtggccaattcgccgctggacgactaccgccgcttcttccgcttcgaggtgcagatccgccaggaggaccgggtgatcggcagcctcagcgaacgcatgcgctcgggctccggtggcgaacaccgcgcgccgctgtatgtgatcgccggtgccgcgctggccgcggcctacggcaagagcgaggcgcagccaggcgggctggggctgatcctgctcgacgagttcggcgacaagatcgacgcgcagaacgcacgcgccaccaccaactacctgcgctcgctgggcctgcagctggtgctggcggcgccggataccgcccagggcaccttgtccggcgtgctggacagctacatcgaactgttccgcgacggcgacctgctgcaggccgagcgcatcgaggtcaccgaggccgcacgtaccctgctgctgtccgaccagttcgacctgcacccggaactgctggcggcggagaccgagcgcatcgagcgcgagcaggcgacgtcatga

SEQ ID NO: 47684 - DNA, 789 bp, Candidatus Methanoperedens sp. BLZ1
ttgataaaaggtaaaatagttggatttgttctggatgcagatgaaactctcaaagattctgatcagggaaaaagtttttatgcattttggagatttttaatgtctccttctaaggaagaagaattaaaacatttaattgagagtgtatataatttgccagttattcgtgctttggaagcagacgataaatttttgaaaaaaattaaaaaaaatttattagaagctggtgataaagttattagatcaaatcaccgtctatcggagcagttaagaaaaatattagatgaaaaaaatttacaagaaaaccgaagggtaagggaattgattggagatatagaacgaatagcactggaaattattgaaaggcatccaagcaagaaggattttatatttttagaaggtgatcctgtaatagaaataattatggataaaccattttgggcgccaacacaaaaaccaacctttatagataaattaattgaaataagcaaagatgaattggagttggaaggtttattcaatcagtttttcattgatgaaagtgaactaaaaagtagaattcatagtttcttgctttattatccgcaaataacattacaagaagtaatagaaaaatttccgattgagataggaatttctgaattaattgcctatttcaagatcgcctctgaagataataaacatataattaatgataaaactcaagttaatattattgttgagaataaattaattactaataaactatgctttgagatcaaaattccacaaattatttttatcaaataa

SEQ ID NO: 47685 - DNA, 534 bp, Candidatus Methanoperedens sp. BLZ1
atggaaaatgaaaaaatactaagttatgcatctgtaatcatcagattattgcaaggagcagttcattatgatgataaagacatttgggagagtttgctatccaatcgaatatctgtggaagattattttgaaaaaatcggagtaaaacttttcataaatgaacctgatggctatgcatttctaaaacaaaaagaatttgaagaggatgataaaaataactctttgccaagacttacccgcagaatcccattaagttatgatgtcactttattatgtgttttgcttcgtgaaaaattgttacaatatgatgtaggaaatactgattctacccgctccccaattcttacaagagatgatttgtatgaactgttgcttcaattctttaaagaaaaaacggacgaaaaaaaacagcgaggaaaacttgatgcgatcatcaataaagtcatagatttgggctttctaagacatttaaaaaatccaggaaaagaagaatatgaaaatcagagctatcataaaagcgaaaattgcggctga

SEQ ID NO: 47686 - DNA, 897 bp, Candidatus Methanoperedens sp. BLZ1
atgcagaaaactctatttgaatcagacaatagccaaataggctttcgtttacatagattggaattatataattggggtacttttaacaaatctataaggagaattgaacctaacggctacacttccctgcttactggtgcgaatggttctggtaaatctacaatagttgatgctttactaacattattagtgccaaatactataagaaattacaatcttgcctcattacctgaaaaaagacgggaaagggatgaaaagacctatgtattaggcgcatatggaagattgaaggatgaaatagatcaaaatacgagtaaagttcaatatttacgaactaaagatgattattctgttttgcttgcatatttttttaatcagggttatcagcaaaaaataactttagcccaagtgttctggtttgagaatgattctataagaaaattttttataaaatcggataaagaattgaatatagaagaacacttcaataatgtttcgagcataaaagatttaaagaaaagacttatttcaaatgggaataccgacatttatgatcaatttataaattatagtatttcctttcgcaggatttttggcttaatttctgagaaggcattgggtctatttaatcaaactgtcgctataaaagtaatcggtgatcttaatgatttcctgcgcaactacatgttagagaaggtagatattagagagaaaatcagagatttaaagaaaaattatgacgatctgactaaatcttacgaagcaatccaaaaagcaaataaacaactgcaacaattaaaaccaataataagtgaagcaaatcagtttgagaaactttctttcgagatacaggaatctaataattgcttacgaattgtcactcccttttttttctaa

SEQ ID NO: 47687 - DNA, 738 bp, Burkholderia pseudomallei
ttggccctatcgaaggggggcaggtcaccggaggcgaagttcaatcgaatggatgcgcagttgcgcgatatcgcgcactggatggcgaaggagtacaccggaagctcgctctatgattggctgctcggtcgtattgaagacatcgtagacgcggcgtgcgagtctaagcagccgggctttctcaaggccatggagacttatctgaagcgtgtgaacggcctcgctttgcagtcgatgatgctacgctcggggcagactcggcatgcctacttagcagccgttcagaaagtggccgagtctcccaagttggaacaggaccgcttgctgaagcttgttggccagttcctcgcaccagcggaggtgcgcgtcctagacccagctagcttcaagctgaagactgcaacgcagcgccgcaaagcagtaaccgtgtctattcgaccgcgcccgacaagggaagagcggctcgctgcggcgatggcgcgagcagaggccgaagtgttctcaataccgaacgaggatgtcgcgcaggggctgcgtgcggacctgcgactcttccaacatccaatccgcgtttccgcaatgcctacggcaagtgcccgcgacgtcattcgcgcaatgcaagcggtggaagccgcgcgaagcgccatcggcggggacctcatcgtcaagaagctgccgacccgtttggagaatgagttctacggggccaacgactacgaaatcgacctgaaaaaatga

SEQ ID NO: 47688 - DNA, 672 bp, Burkholderia pseudomallei; identical to SEQ ID NO: 44291

SEQ ID NO: 47689 - DNA, 3633 bp, Burkholderia pseudomallei
atgaagctcgaccgcatcgttctggtcaactgggggcagttgcggccgggcgactatgaccttggaaacatgactcttcttaccggcccgacgggcgccggtaagtccactatgctcgatggcctccagaccatcatgactgccgcgtaccagggtatcgtcgcatacaaccctggccaagaagaggtacagcaggggcaacgcagtgggaagtccaagcgcaccttggagtcatttgtcgtcggtgctgagtacagtcgtttctctcgacctcatggcgcgcacgggtatatggcggctgtgttccgccccgggcccgatgaggactcggccaagacctttacggcgctcgtcgccgcatcggcacaggtggatggcatcggggagcgcagggttccgaagctggagcgactcgaactggttatcgtagacgacgccgcgctgaccgttgacgattttctaaaggacgcggagcagagcgagtgggtggctgtcgaagaaatcgtcaagcgattgaaggctcggtattcgaaggtggtgacctatgacgggcataagcgagactacctttgcgcactctacgggcgcttccgggggcgcatctcgattacctgggatgaggcccagaacgctgcgaaggcttggtgccagtcaatagcttacaaaaaaattggctcggtccacgacctcgttcgcgatgacattctggagtatgacggcaagcagttgcaggagagcatcactcgcatcagcgacctgatgcgccaagtcacgaacctgaagcaagaagggcagcgactggaagcgactgttgggcggttgcgagggttgaagactgctatcgcgcaaacgacgtcggcgtttgaagagcaagtccagtatgacttgctgctggccaagatgctggtggcggcggacgacgaacgtatcgcccaagagcagaaacgcatcaacgatgactcggcactggtaacgcggtgcgagcaaaaggtaaaagccgaggagcgactgaaggcaggcgtggaccggagccgcatcgacattgcagcgaagctcagtggaatcgccgccaacgccgagaaagagcgcctggaccagcagctcgagctcgccaattccgcagctcggcacaaactggctgagctcaatactgggcttcaagaggccgcccaaatcgtcaatgcggctaccggtttgttgcggaagcccattccggagcagttccccaagctcaaggcgtcggttgacgcggtcggtcgagttacagcatcgactgacgttgctcgcttggacggtctgttgggcgctgtcctcgatgcctcaagtgatgcgcagcttaacgtcgagaagctgttccgattgacccctgcattcgctggtgtggaagagggactcgccgcgctgcactcatatctagtggggaccgaagatagtgtcttgatggctgttgcgtccgagacgtcggaattgacgcaacgtgtcgaagccactcgcaaggcgcgcaaggaattggctgaccgcaaggagctgttggcgagcggcgctagcgattacaaccgcgacactcgcatggcgcttcctcgcatccgagagtgtctgcccgaagctggtgtccaagttctctgcgacctcgtcgaacctgtgtcggatgaatggcaggaggccatcgaagggtacttggacaatgcccgcttcaatctcattgtgaagcctgagtgggaagcacgaactatcgatttgcttcactcatggggctcgcgctgtaaggtcatccagggtaaacgatgtcttcagcgtgccgatgccggtcgtgtgccatctgactctatcatccatgagctccgcactgaccatcccattgcacgtgcgtatctcatcgagcagtatggcgccgtcgtcaaggtcagggactccgagcaactgcgcgataccgcgcgtgggttgaccaaggacggcaaaggaagcggttctcgcactatgtttgttggtgagcggcgggaccttgttcttgggcgcaaagctcgcgagcaggcgctgcgggctaccatcgagaaactcgatgcggcagaccgaggaattcgagagttcgagcaactgcaggatacgctgtcgagcgttaaacggcttcttggcaacctgcgtgaacccgtattcgatgcgatgccgcttggccaagcagcgggcgaaatcgacagcactcggcgctcgcttgcgcagctggacctcaccgaggtggaacagttgcgggcggagcgagcgaagctggaactgctcatcgcagggcacgatgcggaaattaccgcggtaaacaaagagattaccctggcgagtcagcgtatcacggacgcccaaggcgccattgagcgcatcaatggaggccgagacgcgcgatttcgggagcgtgaagaccagattcgtcggctcgggcagatgtgcgaaacaaactcagagaaaacctacacggttattgccgaggaagtagagggcttgctcaaatcccggaggtttgacgtgcactccgttcaggtgcggctcaacacgctgcgcgcgcagccggacaaattgctgggcgatgtgcgggaaatgctcgcggagtacaacgcgaacgcgcgccaagaggagcgcttccagtcagcgctgcctcatcttcacgacgccaccatgttcgacccgtactatggcccccttgttgcgctcggccgcgcggtgggtgcactccacagcgagcttgagggcattggcctctacaacaatcgggccaaggtggaagaagcggagcgctctttccatgacgtgttcaccaagcagttttgcgtcgaaatcaaaagcaaggtggatgatggcgtccgactgctacggcaacttaatatggagttggaaaggcttaagttcggcacggaccgcttcagcatcgactggtcgaagtgggagccggagttccaggagtactacagcttcttctcggccgtcaccgaccttgcggactcagtcgaaacggtcgacctcttcggagagacggagctcacgccaaagcacgtagaggtacgcgaccgcctggtgaagctcctgctcgactcagaccaagagagagcggggcgggagctattgcgcattgccgactatcgaaactacaggcgctacgaaatttggaatgattcagacagtggggggcgcatagcgctttcgacatggggcacggggtctggtgggcagcttgagacgccggcttacatagttcgcgcggccgtggtgacgaaccggctaaagttcttcgagaagggacccagcctgaagatgctcgttagtgacgagtcgttctcgacgatggatgaacctcgcgctcgggccgtgctgcagtacctacgcgaaagcctcgatattcaggtcatcagtgcgatgccgacacgaggcgctggtggcttacggccagagttcgaccgggagtacagctatagccgggttcctgttgacgctaacggcgaactcgacttcatcctcgaatacgacgagcgcatcttcaagaaggacaagatgcgagagctctgggaaaagcagcgggcggcggcccgtgcgcaggccgagctggcgtttggcgccgccgaggccgcacagcaggcggaggcgcttaaatga

SEQ ID NO: 47690 - DNA, 1134 bp, Burkholderia pseudomallei; identical to SEQ ID NO: 45147

SEQ ID NO: 47691 - DNA, 759 bp, Yersinia similis
atgacaggcatctttgatcggttagtgaatacaggcaacggagagctaacccaagatgtgctgtcgcatatcgaaagggatgatatgacaaccgatgcattgcctgatacggacagcgagtctaccgaagagaagcgcactcacaagcgagtacgtgaggctgctcaggagcttcttaagtacggtttacttgaagagagtcataaacccaatctgtatcgcatcgcactgatccacaccgaagaaatggccagcattttggagcctctcgatctgagtatggggatcgatgaggttcgtgggctactctttgtcatggtacggcagcaggaaacctcggaacaggatgattggacgcatccgttggtgcgccggcagcgcttgaatctggaacaatcgttactgattgccattttacgtcagcacttcattgcctatgaacaggaaaacggaataggtgccagccaggcattggttgccgtggatgatttgatcccacagctacaggtgtatctgggggatctgggcagtgatgccagagagcgaacacgggtgattaatttattagatcagctcaaagggcatggattggtttctactccagacgctcatgaacgggtgattgttcgcccaattattgctcatctggccaatcctgagaatttacaagctttgttagcatggctacgagatcaggtggaaaggagcgagttgccgggtgacgccagtgaactgatgggtggggaggagatgccatga

SEQ ID NO: 47692 - DNA, 3291 bp, Yersinia similis
atgaaacaatcccctctctggtgcgatagcgaaaccttcatattgacacatttggatctttttaactggggtggcttcaaaggggttcatcgggcggttattgatcccgcagggacggcggtgatcggccccacgggtagcggtaaaacaacgcttgttgatgctctgatgacgctgttgtgcgctaaccctcgctataatctggcgtctacgggggggcatgagagcgaccgggatctggtgtcctatgtgcggggggtatccggccccggcgatggcggtgccgggcagtcacatattgcccgacagggcaaaacaatcactggggttgtggctacgctggcatgtgatacacagcaaattcgcttgggtgtcttgctgtggttcgagggcaccagctctgctgcaacagacatgaaaaaactgtggctgttcagcgatgcccctggacacacccttgagcattggttgaatgtacaccatgaaggggggatgcgggcattgcgacagatggagaaagaaggcacggggatctggacctacccgagtaaaaaatcttatctggcgcgcttgcgtgattacttcgacgtgggcgaaaacgcgtttacgctactgaatcgcgctgccggcctaaaacagttaaacagtattgatgaaatcttccgtgaattggtgctggatgatcactcagccttcgagcgtgccgccgaagtcgccaatagtttcgatgatctcactgagatttaccaggaattgcaaatcgcccgtaagcagatacggtcactacaacctattgccgatagctgggggcgttatcaggtccagtcacgcctgctggaagaacggcaggcactcgaggtcattttgcctatctggttcgccgagcaggcccatggtttgtggttggtgcaaacacatcggctagagaaggaaatcagcgagactgaatccaccgtaaaagaattacagcggcaacaggccgaacagaaaaagcaggtgaatgagcggctgaaacgctattgggatgtggagggaggaagtgttgatgttctcaaagatcgcattaccgattggcagaaaacctgccatcaacgggagatgcaggcagcaaattatcaacggctagcaataaacctcgatctatcacaggagttgaccgctgcggggttgcaagcgaatcaacagaaagccgaaacacgcctgacggccctttctgaagagataagtgccgccgagcgaagcgcattcagtaaagggattaccgatcacgagttaactgagcagcttcagcagttatgtcaagaaaagatagacgttgagcgccggcccgaatctaacctgcctagccagtttcaagcttttcgcagcgcgttggctaccgagttgggcctggatgatacaaccttgcccttcgtcgccgagctggttcaggtcaagcaggaggagaaatcctggcgtggtgccatcgaacgagcaataggcagccatcgcttacgtatattggtcccccacgcgtcggctgatgctgccctgaattgggtcaatcaacgacataaccaactgcatgtgcgtttactcgaagtgaagtcgccagcgtcccagcccctatttttccatgatggttttacgaagaaacttacctacaaagaacacacctcccgagagaccgtgaaagccttgttggcagatattgatcgccattgtgtcgaaaataccgatcaattacggcataccccacatgccatgactgcgcaggggctaatgtcgggcaaggcgcgtttcttcgataagcaggaccaaaaacgtctggatgagggttggctgacgggttttgataaccgtgatcggctggcttttctggcggagcagatacaacagaaagaacaacagctacagatagcgacgcaagcgcttcgtcttgctcaggctgccgtgggtaaattgcaggaacaagccaatgcgttagcacatattcaggcgttgaacttcgagagtattgacctacccactgcgcagcgccaactggaagaattacaggctcgtctggataggctgacccatccgcagtccgatatcgctattgctaaggccgcactggatgaggctgaagcacggcaaaaagagcttgaaaggcaatatcaacaagaagtgactgcatgtgctggtttgaagaaggatctcgaacgtgcagcaatgctcagccgtaaagtccataacatcgcaaaacaaggcatgaccggtgcactacaagcgttaggcgcagcgcattttcctcaggtggcccccgagcaactggacgacattcaggacattgaacgtgagcatgcacgccaattgcaaggccgactcaatgaggtcaatgaccgattacaacggttacgggacgagcttatcaagcggatgtccgacgccaaaaaagaggatactggcgcgctttcggaagtggggcgggaattagacgatattcccaactatctggcgcgcctacagaccttgaccgaagaggcgcttcccgaaaaacttaagcgtttccaagaatatctgaaccgttcctctgatgatggggtgacgcagttactcagtcatatcgaccatgaagttgcgttgatcgaggagcgtctggaagaacttaatgacaccatgcgccgagtcgattttcagtctgggcgctacctgtgtttgatcgccaaaccggtggtgcatgacagtatgcgcacgttactgcgcacgcaacgccagcttaactcggctcgtttcgtcgatgatgatggcgagagccaatataaggcgctgcaagcgttggtcggattactgaaagatgcctgcgaacgcaaccgcacccaaggggccagagcgttgctggacccccgtttccgccttgaattcgccgtttcggtgattgagcgggaaaccgggagcgtcattgagactcgtaccggttcacaaggcggtagtggtggagaaaaagaaatcatcgcgtcttatgtactgaccgcatccctaagctatgcgctgtgccctgatggtcgcaccaagccgttgttcggtactattattctggatgaggcattctcgcgtagctctcatgttgtcgccgggcggattatcgctgccctgagggaatttggtctgcatgcggtcttcatcacgcccaataaggagatgcgtctgttgcgtcatcacacacgctcggcgatcgttgttcatcggcgtgggccggattccagtctggtctcattaagttgggaagatctaaatgaacatcatcagcagcgcaacaaaccaatatga

SEQ ID NO: 47693 - DNA, 1155 bp, Yersinia similis
atgaaatcacccattgatattggcaagcaattggccagacagtggcatcagtctaaggtgaggtctgaacgcttactcacacccggctgctggcctttgcaactgccaataggtaaaccgtcggcaaagatttttactgcaaatacgcaggtagtgcagcgccatgtcgaggtctggcgtcaggtcagtatcggtcttgttgaatgggaatccgttagctaccgtgccagcctcacgcctgtttcaattcccgttcgatggtgtttgcgcaccccctctgagtggatcaatgcagcatcgaacctgcaagtcagtcaggaatttcaacaacttgagcaactggtagcgcaggttgataaatcctttcatgccttgctgattaaccagcgggcgctttggctgcataaagatccacatgaggtgattaccgcggctaatcttgcctgcaaattgacacccggctgtgctcaggggcgacctttacgcctgctgtccgagtctggagtagacacgaagttcttcgaaagaaactattcgttgctgacaaaactacttgatgagcgttttgagggggaggcctctgggcagggtctggcaacctttcttgatgccttcgaagaaagcagccactgggtattggtcactccgttggctcccggcatactccccttcaacatgagtaaggtcacaacaacagaactggcgagcgtagatttaccatgctcacgcattcttatcgtagaaaatgaacactgtattcaccagttaccgcaattacctgacaccattgctattctgggctcaggtctggacttgcagtggctgatttctcctaatttaaagagcaagtcgataggttattggggggatatggatacttgggggctattgatgttggcgcgggcaagagcgttccagccagcgattaccgcacttttgatgggccgcttgttatttgaacactacgcatcaggctcagcggtcgcagagccggtcaacgctcaacaggcggttcccgaagggcttcatcaccacgaagcagacttttaccgatacttattgtcacaaccgcgggggcgtcttgagcaggagtatttaccacggggcgtggtcgaaatggcgcttactgaatgggtcggtcacatttctctttaa

SEQ ID NO: 47694 - DNA, 1500 bp, Yersinia wautersii
atggaagaaaacgctcaacaatgcacagaaaaatatatttcagcacgtagccagcatcctacttggatcttgctcgcctctcgtcgcgcccctttggtactgggttgtctgcgagccatgtttaagacgtcacatgacggtataccgatggaagatgcgcttcaggctctggcgggtatcctctccgcgcatgccagtcaggaactgtatgaaatcgagcctgataatacccatcttcaagctgggcgcgagctacgggagtggatcaaacgccgtctggttgttgagcgagaagggcgaatttttgcaacggatgcactggaagtcgcgatacagtttgttgaatcgctggatagccgcattatgacctccacagcttcacgtctgtccgtggtgcaacgtgaaatagaaaatcttgagaccagtcttaatcccaacccagagagccgaattaataagctgcgtagtcgaataaaggcgctggaggaggagctgtcgctggcagaagcgggacacatcgtggtgctagatgaagcacaggcggttgaagggatcagggaagtctacaatttggccacttccttgcgtgctgattttcgtcgtgtagaggattcttggcgagaggctgatcgggcgttgaggcaatctattatcagcgagcagtatcaccggggtgaaatcatcgaccgcctgcttgatgatcaagactcactgctgaacacacctgaaggtcgcgtgttcgacagcttccagcagcaacttcgccagacgattgaactggacaatatgcgccatcgcctgcgcaccattctgcgccatcccgtggtacccaaagcattaccgtggtcacaacaacgggatcttcactttctggtgaagcgtctggttcaagaaactaaggtggtgttgcaggccagatctcgtagtgagcgggatgtgaaaggttttatgaaaaccggccttgctgcggagcaccaccgtgtagggcaactgctcaatgatatctttagtcttgctttgaatctggattggcagcggctggcgataaggcggcaagagatccctttgccgcccttgggaatggcggtgacaggcgttcccgcggtagagcggttacgttttaaaacactggatgaggatattgagccagaactggatctgagcaccacgtcagtcggcttggaacaagtgggtgatgatttttgggatgcctttgatggtttggatcgagaggcgctgatccaaggtaccctgagagtcctcgcagaacaaaacagacccattagccttggtgaattggcggttttactccccccagcacacgatctggaaacttttgccctttggctgggaatggcacatgaagccggtatcaccattcagaatgaacagcgagaagcggttgaactgattgacgatgaacagcgcatatggcgcttctatcttccctatgctgggctggaaagtcaggcacttaaggatattgattgggagttgtga

SEQ ID NO: 47695 - DNA, 759 bp, Yersinia wautersii
atgacaggcatctttgatcggttagtgaatacaggcaacggagagctaacccaagatgtgctgtcgcatatcgaaagggatgatatgacaaccgatgcattgcctgatacggacaacgagtctaccgaagagaagcgcactcacaagcgagtacgtgaggctgctcaggagcttcttaagtacggtttacttgaagagagtcataaacccaatctgtatcgcatcgcactgatccacatcgaagaaatggccagcattttggagcctcttgatctgagtatggggatcgatgaggttcgtgggctactctttgtcatggtacggcagcaggaaacctcggaacaggatgactggacgcatccgttggtgcgccggcagcgcttgaatctggaacaatcgttactgattgccattttacgtcagcacttcattgcctatgaacaggaaaacggaatcggtgccagccaggcattggttgccgtggatgatttgatcccacagctacaggtgtatctgggggatctgggcagtgatgccagagagcgaacacgggtgattaatttattagatcagctcaaagggcatggactggtttctactccagacgctcatgaacgggtgattgttcgcccaattattgctcatctggccaatcctgagaatttacaagccttgttagcatggctacgagatcaggtggaaaggagcgagttgccgggtgacgccagtgaactgatgggtggggaggagatgccatga

SEQ ID NO: 47696 - DNA, 3291 bp, Yersinia wautersii
atgaaacaatcccctctctggtgcgatagcgaaaccttcatattgacccatttggatctttttaactggggtggcttcaaaggggttcatcgggcggttattgatcccgcagggacggcggtgatcggccccacgggtagcggtaaaacaacgcttgttgatgctctgatgacgctgttgtgcgctaaccctcgctataatctggcgtctacgggggggcatgagagcgaccgggatctggtgtcctatgtgcggggggtatccggccccggcgatggcggtgccgggcagtcacatattgcccgacagggcaaaacaatcactggggttgtggctacgctggcatgtgatacacagcaaattcgcttgggtgtcttgctgtggttcgagggcaccagctctgctgcaacagacatgaaaaaactgtggctgttcagcgatgcccctggacacacccttgagcattggttgaatgtacaccatgaaggggggatgcgggcattgcgacagatggagaaagaaggcacggggatctggacctacccgagtaaaaaatcttatctggcgcgcttgcgtgattacttcgacgtgggcgaaaacgcgtttacgctactgaatcgcgctgccggcctaaaacagttaaacagtattgatgaaatcttccgtgaattggtgctggatgatcactcagccttcgagcgtgccgccgaagtcgccaatagtttcgatgatctcactgagatttaccaagaattgcaaatcgcccgtaagcagatacggtcactacaacctattgccgatagctgggggcgttatcaggtccagtcacgcctgctggaagaacggcaggcactcgaggtcattttgcctatctggttcgccgagcaggcccatggtttgtggttggtgcaaacacatcggctagagaaggaaatcagcgagactgaatccaccgtaaaagaattacagcggcaacaggccgaacagaaaaagcaggtgaatgagcggctgaaacgctattgggatgtggagggaggaagtgttgatgttctcaaagatcgcattaccgattggcagaaaacctgccatcaacgggagatgcaggcagcaaattatcaacggctagcaataaacctcgatctatcacaggagttgaccgctgcggggttgcaagcgaatcaacaaaaagccgaaacacgcctgacggccctttctgaagagataagtgtcgccgagcgaagcgcattcagtaaagggattaccgatcacgagttaactgagcagcttcagcagttatgtcaagaaaagatagacgttgagcgccggcccgaatctaacctgcctagccagtttcaagcttttcgcagcgcgttggctaccgagttgggccttgatgatacaaccttgcccttcgtcgccgagctggttcaggtcaagcaggaggagaaatcctggcgtggtgccatcgaacgagcaataggcagccatcgcttacgtatattggtcccccacgcgtcggctgatgctgccctgaattgggtcaatcaacgacataaccaactgcatgtgcgtttactcgaagtgaagtcgccagcgtcccagcccctatttttccatgatggttttacgaagaaactgacctacaaagaacacacctcccgagagaccgtgaaagccttgttggcagatattgatcgccattgtgtcgaaaataccgatcaattacggcataccccacatgccatgactgcgcaggggctaatgtcgggcaaggcgcgtttcttcgataagcaggaccaaaaacgtctggatgagggttggctgacgggttttgataaccgtgatcggctggcttttctggcggagcagatacaacagaaagaacaacagctacagatagcgacgcaagcgcttcgtcttgctcaggctgccgtgggtaaattgcaggaacaagccaatgcgttagcacatattcaggcgttgaacttcgagagtattgacctacccactgcgcagcgccaactggaagaattacaggctcgtctggataggctgacccatccgcagtccgatatcgctattgctaaggccgcactggatgaggctgaagcacggcaaaaagagcttgaaaggcaatatcaacaagaagtgactgcatgtgctggtttgaagaaggatctcgaacgtgcagcaatgctcagccgtaaagcccataacatcgcaaaacagggcatgaccggtgcactacaagcgttaggcgcagcgcattttcctcaggtggcccccgaacaactggacgacattcaggacattgaacgtgagcatgcacgccaattgcaaggccgactcaatgaggtcaatgaccgattacaacggttacgggaagagcttatcaagcggatgtccgacgccaaaaaagaggatactggcgcgctttcggaagtggggcgggaattagacgatattcccaactatctggcgcgcctacaggccttgaccgaagaggcacttcccgaaaaacttaagcgtttccaagaatatctgaaccgttcctctgatgatggggtgacgcagttactcagtcatatcgaccatgaagttgcgttgatcgaggagcgtctggaagcacttaatgacaccatgcgccgagtcgattttcagtctgggcgctacctgtgtttgatcgccaaaccggtggtgcatgacagtatgcgcacgttactgcgcgcgcaacgccagcttaactcggctcgtttcgtcgatgatgatggcgagagccaatataaggcgctgcaagcgttggtcggattactgaaagatgcctgcgaacgcaaccgcacccaaggggccagagcgttgctggacccccgtttccgccttgaattcgccgtttcggtgattgagcgggaaaccgggagcgtcattgagacgcgtaccggttcacaaggcggtagtggtggagaaaaagaaatcatcgcgtcttatgtactgaccgcatccctaagctatgcgctgtgccccgatggtcgcaccaagccgttgttcggtactattattctggatgaggccttctcgcgtagctctcatgttgtcgccgggcggattatcgctgccctgagggaatttggtctgcatgcggtcttcatcacgcccaataaggagatgcgtctgttgcgtcatcacacacgctcggcgatcgttgttcatcggcgtgggccggattccagtctggtctcattaagttgggaagatctaaatgaacatcatcagcagcgcaacagagcaatatga

SEQ ID NO: 47697 - DNA, 1155 bp, Yersinia wautersii
atgaaatcacccattgatattggcaagcaattggccagacagtggcatcagtctaaggtgaggtctgaacgcttactcacacccggctgctggcctttgcaactgccaataggtaagccgtcggcaaagatttttgctgcaaatacgcaggcagtgcagcgccatgtcgaggtctggcgtcaggtcagtatcggtattgttgaatgggaatctgtcagctaccgtgccagcctcacgcctgtttcaattcccgttcgatggtgtttgcgcaccccctctgagtggatcaacgcagcatcgaaccggcaagtcagtcaggaatttcaacaacttgagcaactggtgacgcaggttgataaatcctttcatgccttgctgattaaccaacgggcgctttggctgcataaagatccacatgaggtaattaccgcggctaatcttgcctgcaaattgacccccggctgtgctcaggggcgacctttacgcctgctgtccgagtctggagtagacacgaagttcttcgaaagaaactattcgttgctgacaaaactacttgatgagcgttttgagggggaggcctctgggcagggtctggcaacctttctcgatgccttcgaagaaagcagccactgggtattggtcactccgttggctcccggcatactccccttcaacatgagtaaggtcacaacaacagaactggcgagcgtagatttaccatgctcacgcattcttatcgtagaaaatgaacactgtattcaccagttaccgcaattgcctgacaccattgccattctgggctcaggtctggacttgcagtggctgatttctcctaatttaaagagcaagtcgataggttattggggggatatggatacttgggggctattgatgttggcgcgggcaagagtgttccagccagcgattaccgcacttttgatgggccgcttgttatttgaacactacgcatcaggctcagcggtcgcagagccggtcaacgctcaacaggcggttcccgaagggcttcatcaccacgaagcagacttttaccgatacttattgtcacaaccgcgggggcgtcttgagcaggagtatttaccacgggacgtggtcgaaatggcgcttactgaatgggtcggtcacatttctctttaa

SEQ ID NO: 47698 - DNA, 1029 bp, Streptococcus pneumoniae
gtgctaaaggaaatttgtgaaaatagaacaattgaatatcaaagatattgttttacgacatatcagttgttaataggagtggaggcggaggggcgcccagcttcagctatttgggagtctgaaaaatatagtgatcaactttatgatgaattaacaattttactgcacaatatgaaaaatcatatggaaacaattgcagctaaagatgatatacaacaagtgttagagcatcattttggagaatataaaaaagacataattgataaaagttatcatcgtttaaggacatcggaccatgtgtcgagatatcgaaataaaatattagagcgtatacagacttggtttttagatgatgaattcatgaaacgtgctgccaaagatgctgtagaaagtggatattctactagtcaagaagaggcgatggatgtactaagtaagaaaatgtataaggttgaagaaatttatagtaatttagatgaaatttataatcaaattgacgcacgtcattatcaatatttacgagcggtcttagatcgttctcgatatttaagtacttataatgacagtactgattacaaaatatcttatattttggaacatatcaggcaaacggacgagaatatactcgattcttccccgtttcgcttagtacagtttaggcaacttcaagaagcatcactgttatccccacgtaagaaaaaagatgtatatgaaccagaacagcatgaggttaccgaaattagtgaagagatgcgagaggagctaaaagctgaaaatgtaagacgtattgaaaaggttattaatagaaagaaaatccgaagatttgtgttggaagcaatgaaggggcgtcaagagatagagatgagtgagttggatttgcaaaacgaggaggacgctttgtatttaatttacgtttatttgtatggctacagtaggaacgctggatatacgttaagtgaagagtcacctgaatttattacacaaaggggctatacattttctaatcgcacgataaaacgagaaaattag

SEQ ID NO: 47699 - DNA, 594 bp, Streptococcus pneumoniae; identical to SEQ ID NO: 46740

SEQ ID NO: 47700 - DNA, 3324 bp, Streptococcus pneumoniae; identical to SEQ ID NO: 46741

SEQ ID NO: 47701 - DNA, 1221 bp, Streptococcus pneumoniae; identical to SEQ ID NO: 46742

SEQ ID NO: 47702 - DNA, 1383 bp, Streptococcus pneumoniae; identical to SEQ ID NO: 46739

SEQ ID NO: 47703 - DNA, 594 bp, Streptococcus pneumoniae; identical to SEQ ID NO: 46740

SEQ ID NO: 47704 - DNA, 3324 bp, Streptococcus pneumoniae; identical to SEQ ID NO: 46741

SEQ ID NO: 47705 - DNA, 1221 bp, Streptococcus pneumoniae; identical to SEQ ID NO: 46742

SEQ ID NO: 47706 - DNA, 1461 bp, Mycobacterium abscessus; identical to SEQ ID NO: 42933

SEQ ID NO: 47707 - DNA, 750 bp, Mycobacterium abscessus; identical to SEQ ID NO: 42934

SEQ ID NO: 47708 - DNA, 3348 bp, Mycobacterium abscessus; identical to SEQ ID NO: 42935

SEQ ID NO: 47709 - DNA, 1470 bp, Xanthomonas campestris pv. campestris
atgaagcatcaggcacggattgccggctaccgccacttgcgcgaccagccggcgtggaaattgctcgccgccgatcacgcaccggagctgatcggcctgctgcagaccctgttgatggacggcgaacgccggctgccatcggcggtgctgcatgcgcgcctgcagcgccagctggatgccttgcgcggcgacgaactctcccgcgagctgccgcgcaccgcgcaggcctacctggcgcactggctggcgcagggctggctggaacgccgcctgcccgaaggcgcggccgaagaagaatacgaactctcgcgtgccgctacccaggccatccgtttcatcgccggcctgcgcgagagcggcagcagcgccaccgaaagccggctgtcgctggtgatccagcagctggtgcaactggccggccagaccgaagccgacccggacgcgcgcctggccgcgctgcgcgcagagcgcgagcgcatcgatgccgagatcgagcgggtggccgccggccgcgtcggcgcgctggacggcaagcgcgcgctggaacgcacccgcgacctgatccatctgtccgatgaactggccgaagatttccatcgcgtgcgcgatgacttcgaacaactcaaccggcaatttcgcgaacgcatcatcgacgacgaaggcgcgcgcggcgatgtgctggagcagttgttcaacggcgtggacgtgattgccgacagcgaggccggacgcacctttgaggcgttctggagtctgctcaacgacacccagcagagcagccagctcgatcaggcactggatgcgctgctggcacgcggtttcgcccgcaagcttgaccgccgcgaacgcgccttcctgcgcgggctcaccggcaccttgctggagcgcggcggcgaggtgcacacggtgatgcagcacttcgcgcgcagcctgcgcgggttcgtgcagagccgcgggtatctggaacagcgccggctcaaccaattgctcaagcaggcacagggcgaagccttgcacctgcgcgagagcctgcacgccaccaccgccaccggctacacgcaggcattgagcggcagccgcctgcgctcgttgtcgcagtggcgcctgcacgacccgcggctcacccaggtcgatggccgcgtgtacgcagccgacgcggcagagatctcgctggacagcgtgggcgatttggtcgcgcaatcggagatcgacgtgcgcagcctgcgccgcgatctgcacgcgctgctgggcgagcacccgcggctcaccatcggcgatgcgttgcagcagcggccggcggtgcaggggctgggcagcgtgatcggctatctgtcgctgggcacgcgccacggcctggtgatcgatggccacatggaaacggtgcaatgggaaggcggcgacggcacgttgcggcgcgcgcgcattcccttggtgtggtttacccgggagaaacgcaatgaactggtctga

SEQ ID NO: 47710 - DNA, 708 bp, Xanthomonas campestris pv. campestris
atgaactggtctgagcaggcagcgctggacacgcacgacgacgatgacgccgacgcacacgccagctcgctgaggctgccggccagcgatgccgccagcgtcgcgcagggcggcgcgttgttcctcggcgacaccggtacgctgccattcgatgcgcgccgcgcgctgtgccagctgttggccggccccagcatcgacgcgcagcggcacggcggtttgtggcctgcgctgctacgcaacgaggtggcagtgcgccaggtgctgtgcgaactgtttctggagctggtgctggaccgcgaaggcggagtggcgttcacccgccaggccgacaccgccgagctggaatcgcccaccttgctgcgcagcgcgccgctgaccttcatcgagtcggtgctgctgctgttcctgcgtcagcaactggccgaagccgatacgcgcggcgagcgcgcggtggtggacgaggcgcagttggtggaggcgttgtcggtgtacgaaaagaacgtgtccaccgacagggccgggtttacgcggcgggtgatgacggccatcggcaagatgcgcgagaaccagttgctgtcgcggttgcgcggcagcgaggagcgttacgaggtatcgccggtgttgaagttgttgttctcggccgaggatgtgcaggcattggtggtggcgtatcgggagttgcgcgagggggaggttgctgcggattga

SEQ ID NO: 47711 - DNA, 4014 bp, Xanthomonas campestris pv. campestris
atgaattcccagtccaacctgtcgccggcgtcgccgggtgcttccttgtttgccgagacgctggctgagcagcgtgcgcagcagtttcgtatgcggcgtttgcaggtacacaactggggcacgttcaacgggttgaccgaggtgccgatcgcggagaagggcttcctgttcgtggggcggtccgggtctggcaagtcgacgttgctggatgcgatgtcggcattgctgacgccaccgagcatcgtggacttcaacgcagccgcgcgcgaggccgagcgcagtgggcgcgaccgtagcctggtgtcgtatgtgcgcggtgcctgggccgatcagcaggacagcgcgtccggtgagatcgccacgcagtacctgcgcaagggcgcgacctggacggcgttggtattggagtaccgcaacgcgcaaggcgaggcggtgagcctggtgcggctgttctggatcgccggcagcggcaatgctgcggcggatgtgcggcggcattacatggtggtgccgcgcgcgttcgatgtggccagcgagctggagggtttcgatctggatctgcgcaagctcaaggcgcggctgggcgaggacgtggcgcatttcgacggtttcgccggctatgcagagcgcttccggcatgcgttgggcatcggcaacgacatggcactgcggctgctgcacaagacccagtcagcgaagaacctcggcgatctcaacgccttcctgcgtggcttcatgctcgatgagccgcgcaccttcgaagcggcagaccggctggtcgaagacttcgccgagctcgatggtgcgcaccatgcagtggtcaccgcgcgacggcaggtggaaacgctcagcccggcgcgcgagcaccatgccgcgctgatggccttgcgccgcagcgttggcgaattgcgtgaattgcagctgggcgtggacagctaccgcgagcaacaacggctggccttgctggaggcgcgcctgcaggaggtcgacagccaggaccgcggcctggccggcgaagaaggccagcgccgtgagtcgttggacaaccacgaacagaaactggccgggctggagcgcgaacagcgcgccgccggcggtgagcagatcgaagaactcgaacgcgagcgcgtgcgggtggaacgcgagcgcgatgagcgcctgcgtcgccgtgcgcagatcgagcaggcctgccgccagctcggcaccgccttggcggccggcgccagtgggttcgccgcccaggtggcgcatgcgcagggagtgctcgatggcggcaagcagcacgccagcacactggacgaggccatcgccgagcgcatgggtgaacgccgcgacgatgagcgccgctttgccgagatccgtgcagaactggacgcgctaaagaaagcgccgtcgagcatgcccgcaccgatgcaggcgctgcgcgcgcggctgtgcgacgacaccggcattgccgaatccgcgctgcccttcgtcggcgagctgttgcaggtgcgcgaggaccaggtggcctggcgtggcgcgatcgagcgcgtgctgcacggctttgcgcagtcgctgctggtggacgagcggcattacgcgcaggtcagcgaatgggtcaaccgcacctacatcggcacgcggctggtgtacttccgcgtgcgccgcaatgacgagctgcattcgcgccgtgtcgatcccaacgcactgcccggcaagctgcaactgcgcgagcatgccttcaccgagtggctgcgcaacgagctcacccgtcgcttcgattacgcctgcgtggacaacgccgcagcgctgcgcaatgccgaccgcgccatcacccgcgaagggcaggtcaagcatcccggcgaccgctacgaaaaggacgaccgccacgccgtcaacgaccgcaagcgctggctgctcggtcacgacaaccgcgacaagctcaaggtcttcgagcgcgaagcgcaggcgctggcccagcgcattgccagctgcgatgccgacgtggctgcgctgcgcaagcaacgcgagcaggaccaggaaaaacggctggccgcgcacaccctggtggagcgcgactgggacgagatcgacgtcggccccaagctgcaacgcctgagcgatatcgatgaacaactgcagcaactgcgcgaaggcgatagcggcctgcgcgcactgggccaggcgatcgacaccgcgcgcacgctgcgcgatcaggccaagcgcacgtatgaagacgtacggcttgagcgcgcgcagctggcacgcgagcgcgtgcggctggaacagcagcaggccgcctgcgccgggcgcgctggaaccgctgcgctcacacccacgcagttgcagggcctgcaggagcgcctggccgcgttggcaccgctgtcgttagacaatctggaagcgcatttccgcgtggtcgaacgtggcttggccgagcaactggccgaaagccagggccgcgacagccggctcagtgcgcagctgctcgaatgcttccgccggtactgccagcagtggccggaagacagcggcgacttcaccgtgagcctggccagcgccgacgatttcctcgcgcggctggaccggctggaaagcgatggcttgccgcgtcacgagcaccgcttcttcgacctgctgcagacccagagcaagaacaatctgcttgccttgcagcgccacactgccgaagcccacaagggcatcaagcagcgcatggacgaggtcaacgccagcctggagcaggtgccgttcaaccgcgacaccatcctgaccatcgaggtgagcgaccgccgtctggccgaggtgcaggaattccagcagcagctacgcgccgtgttgtcgcatcagcagaccgaagaccgcgcgctggccgaagcgcagttcgccaccttgcgcacgctggtggcgcggcttggcgcgcaggagccggaggcgcggcgctggcgcgagcaggtgctggatgtgcgcctgcatgtggaattcatcggcgtggagctggatgcacagagccgcgcgcaggtggagatctaccgcagtggcgccggcaagtccggcggccagcgccagaagctggccaccacctgcctggcggccgcgctgcggtatcagctgggtggcgaagacggcgagttgccgcgctattgcgccgtggtgctggacgaagcctttgacaaggccgacaacgaattcaccgcgctggcgatgaacatcttcgagaatttcggcttccagatggtggtggccacgccgctgaagtcggtgatgacgctggagcctttcatcggcggtgcgtgtttcgtggaaatcagcggccgccacaattccggcgtgttgttgatcgagtacgacgaacaggcgcagcgcttgaaactgccggagcgctcgcgtggggaagacgcggcggtgccggccgaacagggtggcgctgttgcaccaggcgagcgcgcagaacgtgctccggtgatcgctgtggagtctggtcacccggcaagcgtgcacctagcggagagcacggcagtgcctgcgcagggcgatgcagtcacggacgggcagtcgcgcggcagcaagcgcacacgcgcggcggccaccgcgtcgacggcggcgccagtgcctgcgcccgctggcaagcgcagcacgtctgcagctgcaacatcagcgacggccgcgccagccacgcgcacggcggacgcgtcgaacgcacggcgcaaacaggctgcaacccctgacacgccaccgaagccaaccaagccggcgagcacgcgaactgggtcctccggcaagcccgctgccaagcgcacaaccaccgcgaaagccgcggccgtgccgaaggcctccaacgccacgccggccgtcgcggccaagcgcacgggcaaagcgccgaaagacgttagcaagccagcatcagctcagaaggtggccaagccggtatcgaggtccaagcccacggccaagcccgcgacggcggcttccgccacgagccgcgctgcgtccacacgcggctctgctcccaaggcgcgcagcaaacgctga

SEQ ID NO: 47712 - DNA, 1434 bp, Alicyclobacillus ferrooxydans
atgcaaaacctgttcgacgtcgtatccccgaacctcttttctatcctggcagcaccgaaccgagtcatctatttccgggcgctcatggtgctgcggaggtgttaccaacgagagctgacgattcataggtcggcccttgtgacgtatctcgtcagtgagatggagcgcgatctctacgattttacagacgaagacgccctcgttgaggcgggggaagaggcgtcggaggagaccgactttggctccctgtccgggcgggcgcatgccttgattcggcgctttatcgagacggggtggttgcagccatcgacggacgccgttgaactcgatgaaacactgattgttccgccgtacgccagtacccttctcgatgcgtttcagagcattgtcgatccggtccaacaacgctacaacggctttgtctacagtgtctattccaacctgcgcacagcgaatgatgatcgagatgagttcatgttccagggcctcgaggcagcgtacgagaataccatttcactgcgggagagtcttaggtcactcttacataatatccgctcctactaccaaaacctccatcaccgtcaggagattcgtgagctcctggctgaacactttgacagctaccagttatcggtagcgattgcggcctatcatcccttaaagacctttgacagtgtgtaccggtttcggccccggatccttgaggtcttgcggaactggttgaccatgccctccttgctgacccagatggcgaaatctatcaggcagcagcgtagcgatctcgatgagtccgcggcgcggggtgaggtggtgcagcggatcacctttatcaccgacacctttgagtctctcgatgacctgttaaaggaaattgataagcgtcacacgagctacaaccgagcctctgtggagcggctgcagtacctgctgaacacagacagggacatcaaagggaagctcgtccaactgatgcgtgcactgcctaaggcgcaagacagctcgacctctcgtttattggaagagatgcggacgttgcccgtctatcaggtgaagtacctcgacccggaggccctttacaccgaacccaagaagcgtgtgcgcggtacaccgcagcccatcgtgcggcaaaagactgatgacgccctgtttcgtgccgaggcgcgtgagctgatggagcgaatgaatgcgctctattcacagaagcagattggtgagtttattctcaagcaaatgaaagaccgcgagcgcctcgactcaggggagatgacccttcaggaatttgacgactttctgcgcgtgattgtcgccgtcgtcaagggtgatgagccagagatgccgtatgacatcgtttggagcgaagacaggtcgagtgtgacggtagcaggataccagattccactgatgacgtttgtgaagaagggggccgcaagatga

SEQ ID NO: 47713 - DNA, 816 bp, Alicyclobacillus ferrooxydans
atgagtggggacgagcagtacacaaccttaacagaacgggacaaggaggacttctctcgtctcgtgagcctcctctatgaacaaacgtttctcgtgcgagatgtctgggatctgaaggagcaccgcatgacaggcaaccgcgattaccggtttgctgagcgaaacatggcccttttgaagggatacctctcggtcagcgggttcgagattcaagtcgacggacgccgcggcgtgatagccatctataacaagcacaaccgcaatcgcatgaaggtggacaagtttaccacatatatgctgtacgccctgcggctggtctacgaggaacagatggaaacagcatccatgcgccgtgaagtcgtggtgccgctgcgggagattatcggcaaactctataccatcggggtgatggataagcgcattgcgctgacccatctccaatccaccctcaaccgcctccggaagctgtccatcatcgcgcgggtggaaggcaccagtcaggacatggaaagccggtggatgatttaccccaccatcaccatcgccgtgtcggatgaccgcattaacgacctatacgcgcggctcatctccggagagctgaaaggcggcgtctttgacgaggatgagcagagcgggacaggcacggacaacggcggggcggatgagaacggagacggcggcctggcagacgacggggctgaagatgatggaacggacgacgatgagacgaacctggcagcggacgacttggtagaggatgacttggaagaggatgacttggaagaggatgacttggaagaggaggagaccgaatga

SEQ ID NO: 47714 - DNA, 3570 bp, Alicyclobacillus ferrooxydans
atgaagctcttacggcgagcgctgcttgtgaaatggcactacattgaacacgagctgattgactttgcgccggtgacgttcctgacaggaaagaatgcggcaggtaagtcaactatcctcgacgcgttgcaactggttctccttggcgacacgacgggtcacttctttaacaaggcagcgaatgacagctcaaggcggaccttgaaaggatacctgcgcggtgaggtggccgaagacgaaggtgtcggggtcatcaacctgcgggacggtcagttttcctcttacatcgtgctcgagttcgcagatgaacgaggacacaagccgttctgtatgggcgttgtgtttgactgttcaccggacggatcggttgaatggcggtttttctcgctggcagagggcatccccgacttccactttatccgcgatggtgtgccgcttgacatcaaaggattacggtcctggggacagacgcgcaaaaaccgctttgagatgtttgagagcaacaaacggtaccaggaagtctttctcgcgcgcatgggaaacatcaaccagaagttcctgcggctgttccggaaggcggtgccgttctcgcccattatggacatcgccggcttcatctcggagttcgtctgtgacgtgaaggtccatctcgacatcgatgacatgcgcgagaacattcgtcactaccgtcggatggaggaagaactgcacggcgtcgagtcacgcgtcgaggccttacgtgagatggatggcacctacgatgccatggaatctgcagcggataaggtcaagctctatgaatacctgctcgacagggcagagttgaccgccaaggagcaaagcgtggcggccgcgaagacgcaggctgacgaacttgagtcggaaacgaagcggatcgacgggcagatttccgtccacacagacacacagaaccaggttcgggcagagcgggatgcgctggtcgaggagcgggccaactcggacgcctatcagcgccagcagatgctcgagcaaaacaaacggctcctcgagagtgagttcagccatatgcggcgggatggggagcggcacgataggatgctggcagacaacggtgagcgctggcgtgccgtttcccgcagtctcggggaaacggacatctggtggacagacctagcgggacgcgacggcacagggcatggggccgcggagcggacctcggcgggtggcatggggtatgctacggcgggcggtagggcggatgctgctacggctggcacggccaatgctacggcgggcggcaccacggatgctgctacggctggcacgaccgatgccggcttcgccaaggcggatacgccggagtggaaactggcgcaatcggcacccttgtacaatgatgccattcgcgccattaacgagggtctgtcaaagtggtcgcgaccggccggttggcagtcgcaccggctgctcgatgaggagttagcagtttcgacggacctcgatgcccttcgtggttcagccgatgccctgaaacaggcctctgagctgcttcgtgaaggccacgtgattatgcgtgatgccatcggatcgtgggaagaagaatcgaagtccctcgagcgggccatcagtgagctgaaacggggcattaagcagtacgatccgaaggtgctgaccctgaaacaggcgcttgaacaagggttgtctgcggacgtcaacatctttgccgaactgctcgacattcgcgatcctatgtggcaaaaggcgattgaagggtacctgcatacacaacgattctatctgctggttccaccagaggcgttttcgcaggccttgcgcatctacgacgacacaaagcagtcccagcggctgtttgacgtcggcctggtcgacatcgcgaagatcatggaggagaagccgagggcgatgagcggatcgctcgcagaggaagtcatcacagataacccttatgcacgcgcgtatgccgactatctgctcgggcacgtgatgaagtgccatcatgtggatgaacttcgcaaccaccgcacgagcatcacaaaggacggcatgctgtatcagaactatgtggcgagacagatcaatccggcccgttatgcgacactctacatcgggaagatggcgattcagcatcagctggcgcaaaagagccttcggttcgaccgggtgcagaccttgttgcatgctttccggccacgtctggcgcaagtggcagagtgggcggcgcagccgtacccaacctcatccgatctgaccgccgcagaagagttcctccaggtgctgacaggacttccgaagctgcgggcggattacaaggccatcctcgacgacatgggacgcctcgactttacccggttggacgagatcaagaaggagattgcccgctgtgacgcggtgttggctgatgtggcccaccagattcgcgagctgaccagcaggcagggagccctcaagggacagcgagatcgactggtggagcaggacatcccacatctcgaggcggaggcgagggataagaagcatgccatctcctcccgttacaatccacttgaggcagccgacatgagtggccgctatgagcaagagttgcagcgccttggcgcacccgaaaccgtcacggccaactttgggcgtcagctctcgacggagagaaaccgggtcatcgaatcgtgggacaagctggtccgccagcgagagacgtacaaccggacctttggggctgggtttgacatccagcgccgggacaacgatgcctacagggcggagttgacggcattagagcagtcggggctgacggactacgccgcccagattaaagacgccaaggaacgggcgcagattcagttccaggaagacttcatcaacaaactgcgcagcaacattgacacggtcgagcagcagattaaggcgctcaacttcgctttgcgggaagtctccttcggcggccgggagcgctatcagttcaaggtctccccgaacgcacagtatcagccgttttacaccatgatcatggacgacatgctgcttgaggggcgcagtctcttttcggacgcctttatggacaagcatggcgcggtgattgacgagttgttccggcagattgtcgatgttgacgagcgtgaccctgccgtccaagccgaactcgagaaaaacctgcagacctttaccgattaccgcacctatttggatttcgatctcgttgtcaaagacgaagaaggccgcgaatcgagactgtctcgggtgattgcgaagaagtcaggcggcgagacgcagacgccattttacatcgctgtgttggcatcgtttgcgcagacctatcggatcaaccaacccgggtttaacaacaccctccgcttgatgatgtttgatgaggcgtacagcaagatggaccatcagcggattcgagacagcatcaaactcgtccgcgacatgggactgcaggtcattttgtcggcgccgacggagaagattgccgacatcgtgcccctggtcgacaagaccattgtcgtgcagcggattaagtcgcagacccgtgtggccccatttgaaccggacccggtgggggtgaactga

SEQ ID NO: 47715 - DNA, 1563 bp, Alicyclobacillus ferrooxydans
gtgggcggagttggcagggacgtgaagactggcatgggcggagagtcactggcacgaggcgtcttgtccgcgctcctcgacaagtacgagaacagcgaggccttccgcaaaggagagcctacgcaggcacgcatccaactgcggtttacggattcactcgtgccagggtacgcaagtggccggctcgatcccgatgatcggtctgccctccacactgccctggtgaccatggctgacggcggttttatcgacctgaagtgggtgaagttcgaagagggtaacatcctcgagcgggtgtatttgaagtgggagcagattaacgatatctatgagtaccttggtcgcacatcccagcgccagaaattgtccgcgttcacggtggagatggagcagtggctgagaggtctggtgggcgtgggactggtggacagcggcctgcttggagaaggcgcgggcggcaaagtccgacttggagcaggcgaggccctgctggatgagggtctggctcccgggggcgagggcatgcctaacggcagtttgccggaggcgtggcgcttcttactgaattgggcggacgatatactttcgtttgtccatgaacgcggacgcattccaagcagcctgattcccgatgaggacgggacccgagcgttgctccttcgggccttggcaggtttggttcgggcgcgagggcaatcgctgccggttcgcctgttctcaaaacgggaacttgggaacagcaaggtgtttgaaaggcaggttcaaagccatgtgattcgactggttcgccgctattggtctatcggacatccactcgacgtcgaagccccggacgataacgcgaccctcctgcgcgagcttggcatcgagtccggacacgaggacatcacgttctgtggaccaattcggtttcgctaccagggaactgtggcggcagaggatattgacgcgagtgtctttccatacggactggctatcgacgccagcgatgtgcatcgaattgcaatcacagaagcatccatctcgcgcattttaaccattgaaaacaaagcaaactaccgtgcttacgtgcgtggccatcgtcaatcagacgagctagtcgtctatcttggtggattcgcgagtccagcacagagggcgttcctacggttgctgcgaaatttcttgcgggggacggcaagcgaggtgggcgaaaagtcggccacttcagacatggcgagtatacgtgagttagataaggctggattggacaaaggcgtgtccagagcggatgtgagtgaccagcctacggtttttcatcactggggagatctggactacggtggcattctgattctgcaaaacttgcggaatagctgctggccagaggccatgccctggcgcatggaaccagaggtactcgatgaatacatagattacgcagaaccgatagatgatgcttaccgtaccaaacttacgcgtctcctcgaatccgatgtctacgcctgggcgcatcctttgatacaacggattctgacgcttggtgcaacgttggagcaggaggcattgttgctgggtgattga

SEQ ID NO: 47716 - DNA, 1524 bp, Pseudomonas coronafaciens pv. oryzae; identical to SEQ ID NO: 47570

SEQ ID NO: 47717 - DNA, 798 bp, Pseudomonas coronafaciens pv. oryzae
atgaatcgtgaagaccaaaacaacgatgctttggcaccgtcgctcttcgacacttaccgccaagtggcagtcactgccctggccgagacaggacaccgggaagaaggactggcaaagcaggaggagcccggcgaacttgacgaagtggccgtccaacctgaatcacaggttgtctacgacatcatgccagcggaggctcgtcgggccctgaggctgctattgaacacgggtgttgtgcgggcggaaaagaaacgcttggcttttgaagcgctctgccagcaccgagcactcatcgccgctcatttggccaacatgttgctgtgtatgacgctagaccagaaagcaggcattgctatccttctcgagcaggacttgagcgaatccgggttcgaggatctgacagacgaggatggctcaagcctagttggaaaacgcactatgccgctttacgacaccctggtgctgctggtgttgcgcaagtactaccaggagcgggaagtcattggtgagaacaaggtgatgatcgatgtcgacaccatcgccgaactcatgacccctttcttgaagctcaccaacagcagcgctcttgagcgcaagaccctcaatggctctatagctaagctgcgcgaaaagcgcctgctggcgaatgtgcgcggcgacggtgagcgattggaaatcaccccggtcattcggtacgtggtcaatgccgacttcctgaataccctgttaagcgagtaccagctgctggccgaacgggggagtgtgatgggtcaacaggaggtagaagacgatgtctga

SEQ ID NO: 47718 - DNA, 1197 bp, Pseudomonas coronafaciens pv. oryzae; identical to SEQ ID NO: 47573

SEQ ID NO: 47719 - DNA, 1470 bp, Xanthomonas axonopodis pv. dieffenbachiae
atgaagcaccaggcacgtatcgccggttatcggcaactgcgcgagcagccggtatggaaactgctcgccgccgaccacgcacccgaactgatcggcctgctgcagacggtgctgatggatggcgaacgccgcctgccttcggccgtgttgcacgaacgtttgcagcgccagctcgacgccttgcgcgccgacgagctctcgcgcgaactgccgcgcaccgcacaggcatatctggcgcattggttggcacagggctggctggaacgccgcctgcctgaaggcgcagccgaagaagaatacgaactctcgcgtgccgcgacccaggccatccgcttcatcgccggcctgcgcgaaagcagcagcagcgccaccgaaagccgcctgtcgctggtgatccagcaactggtgcagctggccggacagaccgaggccgatccagagctccggctggccgcgctgcgcgatgaacgtgcgcgcatcgatgccgaaatcgaacgcgtggcctccggccgcgtggcggcgctggacggcaaacgcgcgctggaacgcgcgcgcgacctgatccatctctctgacgagctggccgaagatttccaccgcgtgcgcgacgacttcgagcagctcaaccgccaattccgcgagcgcatcatcgacgacgaaggcgcgcgcggcgacgtgctcgaacaattgttcaacggcgtggatgtgattgcagacagcgaagccgggcgcaccttcgaggcgttctggagtctgctcaacgacacccagcaaagcagccagctcgaccaggcgctggatgcgctgcttgcccgtgggtttgcccgcaagctcgatcgccgcgaacgcgccttcttgcgcgggctgaccggcacgctgctggaacgcggcggcgaggtgcacacggtgatgcagcatttcgcgcgcagcctgcgcgggttcgtgcaaagccgtgggtatctggaacagcgccggctcaatcaattgctcaagcaggcgcagggcgaagccttgcaattgcgcgacagcctccacgccaccaccgccaccggctatacgcaggcactcagcagcagccgcctgcgctcgctgtcgcaatggcggctgcacgatccacggctcacccaggtcgatggacgcgtgcaggccgccgacgcggccgagatctcgctggacagcgtgggcgatctggtcgcgcaatcggagatcgatgtacgcagcctgcgcaacgacctgcatgagctgctcggccaacgcccgcggctgaccatcggcgacgccttgcaacaacgcccggccgtgcagggcctgggcagcgtgatcggatacctgtcgctgggcacgcgccacggcatggtgatcgaaggacagatggaaacggtgcaatgggaaggcagcgacggcgccgtgcggcgcgcgcgcattcccttggtgtggtttacccgggagaaacgcaatgaactggtctga

SEQ ID NO: 47720 - DNA, 702 bp, Xanthomonas axonopodis pv. dieffenbachiae
atgaactggtctgaggacgccggcccggacgccgacgagagcaccgcggtgtcggccatcgacgaccgcatgccgatgacgcaagcctccagtgccgagccgcgcggcgagctgtttttaggcgacaccggcacgctgccgttcgacgcgcggcgtgcgctgtgccagttgctggcagggcccagcatcgatgcgcaacggcacggcgcgctgtggccggcgttgttgcgcaacgaggtggcgatccgccaggtgctgtgcgagctgtttctggagctggtgctcgaccgcgagggcggggtggccttcacccgccaggccgacaccgccgagctcgaatcgcccaccttgctgcgcagcgcgccgctgacgttcatcgagtcggtgttgctgctgttcctgcgccagcaactggccgaggccgatacgcgcggcgagcgtgcggtggtggacgaagcgcagttggtggaggcgttgtcggtctacgagaagaacgtgtccaccgatcgggcgggcttcgcgcggcgggtgatgacggccatcggcaagatgcgcgacaaccagttgctgtcgcgcttgcgcggcagcgaggagcgctatgaagtctcgccggtgctgaagctgttgttctcggcagaggatgtgcaggccttggtggtcgcgtatcgcggtttgcgggaaggggatgtagctgctgagtaa

SEQ ID NO: 47721 - DNA, 4029 bp, Xanthomonas axonopodis pv. dieffenbachiae
atgaattcccagtccaatctgtcgccagcgcaaccaggtgcctccttgtttgccgagacgctcgccgagcaacgtgcgcagcagttccgcatgcggcgcttgcaggtgcacaactggggcaccttcaacgggctgaccgaagtgccgatcgcggagaagggcttcctgtttgtcgggcgttcgggctcgggcaagtccaccttgctggatgcgatgtcggcactgctgacgccgccgagcatcgtcgacttcaacgccgccgcgcgcgaagccgagcgcagtgggcgcgatcggagtctggtgtcgtatgtgcgcggtgcgtgggccgatcagcaggacagcgcgtccggcgaaatcgctacccaatacctgcgcaagggcgccacctggaccgcgctggtgctggaatacgcaaatgcgcacggcgaggcggtgagcctgatccgcttgttctggatcgccggcagcggtaacgcggcggccgatgtgcggcgtcactacatggtcgcgccacgccgtttcgacgtggcgaccgagctggatggcttcgatcttgacctgcgcaagctcaaggcgcgattgggtgaggacgttgcgcatttcgacggcttcgccggctacgccgaacgtttccggcacgcgctgggcatcggcaacgagatggcgctgcggctgttgcacaagacccagtcggccaagaacctgggcgatctcaatgcgtttctgcgcggcttcatgctggacgagccgcgtaccttcgaagcggccgaccggctggtggaagattttgccgaactcgatggcgcgcaccatgcggtggtcaccgcccggcgccaggtggaaaccctgacccctgcgcgcgagcaccacgcggcgctgatggcgctgcgccacagcgtcggcgagttgcgcgagctgcagctgggcgtggacagctaccgcgagcagcagcggctggccttgctggaggagcggctgcaggagctcgacaaccaggaccgtggactggccggcgaagaaggccagcgccgcgaatcgctggataaccacgaacaaaaactggtcggcctggagcgcgaacagcgcgccgccggtggcgagcagatcgaggaactggaacgcgaacgcgcacgcgtcgagcgcgagcgcgacgaacgcctacgccgccgtgcacagatcgaacaggcctgccgccagctcggcaccgccctggcggccggcgccagtggctttgccgcacagatcgcgcatgcgcagaccgtgctggataacggcaagcatgacgccagcgcgctggatgaggccatcgccgaacgcatgggcgcgcggcgcgacgacgagcgccggtttgccgaaatccgtgccgaactggatgcgctgaagcgcgcgccatcgagcatgcccgcaccgatgcaggccctgcgcgcgcgcttgtgcgaagacaccggcattgccgaggccgcgctgccgttcgttggcgagctggtgcaggtgcgcgaggaccagacggcctggcgcggtgcgatcgagcgtgtgctgcacggctttgcgcaatcgctgctggtggacgagcggcattacgcgcaggtcagcgaatgggtcaaccgcacccatatcggtacgcgtctggtgtacttccgtgtgcgccgcaacgacgagctgcattcgcggcgggtcgatcccggcgcgctgcccggcaagctgcagctgcgcgagcacgcctttaccgaatggctgcgcaacgaactgacccgtcgcttcgactacgcgtgcgtggacaatgccgcagcattgcgcaacgccgaccgcgcgatcacccgcgagggccaggtcaagcatcctggcgatcgctatgagaaggacgaccgccacgcggtcaacgatcgcaagcgttggctgctcggtcacgacaaccgcgacaagctcaaggtgttcgagcgcgaagcgcaggcgctggcccagcgcatcgccagctgcgatgccgatgtggcagcgctgcgcaagcagcgtgagcaggaccaggaacgccaactcgctgcgcacaccttggtggagcgcgactgggacgagatcgacgtcggccccaagctgcagcgcctgagcgatatcgacgaacaattggtgcagctgcgcgaaggcaacagcggcctgcgcgtgctcggccaggccatcgagaccgcacggaccctgcgcgaccaggccaagcgcacctatgaagatgtgcggctggagcgcgcgcaactggcgcgcgaacgcgtgcggctcgaacagcagcacgcggcctgcgcgggccgcgccggttccgccacgctcacgcccacccagttgcagggcttgcgggaacggcttgccgcattgacgccgctgtcgctggacaatctggaagcgcatttccgcgtggtcgaacgtggcctggccgagcagttggccgacagccagggccgcgacagccggctcagcgcgcagttgctggaatgcttccgcaagtattgccagcagtggcccgaagacagcggcgatttcaccgtgagccttgccagcgccgacgatttcctcgcgcgtctggaccggctggaaagcgatggcctgccgcgtcacgagcatcgtttcttcgacctgttgcagacccagagcaagaacaacctgctggccttgcagcgttacaccgccgaagcccacaagggcatcaagcagcgcatggacgaggtcaacgccagcctggagcaggtgccgttcaatcgcgacaccgtgctgaccatcgaggtcggcgaccgtcgcctggccgaggtgcaggaattccagcagcagttgcgcgcggtgctgtcgcatcaacagaccgaagaccgcgccctggccgaagcgcagttttccaccttgcgtgcgctggtggcgcgcctgggcgcgcaggaaccggaggcacgccgctggcgcgaacaggtgctggatgtgcgcctgcatgtggagttcatcggtgtggaactggacgcgcagacgcgcgcgcaggtggagatctaccgcagcggcgccggtaagtccggcggtcagcgccagaaactggcaaccacctgcctggcggccgcgctgcgctaccagcttggcggcgaagacggcgaactgccgcgctactgcgcggtggtgctggacgaagccttcgacaaggccgacaacgaattcaccgcgctggcgatgaacatcttcgagaacttcggcttccagatggtggtggccacgccgttgaagtcggtgatgaccttggagcccttcatcggcggcgcatgctttgtcgaaatcagcggccgccataactccggcgtgttgctgatcgaatacgacgagcaggcacagcgattgaagctgccggagcgctcgcgtggcgatgagccggcagctgccgatgctgctggcgcagcgccgtcgatcgcggcgttgagcgagcctgcaggagtgcagggcgctgccagcgcagatggcatggcagccgacggcgtgccgatgcgcacggcatcgcctgcggcgggggagacctcgtccgcggcgccggaaacgcagactagtcagcgcaagccggccgtcgcgaccgcgaacaagcagaacaaggccgccaagaacgccaggactgcatcttccacgcgcgctgcggcacagtctcgcgcaacgcagaccaagaaaccgacttcgcgcacgccagctgtggccaacatgccggcatccggcaaacgcacggcggacgcgtcggcggtgtcttcaggagccaggtccaacgtgggcaagaccactccgtcttcaaacacgccgggcaagccgattgcggccgcaaacgcatccaacgccacatccaggaaggtcgccgctgcatctgcgccagtgaaaaacactgccgcagccaagccacgtgcaacagctgcatcgactggtcagccagcgcgtggtgccggcaagacatcttcatcacgtgcggcagcgaaaccgtcgccggccaaaaagcgtgccgctaaggcgaacgccccgcaggcgcgcggcaagcgctga

SEQ ID NO: 47722 - DNA, 1419 bp, Vibrio metoecus
atgttttttgatcatatcaatacagaccttttcaggccgttagtttctaagaatgctcgtttatatggtacgggccttatggctatatatgattccctagtcaaccagtacattgaaggtgaatgtacgccgaaacaagctaggcaggttatatacaatgctctttcttctggtaaccagaatgtcgagtgggtttatgaagcggaagatgagggtgaagaaattctggatcatacatccatggctgctcagatctactcagtactgaagaaaaccggctggattattgagatggatgacgtgggttaccgccggatagtgtatataccacaacagtcttctcgcttgctacaagctatcaaaagtgttagcgatagacgtgacttttcgataggcgctacctttcagggggtatatggagctttgttatccgtagaaaaaaatcctgttgaatacagcgcccaaataatctttgcatcaaaagtaacccgtgagctcagtaatgagcttaagtctgttgcagcaagtgcccgagaagtgacacacaagatgcgtgaacaaagtgttgatgctcatttgtttcaaaccttttttgatgagttcttgactgagtgtcttggcagttttgaccatatcaagattaatagtcatccgaatcgataccgatctgaaactctttcggttgttacacgcctcctcaacgatgaagaaaaacttgaccagatctcggtaaaattagccagagagaatagtcatatagattacagacatcagaagcagctagtcataaatgatctaaatgaaatattcagggtttttagcggcatccctagattgatggatattattgagcgttatagaagcgtcacaattcggcgtacccgagaagctatgcagtacagcttccaggctgtgccagagataggcaggaaaatcgaaactgttacgaaggcattagctaactttccattgtgtgaatcaagtatgtttttgccggcacctgtagttcatgaagagtatgtagcaggttataggctaacgtcaccgcgtaagcctaaacctgaagcacaaccgacaaagcagataattaaaacagtaaataattgggatatcgcatacggtcgagtttatgacgagtatttaactcgcagaacagatcagccacaacggcttgaagactacatattaagagagcttggcgacaaatcatcaataaccacttgtgagatgtctattgatggcctagaggatctattggcatttttacagttaagagagttgctacataacagtgttccaattgatagcccatttgagcaattgtctaagacatataaggtttctcgcgtagaaggtgtgacaacagataacgaatacattactgccccatcactacgagtggaacggttttgcgactaa

SEQ ID NO: 47723 - DNA, 657 bp, Vibrio metoecus
atgcttaaagagttaggacatctagttgacaaatacgagagcagaaaaatttcggaggacgaccttataggcgcagccgcagaactgcgtgccaagcaattcatatggcagtcaggacatggtcaagggcggtattatgagattttgcgccaccaggattttcgagagtattttgaaaacttgtttggtgcatttggtgatactttctttgtcgatgaacaatatgcttattgtggcattatccctaaaaaaagcactccagccctcaaacttaacgagtcttttttcctgcttatattggctaagctccatgatggcgaactacggaaaggatgctgtgatgaaggtcgaacaagtcctagtgaagatttacttcttgatgaatatgagaggctgactggacgtattaagcctaaatcgagtgacactcatgaagcgcttgcgcgattggcgaagtatggagtcattgaattgggtccaaagaacactgaaaccgatatgcgtcaaattactattctcccttcaataatgaaagtggtttctcaatcatatattgaagaaatgctagatttgtgtggagtagatggcgaagtcacgtcatatgatgaagacgttgagtttagttctggtggtggtgaggtatctgaaaatgagtag

SEQ ID NO: 47724 - DNA, 3456 bp, Vibrio metoecus
atgagtaggcattttgataagttggttcgaataacgtttgttaactggtacttattttctgctgaagatattgaagtctcaccgaatagtacattgttccgcgggcaaaatggagtgggaaaaagctcaattctagacggtatacaaacttgtttagccggtgcagatgaacacctgatgtcaatgaatgcggccagtagtaatggtaaacgatcggggcgttctgtgcgatcttatgtattgggagaggttgctgagtcgccaggacattctgccagtgaaccaagggtggaatccaacagctatattgccttaacgtttcaaaaaaagaatgatggcggtttttattcttttggtgtttcgttgcacgccagagagaagcattcagaagtgaccaaaaagtactttgctcttgatggcggtgagatcaaagccgacgactttatgcttgaaagtgaccaagttatcacatggaaaacctttgaacagcgtctcagagcaggaaaaggaacgtacttggctgcaaatagtgctcgcgaataccgtgatatttgctcagatcttatgtctgcacctggtgcatctaatcagatatcttccgtagctatgttccgtgcaatcaagaatggcctaacgttcaaagagcgcgatagtatgtctgaattttgtcgtgactttatattacctcagcaaaatattgatgtagttaggatagaaaacgactacgaaaactttacaagaattcaaaagactattgcagaggcgcttgagcgattgaaagcgcttcgcagtattaacaatttcttaaaacaatacgaaacgaatacgaggaaaatgcgagccttccagtgggctgaacaagaatctctagtcatttcttcagatacgaataaaaatttctgtgaagagcgacttgaacacaaaaatggaaggctccaagatgttttggagcgcttaggggagttagataccaagattccagagcttcagaaaaagcgtgatgaagcgttattgaattatacaagttccgattatgcgagctcagtaaagcaaattgaagaagatatcgaagcccaaaacaaaattaagcgggaaaagataacatcgctttctcgtgcgagaggccttatttctgaattaattaaggagtatgcacctctttacgttgacgaaactttaaagtctcagctcaaccaggcaattgatgccttatgttttgcgtcaggtagcactttgggtatgtttgattctctgtggcctcagtcaaaacaagacatcgaagctgtagaagaggttttattacagttcgaggatattgcttctgatgtcgctgagcagttacttgagctgaaagtagaaagaagaccgcttgacgatgaaattagaaaaaaaggggaagtgcttagtaagctcagcgaaggtcaatctagtttgaaccagtctacgttagcgttagttaaggtattggatgctgaaggcattaattcttcacctgtgtgcgacttggctgaagtcatagacacgtcgtggcaaaaaggaattgaacattttctcggtaacaatcgtgaagcccttgtgattataggccctgatggcggagaagcttcacccgaattgattgagcgcgcaatctctatctatagggtagctaagacgactgactcgcgagttcggcgtgccaaattagtaaaccccgaaaaaataccaacaacacctgaaaatcaagtgcaaggttatgctgctggcttgattaaagccaaccaccctactgcagagcgctacttacatgcccagctaagaaaccttgatttggtagaaaccgagtctgaattacggcaggcaaaacgcgcgattacccgtgacggaatggtagccgcaaacggtaccattggggggggcaataaaattgattttgttttgcttggcgagaaggctcgtaaggatagttctatagtcttatctgaagaaattgaattgctcaaagtcaaactagacaatatcgatcagaaaatacacggactttctttagtctacaatcatttaaataccgttacagatctcaagcgtcagtgtgtagttctatacgatactctggcgagctacgatgaagtttgcgactttatatatgagctgacagaatctttggtgcaactgaaaggttctgaagatagttatttagaaaatacttaccgtgctctcgataagacgttgcaaaacgccaacgaagaaaaagggaatctgaatattcagcatgccaaccttgttcgagacatcaatgaagagaaggaaaggatctctaagtttagagcgataggtcaggaagcaattgataaacggagagagatagaagcacgagaaggacacgaaactgaagagagcatacattgcttagaggtacttcaagaaacctttggtgaagaaaattacgatgaaattattagtgaagctcagtcaaaaacgaaggagcacgctaacagggctcaagacaatttaaactccggaaaatcaaaggctatggcttatgccgtagaatataacgtgcccgaccgtcgtgaatttgatggtctgtcggatacggaactgtatgctcgttgccgggaacatgctgagcgaattgagaagactgatatcgttcgatataaaaatgatgcggatattgtacgcgaaaacatgattaagggtttccgttcagaagttgtagctaagttgaaggataacttccaaaaagtggaaagtactttcaaagacttgaacgatgcactgacgggtattgttttcaacggtaatacttatcaattcaaataccccttggttgaagatcgcactcttaaacaggttcacgcttatgctacgagtactagtgatatagagctggctagtccagatggccttttcgccacacctgaagaccatcctgctatcgagctaattaccaagacgctcgaagaaggtcggcttatggatctatctgattatcgtgctttctacaattacgacttagagtcaacatcaaaggccactggtacaaaacgaggctttagcgaattggtctccaaaggctctggtggagagaaaggaacaccatactatgtcgcactgggtgctgcttttatgacagcgttcaagattaggatttcaggaaaagaggcctttggtggtgcagctattgcaatatttgatgaagcgttttcaaagattgacggaagtaactccaaggcggcgctacagttttttgaggatatagggcttcaggtgattttagccgcaccacctgaaagtgaggcaaaaatcggcccatacgtagaagaaagctataatgtaatccggtcagctgatgcaatgtatttggatccaaagcgatataaggatgcggctaggaagatattgcaaagtgatgacccaagcatcaatccacacttggtggatgaacgtgtagctgaaatggaaggatactaa

SEQ ID NO: 47725 - DNA, 1278 bp, Vibrio metoecus
atgacttatatcataaatgcattgttcaataaccttgctggaaaggtcaataaacctcaagggttaaaaccttcattggatgtgccgatatcagtgtctggatttaagttctatcatgaagctagtatcgctgaacgggagtcattgcatgcatatttaaatgatctcacacatcaagtttcatggttagatataagttttattcctagaggctttgatgaccatgagctgcttcaacgcataaaaatctcttcatccagagactttttaagttactttgaaaagcctgtcgttgcggatcagatctcagaggctattcgacatgttgtagatgcaaggcttgtgttacctttacgattcgaaaacttagaggtggggctgagtaatagttggaagaagggaaaacggtatttcagctgtgattttacctcatatggaaagcttattgatgccttgcgagttattgagtacttacaccaacaaccaagcaactattccatagattatcgaacattgtcggtgaagctttttaaagactctaaatggttggaacagcttaagttaacgatttccaaccttcttaaacctgagactccggaattagatgatttagaacctgatgctgtgttggcttattgggggctataccgcttccccccttctctgaaaatgaaaggtaatttaacgattaaaacaacaaaaggccttctttgcgtagataatgcatggccatttattggtattccacctgatgcaattaaggacgttgttgtaacaacagagcctagttatgtattgttcatcgaaaacaaaacgacatttgaacgctactgtcgtgaaattgatgatggtggtctaatcatttataccaatggctttccttcccgccgttggcactcagtctttaaatctttagatacagcgttaaataattcagttaacttctaccattggggggatatcgatcttggtggcttcaagattttgcgtttcatggaggagctttttgaaagacctttgttccctcatcaaatggatataattaaaaagtcggatgatgctaatggagtgccagctaaggaattgctagcggtcataaccaacccaaatcggttagttatttcggacaaaattgtatccatgctttccaagctgggtgatgataaagtgatgctagttgaacaagaaactttagacttaattactcctttggaaaaaagtgagtcgagtgcttttgaaaagtcgtttctatccgttactcaaacacaaagcgcataa

SEQ ID NO: 47726 - DNA, 1419 bp, Roseburia faecis
atgattttaaaaaagaaaattccaaaggaattttataaactatttcgcacgaaaaaccgtgatgcatatatgcagtttcttgtggcaatttatgaggaaaataatgaagtgtatacagcacttggattgacgatagaggaatgccgtgtgattattgcagatacaattgcaaaggcaaggattatctgggaggatgaggaaatagaagaagaggacgagccggataccttatttccggaagattcgccgtctggcatattgaataccctgattcggtggggatggttaaaaagcgattttgatgaaaagttaaatacgtatattatttctttcccggaatacagccagctgtttacggaattgtttcagaagcttcagacagaagatgacagccgggagagggaaagtatcctttcgatttacagtgctttgtttacgtatcattcggatacagaaaaaaataatgatattttaaaaaacgcactccagacgtccagacggctggggcagcttctttccaatatgcaggatggaatgcgttcctattttgaggaattgtcgcagaaaaaaaattttattggaattcagaaagttctggtagaggaaattaacaaccgtgacagtaaaaaatatgcaattcttacgacaacagacagcttttaccgttataaggaagcagttaaggaactgatcagccagattcttcgcgaaaatgaccaaaaaagggaacagcttgtaaaagagcgtaccggacttgtggagggaactgttaccagcaaaagaaaccagtatcgtctggaatattgtgaaagtgccagtcagcttgtgtatcaggtggagcgggaatttgatctgatcgaaaaaaaatataacaagctgatcgaacagaaaactgtctttgccaagcgtgcactggcacgaatccattatattctgcaggaaggctcttcggatgaagatcatattgtaaagttaattaatttgttggatcatcatgcaaacagcccacaggtgttagaacaaatgcgtgaccggatcagagtgggaacacagtttaagaatataaccgatagaagtttttacaaccggaaaaatgcggaggatgcaggatttcacccgattgcgatggaaaagcacaacgaggagactcagatgaccgattttgtaccaaagccgctttatacgaaaaaacagttgcaggaattcaggcagaaaaatatcgtggatggcagatttgtcacggatgaacagacgattcagtccgtagaagatctggaaaaactgctgtttttgtggcaggaggaaacggatgatacgaaacaggaggaaacggtgcatattgatggagaattaaaaggagaatatggatttgttttttcaaaactggtgattgacgcaaaaaaaggagagaaaaaataa

SEQ ID NO: 47727 - DNA, 675 bp, Roseburia faecis
atgttagaatacatggaaaatatctcgcagagtgaggcggaaaatattagaaaaaccatacaggatctgtttcgccagacctgtattttgcagacaaagtgtgatccggttactctgatccagaaggataatcctcactatcaggtatgtgcgagaaatcgggaatttattgcagattatctgcaggtgcttgactgtgaactggttcatgatccgcaggaacatattttccggattacaggagatggcgtgctgacggagcgtatgacacttttaacaacgaaactggtgatccttatgaaattgatttatcgggataaaattatgggagaaggactacatgccacgacaaccagtcttgcggagatccgaagatatggaaaggaaacaaacctgattacgcgcagactgaccgctcaggagtggcaggaggcattgattctgatgaaaacacaccagatgatcgaactgccaagtgccattggaaatctcgaagacgattccccgatttatatttacagtaccattaatattttctgttcagcggcagatatcaatgagctggttgaaatgttcaaaggagaaaccggggaaacggaagaacaaaaggaagcagagtattcggaaaagacgcaggatcagtgggaaacacaagacgaaatgaggagtgaataa

SEQ ID NO: 47728 - DNA, 3348 bp, Roseburia faecis
ttgagtcaggcaaaaaaagtttttacaaggatgtgccttaacaactggggaggcattgatcataaggtactggagtttcatgaatatgtgaatttgttcagtggaaaaagcggatctggaaaatcgacagtgatggatgccatccaggtcattttgtatggaagtttctcaccgagttttctgaataaagcagcggatgatgcaaaaaatcgcagaagtgtgttaagttatctgcgcggagaacaaaaagacggatctgccaatcgtaaagactgtgatttctgttccgtaattgctctggaaattgaagataccggaacccatattataacctgtattggaattgcgtttgaagtaagaaaatcagattctgagattaaaaaatttgtgtatttcagtcactccgggaaaatgccggagtctgaatatctgacggaacagggcgtctgctattccaatcaggagatcaaaaagctggtcagtgccagaacaaaatccgatgacaaccgcggaaagggagaagtcaaccgcatttatggttccaaagaggcatatctgggaactctgtatgatgtgattctcgggtatattgatcagaaccgttttatcacgatggaaaaaagtgcaattgccctgaaaatgaccaatggaacgggacagtttattcgtgattatatgtttccaaagaacacttccaataccattgccacgattagtgaacagctggattcttaccgccagatcaaagaaaaaatagaagatctgcggaagcggattgagctgttatctgaaattcaggcatcaggaaaggaactggtgcgtctgcagacggatatcgtccgggcagaagccatgatacgctgcatcggtattgaagatttgcgggcaaggattcaggcagcagaagacgacaaaaggaatcttgcagaaaaacaggaacaatgcaagaaaaaagtgcaggaactttctgcctcgcgggaggaagcacagcagaaattgatacaggtcagtgccgatttaaaagccagcgatttagggggaaaacagcagcagtacgaggaattagatgagcgcagcaggatgctggcagataataccagacagtggcaaaagatccttcagggaatgaaaaactgggaagaagacgatgtgatcacggattatatcagcaatccggtactcaacatgattgctgaattaaaccagggaagggtgacagaagaactgtgccagaatctgcatctgaaaattgaatcggccaagcaaaatatcgaggatgaagtggaggattacagagatcagagacgtgagatcggaaaacagctaaaagaaaaaaagcggctggtagatgatatgaaacatgaccgcaaaccatatgatgagaatttgcggtcagcaagaagtgcactatcccagcaattaagtgaccgctatgggcaaacggtgaaagtacagatttttgcagatcttttcgatgtgcaggaggaagaatggaagaatgcgattgaaggtcgcatgggaaggctgaaacattctctgattacagagccgcagtatgcacatgaggcagcagtcctgtttcgcaatatgaagcaatatgaaaatgttgatttgattaattccaaagcgattgcagacagtaagccggattgtatggaagggtcattgtatgaagcggtaaaaacgcaagaggcttatgtggatgtatgtctgaaacggtatctgggacatattatgaaatgcaggtctgtggaggaactggagcaggtaagggatggtgtgacaccggattgttattcgtacagcaattttattttccggcatcttaagaaaaaagactatacgaccagagcgtgtattggacgccgtgtttccaaggcgcggcttacagaatatgaaaacgatgtggaagatttaagcagacaggagacggaattggatcatctgctgcgcagattaaaagctgcaagagaatttgagtgtctgaaagatgagccatctcattacgtgaaactctccaaggcgggtgctgagcttgcaaaggtaaataaaaccaagaaagaactcgaagaagtgatccgctttttgcgggagggggcatacaaagaactcgaagagaaggaacaggctttaaagaagcaggtgcgggacatccagactgagatcgatgaagtgcagacagagctggcaaagctaaccagccggtatgggcagctttccggagaaaatgagtccagaagacagcagctggaggaaaagctgcagggatatattgccaatgaagaactcgaacaggaagtgtgggaattgttaaaaaagcaatccgggcagtccgtgattaacaggaagaaggcagagattgcagatctggcagataaggagcaggaacaggcagaacgtctgcagatggcgcgaaataaatatattcttgcatatccggccagtgaattcagcggagctgagaaatccaatgaagcatatgaaaaactgcttgaacggtacaggacggattttgagccggcatacgaagaagaatttgaaaaaaagtgtgcatccatctataagagtctccgggagaatgtcattgcaacaattcacggagatatcaaagcagccaaacggcacgcatatgagatcaaccgcctgctgcgggaaaccaatttctcagacagcacgtaccagattaaaattgaaccggccaaaaatgaaaacggacagttctttgatatgcttatggcagaggaactcgacagcaagaatctggacaatgccggaattgacggtcagatcagtttcggagaagatgcattttatcagaaatatgagcagaagatcaaacttctgaccgacaagtttatgccgccgaaagatgaggatgagcatttgcgggcacagaagcgcaaagaaatggaacagtacgcagactacaggaattatctgtcattcagcatgtttgaacaggtaaccgatgaacatggaaatgtgatccgggaaaactttgtcgatgatatggcgggcagggattccggtggtgagggacaaaatccaaagtatgtagcactgcttgctggatttgccatgctgtatatgcagcagagtaagcgggattccaaaattaagctggtactgctggatgaggcgttttccaaaatggatcaggagcgaagcgcagtctgtctgaaatatgccagaaagatggatctgcagctgattgtctgtgtgccggatgagcgtttgcagtctctgatccggaatgtggactgtgtatatggattccgtcggtttaaaaaccggatttccatgatgcatattgataaggggcagtatctggaaatgatggaaggataa

SEQ ID NO: 47729 - DNA, 1206 bp, Roseburia faecis
gtgggcagaaaaaaagagcaggaacataaaactttagcccgttggatcattgataaaaccaataccgatcattacagggcggggatgctcagtggatggaaacatccgtatattgatgcggatgttatggaaatagtgggtggaagaaaacagcttttggatcaggcaactatccttgaaaatgagacaaatgcgggaaagatggggaagtttaagcccgattggaaagatgtaaaaacaagtattaagaaaattgattatgatgttgcgattattccggaattgtgtgaaagggaacaaatcgaagatccaagggaaaggcagcttcgtctcattgcccgtgtggaaaaatggcggagaaaaggacaggattgtgcatggttgtgctcctactatgatgatttattggatctgttgaacagaggcaaagagcagaaagaactggaagatgaaaccttttttgtatgtatagatgcagttgcacatcaaaaggaacacgtctggaaacgggtgttcagtgcgcgtgtccttcacaattccaaatgtttccaaaaaaattatgaggatagaatactgtctgttttaaaagaaaaatccccattttatatagaggaaatgagtgatgatgaactgctggatgcgcataatattcattcttatgcgcagacgcttgagtggaaaggcacactgcagtatattataaatgatgaaaaagtaattgattcttcatcacagatttatggaacgattataaatacacagacaatggaacatgcaagggcgtatgccctgtcaggttgcaaaagaatcatgacaattgaaaataaagcaaactatgaggacatgtcttatagaaaagatactctttatatattttgtcatggttttttctctccaaaggaagttcggtttttgaagacgatttgtgatctggtttctgagggatgtgaattttatcattggggagatctggattatggaggaatctgtattttccagtttattaaggcgcaggtattcccaaaacttcttccatacaaaatgagtcaggaggattttgaattagcagtcagggaggatgcaggtattttattaaaggaagataccagaaataagctgataaggaaaaatgcaggactactggaaccattaaaggaagcaatacttaagtcaggtctgacgatagaacaggaacggctgttgtag

SEQ ID NO: 47730 - DNA, 1497 bp, Eubacterium rectale
atgagtatgacattgaaagatagaataccaaaagaattttatagcttatttcgcacgaaaaatatggatgcatacatgcagatagttgttgcgttatatgaggagaataacgaggtctatgcatcactgggactgacacgtgaggagtgtcagataatcatagcggataccatatcaaaaacaggcattgtatggcagactgattataatgaagatgagattaataaagatagtggcggcatggataatgatgatgataatcctgattccgaaattgatgttatatatgaccagaccagtttcgcatacaccctgacaccatcagctatattgggcaggcttataaattggggctggatcaggagtgattttgatgaaaagctcaatacatatgtgattgcatttcctcagtacagccagatgtatgctgagctatttaaaaagctgcttgtggatgatgacagcagggagcgcgagagcattctggctgtttatagtgcgcttttcacatatttttcagatccggaaaaaaataatgatattctgaaaaatgcgttgtatacgtcaaaaaatcttggtcagcttttatcaaatatgcaggatggtatgagggcatattttgatgagctgtcacgtatgaaggattttataggtatacagaaggtactgattaaggaaattaataacagtgatagcagacgttatgccatccttacaaccacggacagcttttatcgttacaaggaggctgtaaaggagcttataagtaaaatccttaatcagaacgatgacagaagggctgagcttgaggaaattctttcacagactacacccggtacgtttgagagaaaacgctatgagtacagcgtggagtactgtgataaggcaagtgagcttgtttataaggtggagcatgagtttgacctgattgagagaaagtacaacaagcttattgagcagaagacgatttttgcaaagagggcgcttgcaaggatacactatatcctgcaggaaggcgcagatgacgaggataatatagtaaaactcattaacctgatagataagagtgataaaacagatgagatacttggagctcttcgaaacagaatgaagttcaccagacagttttacaatgtaacggacgacagctttccgggaagaagagagagaggaagaagtgagtttgttccgtttgttattgacgatgcttcggcaggcgaagatgatatggcagattttgtgccgaagccattgtataccaaaaaggagcttcaaagcttcagagataaaaatatgcgtgatggcatgtttgtgacagatgaacaaactgtggaatccatggaggatctggaaaagcttctgtttttatggcaggaggagaccaatgagcgcatgggtgaggatacggtgagtctggagggagagataacaaagagtgatggtgtaagctactcaaggcttgtaatatccaaatcggactctaaacgagaagcatag

SEQ ID NO: 47731 - DNA, 726 bp, Eubacterium rectale
atgtttgaatatatggagaatgtttcgccaaatgaggcagaaaatattagaaaaactattcaggatctgttgaggcagacctgtattttgcaaatgaagtgtgaccccgttacattgattcaaagagacaatccaaggtatcaggtgtgccttagaaacagagagtttatctctgattatctggctgtgcttgactgcgagctggttcatgaccagcaggagcatcttttcaggataacgggtgatggtgtcatgctcgagaagatgactcttcttactgcaaggattgtcattataatgaagatgatatacagggataaaatcatgggcgaggggcttaatgcgacaacaacgaatctggcagagattcgtgagtatggcagaaataccaatctgattaccagaaagctcaataatcaggaatggtcagacgctcttttgcttatgaaaacacatcagatgattgaactgccgggggctattgcaaacctggaggacaacacaccaatttatatttatggcacagtaaatatattctgctcagccatggatataaatgagcttgtgcgcatgtacagtgatgaggtggagctgattaaatatgataacgagtcggctgcaacacttgacgctgccggattgaatacagaaggcagttctgtaaaccatacccatgaatttgccaagaacagtgaaatggaggagttaccaattgagtcagtctaa

SEQ ID NO: 47732 - DNA, 3366 bp, Eubacterium rectale
ttgagtcagtctaagaagatatttaccagaatgtgtctaaacaactggggcggaataaatcacaaggttttgcaatttaatgagtatgtcaatttgttcagtggtaagagtggctcgggaaaatcaaccgtcatggatgcgattcaggtaattctctacggcagcttcagccccaccttcttgaacaaggctgcagatgatgcaaaaaacaggagaagtgttctgagctatttgaggggtgagcagaaggatggttccgcaaatcgtggcgactgtgatttttgttcggtcatagcgcttgagatagaggatacaggcagtcatacgtttacatgtataggaatagcatttgaggtacgaaaaaacgattctgagattaagagatttgtgtacttcagtcattcgggcaggatgccggagccttcatatgtgacagcggacggcttttgctattcaaataatgatattaaaaagcttgtaaatactcgctcacagtcagctgacagacgcgccagaggggatgtaaaccgtatttacgcatcgaaggaggcatacattggcacattatatgatgtgattttaggatatattgacccgaatcgttttatcacaatggaaaaaagtgctattgcactcagaatgacaaatggaacaggccagtttatacgtgattatatgtttccaaagagtgactcgggcacgatagagactatcagtgagcagcttgatgcatacagacaaatcagggaaaaaatagaggatatgcgcaagcgtattgagcttcttaaggaaataaaggagtcagggcaggaactggtaaatatccaaagcgatattgtcatggcagagacaatgatcaggtgcatagatatcgaggatatgcgtgcaaagattcaggcagctgaggatgataaaaagcgtatcgaagaagaacaggacaggctttcagaaaaggcagatgatatagccgggcagcaggcagacctgcagcaggagtatattcaggtatgtgcagatttgaaatcgagcgacttagaaagtaaaaaggatcagcttagggagcttgagaagagaagtctcatgcttaccgacaacagccgtcagtggattaaaatcacaaacggactaaaggcctgggatgatgatgaggtcatcacagattatgtgagcaatgcagttttaaacctcattgaagagattgtggatggcgatgtcacagaggcaaaatgtcaggagcttcatctaaagcttgagtctataaagaaggatatcgaggatgagctcgaggacaatacttcgcagaaaaatgagataacaaaagagcttaaagagaaaaaacgtctggtcgatgatatgaagaacaaccgcaagtcgtacagtgagagcctgcgttcggcaagagctgcgctgcagagagacttaagtgatagatttggcgagcctgtgaaggtacaggtatttgcggatatgtttgatgtacaggacgaggaatggaagaatgccatagaaggacgtatgggcaggctcaagttctcacttatcacagagccgcgttatgcgcatactgctgctgttattttcagggacatgaagcagtttgaggatgtcgacctcatcaattccaaggctatcatggacagtgaaccaaaggccatggatggttcgctttatgaggcagtggatacaaaggaaaagtatgtagatgtctgcctgaaaagatatctgggacatattataaagtgccggagtgttgacgagcttgagcaggtacgagatggagttacaccggactgctactcatacagcaactttattttcagacatctgaagaagcgcgattatactacaaatgcctgcatcggaggcagggtatccaaggcaagacttgctgagtatgaggcagatgtggagaggcttgagaaggaccagatacagcttatgggtattatttcaagtctcaaggcacagagagattttgagtgcttaaagggggagccggagtattttgtgggcctttctgaggcgtcagatgagcttaaagcagttaattcgcagaaaaatgagctcgaagagattattaggacaatggagaatgggcagtacaaggagctaaaggagaaaaagaggcttcttgagaaaaacatcgatgcacttaagagtgctttttcactgaatcagcagcagataaatgaaaagataagccagcatgagaaaatcataggtgcaaacgaacagcgaagagcacagctggaagatatgttacagggctatgttgccagagaggagcttgagaagcaggttcaggatatgctgcagcatagctcaggagcatcggttaagagcaaacagcgtgagaagcttattgagctgcaaggcgcagacggaaatggtggcaggcagcagtcgtgtgtggagacgttgcagactgcccgctacaggtatataaaggagtttccgtcaggtcagttcagcggagccgagaagtcaaataaggcatatgaggagctgctggagaagtacgagaaggattatgagccggaatatgagagtgagtttgaggagcagtgcaaggtgatttacaaaagtctcagagagaatgtcatcggtacaatccacggtgatatcaaggctgcaaagcgccatgcctatgagataaacaggcttctcagggagactaatttctcagacagtacctatcagattaagatagagccggcaaagaacgaaaacggtcagttctatgatatgcttatggcggaagaactggacagtaaaaatccggataatggcggaatagctggacagataagctttggtgaggatgatttttataagaaatatgagcagaaaattagacttttgacagacaagttcatgccgccaagggatgaggatgagcatctgcgaatgcagaagcgcaaggaaatggagcagtatgcggattaccgcaattatctgtcattcagcatgtatgagcaggtaacggacgaaaacggtcgtgtcatcagggaaaactttgtagatgacatggcaggacgtgattcgggtggcgaaggacagaaccctaagtacgttgcgcttcttgcgggctttgcgatgctttatatgcagcagagcaatcgtgattcaaagattaagctggtgcttttggatgaggcattttccaagatggatcaggagcgaagtgcggtgtgtctcaagtatgcaaggaagatggacttgcagctgattgtctgtgtaccggatgaacgtctgcagtcgcttatccgaaatgtggactgtgtctatggcttcaggcggcataataatcagatttctatgatgcatatagacaagggcgattatctgaaattgatggagggatag

SEQ ID NO: 47733 - DNA, 1416 bp, Roseburia inulinivorans
atgattttaaagaagaaaattccaaatgatttttataaattattccgcacaaaaaacagggaagcatatatgcagtttgtcacagccatttacgaggaaaacaatgaagtatatgcttctctcggtcttacgcaggaagagtgtgcgcttattattgagaatacgatcgagaaatcaaagatcgtgtggcaggaagaggacgatatggaggaaggagaaacgccggatgcattatttccgagcgattctccttccggcatgttaaaccacctgatccggtggggatggatgaaaagcgattttgatgagaaactgaatacctgtgtgatctcttttccagaatacagccagttgtatgtcgagttgtttaaaaagctgcagagtgatgatgacagccgggaaagagagagcatgctttccatttacagtgctttgtttacctatcattccgacaatgagaaaaacaatgatattttaaaaagcgcactgcgcacatccaaaagtctggggcagctgctgtccaacatgcaggatggaatgcgttcctattttgatgagctttcctcccagaaacattttatcgggatccagcaggtgcttgtggaggagatcaacaacagcgacagcaaaaaatatgcaatcctcacgacgacggacagtttttaccggtacaaggaggcagtgaaagaacttatcagtgaaattttaaacgaaaatgatgagaaaaaagcagtgcttctgaaagaaaaaaattctctcgaagcaggcacgcttttacagaagagaaatgagtacagattgcagtattgtgaggatacgagcaggatcgtgatgcagttggagcgggaatttgacatgatcgagcgcaagtacaataaactcattgaacagaaaaccgtttttgcaaagcgtgcgctggcccgcatccattacattttgcaggagggcgtcagtgaggaagataacattatcaaactgatcaatctgttagaccgcagtgagaaaaaagacgagattttgatggaaatgagagatcgtatccgcttttcttcgcagtttaaaaatattacagataacagttttgccggaaggagagaccgtggggatggagcgttttcaccggtgatgctggacgaagaaatagacgcaagggaacagcacatgacggattttgttccaaagccgttgtatacaagaaacgagttacagagtttccgaagaaaaaataccgtgggtggagtctttgtagcaacagaagagaccgtacagtctgtggaggatctggaaaaacttcttttcctctggcaggaagagacggaggaacgtcttgcggaagatacagtgtcggtggatggcgagatacggagtgaggacggactaacttattcgagacttgtgatcgggcagaatcaataa

SEQ ID NO: 47734 - DNA, 624 bp, Roseburia inulinivorans
atgttacaatatatggaaactgtctcacagggcgaggcagagaatatcagaaaaacgatacaggatttattccggcagacctgtattttacaggtgaaatgtgacccggcaactctggtacagcacgacaatctgaggtatcaggtgtgtctgcgccacagagagtttatcgcggactatctgtctgtgctggactgcgagcttgtgcatgatccgcaggaacacattttccggatcacgggggatggcgttatgacagagcgtatgagccttatgacaacgaagctggtcattctgttaaaaatgatttaccgtgacaaaatcatgggggaaggtctgcatgcaactaccacaaatctggcagagatccgtgagtatggaaaaaatacaaaccttattacaagacgtcttacaggacaggagtggaacgatgcacttgttctgatgaaaacgcatcagatgatcgaactgccgggagccgttgccaatctggaagattttaccccgatttatatttacagtaccgtaaacgtgttctgctctgcgatggatatcaacgagctggtgcgcacctatcaggacgaggtggaagaacttctgacagaagaggaaaaagagaattag

SEQ ID NO: 47735 - DNA, 3381 bp, Roseburia inulinivorans
ttgagccaggcaaagaaaattttcacccgcatgtgtctgaacaactggggtggaattaatcataaagtattagaatttaatgaatatgtgaatttattcagtggaaaaagcggatctggaaaatcgaccgttatggatgcaatccaggttattttatatggaagcttcagtccgagttttttgaacaaggcggcggatgatgccaaaaaccgcagaagtgtcttaagctacctccgtggtgagcagaaagatggttctgcaaaccgtggaaactgcgatttctgctcggtcattgcgttggagatcaaggacacgggaacgcacatcactacgtgtgtgggcattgcgtttgaagtgagaagaaatgattctgagatcaaaaagttttcctatttcagccattccggaaagatgccggaaccggggtatatcacggaggagggcttctgttattccaatcaggatatcaaaaagctggtaaatgagagagccgtatcgaaggataaccgtggaaaaggggatgtcaaccgtatttacgcttccaaggaagcttatcttggaacgttatatgatgtcattttaggttacattgatccaaaccgttttatcacgatggaaaagagtgcaatcgcactgaaaatgacaaacggaacaggacagtttatccgtgattatatgtttccaaagagcacgtcagacacgatcggaacgatcagtgagcagttagatgcctaccgccagatcaaggaaaaaattgaggatatgcggaaacgtatcgaacttttgacagacgtaaaagagaccgggcaggagctggtgacgctccagaccgatatgatccgcacagagagttttatccgctgcattgatattgaggatctctgggcgaaaatagaggcagccgaggaggacaaaaaaagaattgaagaagagcaggcacagctgcagcaacaggcagacacgctcgccgaagagcgcggagaggtcgaacaggagctgatacgtgtaagtgcagatttaaaagccagcgatcttggaaacaaacagcagcagttagaggaattagaggaaagaagccgtatgctgatcgataacagcagacagtggcgcaaaatcgttcagggattgaaacagtgggaagaggacgaggtcatcaccgattatatcagcaatccggttctaaatctcattgaaacaatcgaaaatggaaatgtgacagaggaaaactgtcaggaactgcatttgaaaatagagtctgcaaagcaggatattgaaaacgaatttgaagattacagtgagcagaagcgcgagacaggaaaagaactgaaagaaaagcagaagcttgtggatgatatgaaaaacaatcggaaatcctacagcgagaatctccgttctgcaagaagttccctggagcggaaattaagcgacctttacggaagaacgataaaagtccagattctggcggatctttttgatgtggcagacgaagagtggaaaaatgcggtcgagggccgtatgggaaggctgaagttttctctgatcacagagccaaagtttgcgcatgatgcggcggcggtctttcgtgagatgaaacagtttgaggaagtggatctcattaattccaaagcgatcgcagacagcgagccgcgtgccatggagaactctctttatgaggcggttgagacgaaggaagcctatgtggatgtgtgcctgaaacgttacctcggtcatattataaagtgtcattccgtggaagagctagagcaggtgaaagacggcgtgacgccggattgctattcgtacagtaattttattttccggcatctgcggaaaaaggattataccacaaatgcctgcatcggagagaaagtgtcaaaggcacgtctggcagagtacgaggctgacgtggagaggcttgagaaacagtatcaggaactgcattacatgaccgagcgcttaaaggcggcaagggattttgaaagtctgaaagaggaaaaagaatattatgtaaacctttctggcgcagaaaaagagcttggaaaggtcaataagaaaaaatccacacttgaggagacaatccgtactttgcaggaagggcagtataaggaattacagcagaaagagcagagcctaaaacagcagatgcgtgagcttcaggcttcaatcggcgaaaatcagggacagatgagtgagaaaatacgccgtcacgaaaatctttccggtgcaaatgaacaaagacgtctgcagttagaagagatgctgcagggatacatgccaaatgaggagatcggtcaggaggtacaggagcagttgaagaagcgctccggccagtccttaaagaaccagaaaaacgcagaacttgcggctctttcggcaggagagcaggagaaggcggagacactgcgcactgccagaaaccgttacatttttgcttatccgtccagccagtttaacggttcagaaaagtccaatgaagcctatgagaagcttctggaagaatatcagacagactacgagccggcatacgaagcagaatttgaaaaacagtgtgattttatctacaagagtctgcgtgagaatgtgatcgcaacgattcatggagatatcaaggcggcaaaacgccacgcttacgagatcaaccggttactgcgtgagacaaacttttccgacagcacctatcagatcaagatcgagccggcaaagaatgagaatggccagttctttgagatgttaatggcagaggaattagacagcaaaaatctggataatgccggttttgatggtcagttgagttttggggaggataccttttaccagaaatacgagcagaagatcaaactcctcaccgacaaattcatgccgccgagggacgaggatgagcaggtgcgtgcgaagaagcgtcaggagatggagcaatacgcagattaccgcaattatctctccttcagcatgtttgaacaggtgacagacgagcaggggaatgtcattcgtgaaaattttgtcgatgatatggcaggaagagattccggtggagaggggcagaacccgaaatatgtggcacttctggcaggttttgcaatgctgtacatgcagcagagcaaccgggattccaaaatcaagctggtacttttggacgaggcattttccaagatggatcaggagcggagtgccgtctgtctgaaatatgcaagaaaaatggatcttcagctcattgtctgcgtgccggatgaacgtctgcagtcgctgatccgcaatgtggactgcgtctacggattcaggcgtcatcagaaccagatctccatgatgcatattgataagggagattacttaaaactgatggaaggtgagcatggacagggagagccggaaactgtaaaatag

SEQ ID NO: 47736 - DNA, 1416 bp, Roseburia inulinivorans
atggatgacgcacaggcacagcagaccaatccattatttggtattattccaaaagaatttttcacaccgctggcatcgccgaacagacttgtatattgggactgtctgtgccggttgtttcaggcaatgagtgcacagctttcctttgggatcgagagagaaatccttgtggatgaattacagttttattttgaacagaatcaggcagcggaatttgaggaagatgacataaatggcatggattccagaaaaaaggcaaatgagatgctgcgcttattggagaagtacggctggcttgaggttgagacggataagagttatgtgcagagagtcaatttttatgattatgccgtaaaagtcatgaaaacgcttcttgagatttcagacggacgaaaggtggaatatcagggctatatttataccatttacagtcttgtgcggaccaatacggatcatccggctgttgtgttacagcagatccgggataatacggatatgctgatcacaggactaaagaacctcaattcgaatatcaagcattacattgatgaactgacaaagcataagaccgtagcggagattatgaatgcgctgtttaatgattatattacgaatattgtagataaagcttaccacagattactgacttcagacaatgtgtcaaagttccggccggagatcatagagcggctggaagcaaatgggcatagctcacgttatatcgcaaagacgtcggaagagttggcagcgatccgggagataccggtcgggcaggcagaagaactggtatatcagacattgcatgagattgtggaagcgttccggaatatggatgatattctggcagagatcaaccggaaaaacacacaataccagagggcggcggtaaaccgtgcaaagtttctgctggcagggacggaagatgtcagaggacagatgaaagaaatccttttatacattggagagcagatggaacagagccagctggatctgaatgggatttatgagatcgagtatctggacaatctggtgaggctgtttggaagcagttttattgatgagaaatcgttttacagcccgatcgagggaaagaaagagtttcatccgcaggaactgacagaagtaatgccggatgtggaactccggcaggaaaagcttcggaagatgaccgaaaagatgcagcgcattttaagcccggaacggatagagcggtttgtagaagaacaattaggagacagggaaaaaatctatgcgtctgagcttccgatggaaacaatggatgattttatcaggctgatctatgtcagactgtatggttccagaaaaaagatgcgatatcggattgaaaaggcagaaggtgcgaataaaatcagtggagagtttgatttcccggattttgcaatcataaaacgctga

SEQ ID NO: 47737 - DNA, 615 bp, Roseburia inulinivorans
atggatttattaaatggcatgctgcagaaggatcaggatgaattccgcagaatatgtaataaactgattaatgtatgtttcatatgcaggcagaatcaggcaacaagaagtgacttttattttatagaaaagtacaaagaaaaatttgaagaactactgggagtgcttggttacagattagaaatgaatgacgaatacggagtggtgcagctcacgaatgccctgaacacaaaccggcagaatttaaaattatatgagtccgttattttgctgatattgcgcattttgtttgatgagaaaaaaagagaattgtctgtgagtgatgaagtcattgtgaatctgggcgatattcaggacaagtttttaagcctgaagatccgtgacaaaatgatcgataagacaacgatgggaaatgcgcttcgtcttttccggagatatcagctgatcgagctgctggaatcggatctgaaaaatgaggagtccagagttttgatctataattccatcctgatggcagtgcgggttgaggacatcaaaagtgtctatgaaaaagttgacagttataggaaaggaaaattaaaagatgaagaagctgaccagactgaaactgattaa

SEQ ID NO: 47738 - DNA, 3249 bp, Roseburia inulinivorans
atgaagaagctgaccagactgaaactgattaattggcatcgtttctcggatgttacgatagattttggggactcaactctgatttccggcgaaaatggagctggaaaatccacacttttagatgcaatccaatttgttgtgacctgctccacaaatcattttaataaggctgcccatgagaacggcaagagaaagctgaccggttatatccggtgtaagaccggacgtgaaaatcatccttatgagagaaccggagaaatcagtgcgcatgtcgcattggaattttatgaggagagcaaggaaaagtattttgtcatcggggcagtgatcgattcggcaactgaagggcaggagacagtcgtgcgttatctcatggacaatgtgatgttagaggatgagatgtttaagatcggaaacagaccacggaccatcacagaattcaggtcgtttaacaataaaaacatcaaattatttgcaaagacgaatgcggaaggcaaaaagatgatgaaacagcgttttggaagaatcgaggataagttcttccagctgattccaaaggcactggcatttaaaccaattgatgatatcaaggattttgtctattcctatgtgctggatgaaaaagaagtcaatattgatcatctgcgcgaaaatgtaagaagctatcaggagctggaaaaaacgctggagggtgtgaaaaacagaattgaaaaactgtcagagatcgaatgccaccacaaagcagtggtggattgtatacaatctgaccggatgtatgaatattttatggcacagtcggatctggatctgaccaaagaacagatcggcgttctgcaggatgagatcaggcgcgaaagttaccgtctggaacagctgaatgcaaagtgcagcagcatgaaaaaggaactggagaataaggaggaagtccgcacactgcttttagcggaactgaacgccaactcagatttccagacgttggaaaagcagaaaaaatatctgaaagaattacaggaaaaagaagaaatacaatatcaggaaaagaaaagactgttagagagcggaaaaaaagcaggacagaaagtaaaaagactgcttgaaataccggatgtggatgaatgcatgaagcagtatgatgagctgctacaccggctgaaggatacggaggacgttgttagtgcacaggaactgattgaccgggcgatcgcttacaagaagcatatgagtacaaaactgcagaggaaaaatttagagatccaaagccggctgaatgagatcgcagcagacctgcaggagacagagcagcggatcagtaatctgaaacagcaccggttttcctatccctcggcagtccagcttctgatgtcgcgtgtggagcaggaattgctcaagatcggaaggacggcaaagccgaggattttgtgtgaaatgttagaaatcacggatgagacatggagaaatgcagtggagggctatctgaatacacagcgattttatgtgttggtagagccggaacattttgacattgcccttggtatttacgaaaaactgagaagagaaaagaaagcatacggtgtgggactgatcaattccggcaaactcgaggaatatgacattgcaccagcaggaagtctggcaacagttgtggagtcgaagagtatttatgcgaagcggtatgtgaatatggttcttggcaaggtacatatgtgtaagagagtggatgaattaaaacagtatccggtttctatcacaccaaattgtatgcgctatcagaaccatgtcgcatctgcgatcagaccggaaatctatacaactccatttatcggcaagaatgcattcaaagtccagtatgagcaggcactgcagaaaaaggaggatttaaaccggcagaaaatagaatgcaaagaccgtatgacacatatggaagcgacgctgcaatggctcgagtgggatgatgatacagatgtaaagtatagaattacaattgtatcagaaatgaaaaggacaggacttgagattgaaaaatgtgagacggagatccggaatctgcagcagaatacgaccatgatcgaaaagcagatccgtgcggatgaaatgcggaaagagtgtgaggatctgaaaagccacatttcaaaaagtgacagggaaagcggagcctgcgaactgaaaataagcagtgcaaaagacaggcttgtggagtgcgaggatgagtgcatacacaagaatgaactgatcacagacattgcccagaaagcagaaaacgagatcgtgctctggaagaaagaatacgaaaaacagaccggtgataagacattagagcagttccggcagaattttgaccgaagacgtaaggcgaataatacaacaaaagagaatgcggataagaaaatgacaagtgcgatgtacgattacaaaacggcatttgattttggcgcaccggctacgttagaagcatatccggaatatgcggcagtccaggagagactggtgaactccgagcttctgaattatgaagaaaaagtaagaaaagcaaaattatcggcagaggaagaattccgggaacagtttttatcaaaacttcaggaaaatatgaagcaggcacagggagagtttaaggaactcaataaggcattgaaagatatcactttcagtaatgaaagatatgaatttttatatttgccaagtaaaagctatggaaaatattacgatatgatcatggacgatttcaatgtagtgcagggagagtccattttcagcggtctgtttcatgagaatcataaggaagtcattgatgaactattttcaaagctcgcactggatcaggacaatgggatcaaggcattagatgaatttacggattaccgcacctatatggattatgatattaagatcacacatgaggatggcagctattctctttactctaaggtttgtgaagaaaagagcggaggcgagacacagaccccgttctatgtgacggtagccgcatcctttgtccagttgtacaataataatatcggcggagaggcaatcgggctggtgatgtttgatgaggcatttaacaatatggatgatgagaggatcggggcagttcttgagtttatgaacagactgccgcttcagatcgtgatcgcagcgccgccggataaaatccagtatatcggtccgaaaatgcaggagacattattagtactgacagacgataaagtaagcttcgtggaggagtatcgttatgcatccggtcgaaaataa

SEQ ID NO: 47739 - DNA, 1227 bp, Roseburia inulinivorans
atgcatccggtcgaaaataagatattgaattatcttctggacaaatacgaaaacagtaagctctccagaggagaaaaccagagagcgatccatattgcatttccgttcaataagaagacgatgccaaagtatttcgatgagagctcgcttgagatagaaaccattcacgcagccgcagaacagatggagcgtgagggactggtcgcaatcgcatggaaaaaccagaagcccggatatattatcgagaagcttgtactctgtgaggatcatgtggaagaggcatatgagaggcttggcaggaagccgaagagggaagccgaggcacgtacaaaacagattttggagcagttttatcagaaaacgcagggtgagataacaagaagctttttgtcccgcatgataacgcggctggaaagcgaacagtcagtaaaagaatatctcgacattatggatcacaggaaaacagaacaactgattgacactttagataaagtagagcagaacaggaaagaatgttatatcagggaattttccatagaacattttcatgacagcaaagtattcgagacactgatcccaaaaatctgtaaaatattccgggaggaaaatgaagaactgacaggatttgaaaatgaagaaattcttgcggagtatcagatttataaaacgccgggctatgtgtatatgaagggaaacgtacagatttacagcgccggaaagcaggctgcagatatcagtgctttcccggaaggaatcgctgttgcggtggggagtgaggaggatgtaccggatatctgtccggatcagacgattgataaagtattcacaattgaaaatctgacttctttttaccgttttaaacaggaacacagtctggtgatctatcttggcggttatcataatcgcagcagacgaaatctgctgatgcagatttatcagaaattgccggatgcacagtattatcattttggagatctggatgcaggcggattttatattttagaacacttgaaaagaaaaacagggatcccatttcaaatgtttcaaatggacattgaaacattgaaaaagtatgaggattatgcgaagccattgacagaaaatgacaaaaagcggttgatgcagttagaaaaaatggaactgccggacgaagagagaaaactcatcacttatatgttacaaaaaggaataaagctggaacaggaatgtatttccgaatcccagtaa

SEQ ID NO: 47740 - DNA, 1437 bp, Alcanivorax dieselolei
atgtttttcacggaagaccgccaccaattcttcaagccgctgaccggcaagtaccgcgagcaggtggccgagtgtctgcggctgttgcacgagcgtttgtacagcgcccaggccgattacggcgagtcgctcaagcgcgagcaggtgctggatgtgttcagcgaggcgctggagcgggcgcccttgctggagggcggcgatgaggacggcggccgcttccgcaacaaccgggagcaggccgcctggattctcaatacgctggtggagcacggctggctgaagcgggacaaggacgaggcgtcgttccagtccacctatccgttcagccgcaccgggcgcctgttcacccagactctggcggaggtggacggccgcggcatccgcacccgccatcgcaatacccgcaatacgctcaatgccctggccgcgtttctggatcgcggcgaggtttatgatttgctcgacgcccacgagcattccgagcgcatcatcgccgacttcaccgacatcatcgccgagctggaagagcgcaagcgggagttggtgaaggaagtggaggcccagcaactggtgcagcaggccagcgaccagttcttcgagttcatggagaagcgcttccagccggacgtggcgatccgcatgtccgccgacagcgtggagaaacaccgcgaccgcatccagaacaccatcgagcgcattcgccgcaaacccaaggcgtggaagcgtaacgcggagctggagctgcggcggctggcaccggatctggtgatcaacccggagggctcggtgttgtggcagttgctggacagcatcgaaacccgcatgcgtagcgccgccgagatcatgctgccggccctgcgccggactctgcagggttttacccggcgggcggacattatcatccgccagctcagctatctgcacagccagcagcacagcgacattgtcggcctgtgccgggagctgtccgagttggatgacgccaccgccgccaagcgtttggaagccgccgggcaagccatggcccatttgcgtccggggctggtggatccggcccagaaccggctgcgcgagcagcgggagaaacggcaggtgcaaagccgcatgacgcagttggacgcgccggacccggccaccctgcgcgacctggcgattcaacagctgctggagaaggcgttcagcatccacggcgaaggtctgcgcgactatctgcgccaggctctgggcgccagccgccgcatcgacaaccgcgacctgccggtgaacaacgccaccgatctgctggcgctcagccatgtgatcgagctgggcagcgccgaccatcgggccagcggtttccggctgcgcatcgaacccaccgaccccatcgtcggcgaacgctacttcgcccgccgtgatggttttctgctggaactggaacacgatgacgatacgtga

SEQ ID NO: 47741 - DNA, 669 bp, Alcanivorax dieselolei
atgacgatacgtgacgctttggccgaggctctggaggcccgcggcgtcagcccggatcagttctccgaactgatgatccggctgctggaccggggcgtgctgtgccgcgacgaaagcaaaaaagaaacagagctctacgatcgctacctgcaggtggccgatctggtggaagactatctgagcgtgctgcgcattcgcctgctgcacgaacggcgttttcattcgctgcggctgtttccacccggcgccgaggtacccggcctggccgacagcgaggacggcttcaaccagggtctgcgtgagcgcctgagccaacaggaagtggccgccattctggtgttgcgcgcggagtacgacaaagcgttgcgcgaagggcagatcgacgaacacggccaggtgatgctgccgctggaggcgttcaatctggccagtaagaatctgcttggccggccgctgccggaggcgctcaccgaacggcgcgctctgttccgccggctgcgtcagttacggctgatccgcaccgccagcgacgacggtctggaagacgccgagacctggctgaccatccgtccggacatcaccagcctggtcaccgacgcggtactcagccagctcaccggcgacgggccggacaccaaagccccctccccggaagagctgccatcatga

SEQ ID NO: 47742 - DNA, 3651 bp, Alcanivorax dieselolei
atgtttttgaaacgttccatcaccgtcaattggggcaacctgcccgccgaagagctggaatacgggcccatcaatctgttctccggcggtaacggctccggcaagaccaccgccgccgacgccctgcagacgctgatgaccgccgcccacgacaatctgttcaattacaacccgggccaggacgaaaccacccagcgcggccggggcggcaagcaggtgcgtactctggcctcctatattctcggctgcgacgacggcgccttcgcccgcccctatgacagcgacggttacctggccggcgtgtttcatcccaccaagggcgagaccgccgagccgttcacggcggtgattggcgtgcgcgcgcatctggaccgcgccggcgttaccgcccaggcgcggcaaaatgaactgctgttgatgatcgtgcctggcgagatgctgagcctgtcgcacttcgtgcacggcgagggcgccgagcgtcaggtggtggaaatcaccgagctgcccaatgcgctgcgccggacgttcggcaaaaagaacgtggaaacctacgagaagaaaggcgcttatctggcccggctgtacggcgccctgcgcggccgccgcgacgcggtgtcccagcaggaagccaagaacgccgcccgcaccttcgcccgtttcatggcgtacaaaccggtggactccattgatcagttcgtcgccggcgaagtgctggaagcccaggacatgggcgacacgctacgccgcatccgcgacatgctgcgcaccatccatggcatggagcaggaggcccggcaactgcgcgccagcgtggactatctggagcaggcccgtggcctggcggggcagtatcaggagacctggctggagcgcaccgccctcgcctacggcgccgccgcgcaacgttaccgccgcaaccagcgccagtatctggagaaaaaagaggaacaatcccagctccgccagcaacaacaggcgttgcgcgaagaagcggaacaggtggaacagcgcctggagcaggcccacgacgaactggtggggctggaagcacgcatacagggcatccccgcgctgcgtgataaacaacaactgcaggcacagctggaaagcctgacccaacagttgcagcaaggcgcccgccccctgctggagcaggatcagcaacgcagccgtaacttcaccgcgttacgcaatctgcgcgatctgctcaaccgtcacagcatcgagctggaactgccgctgttcgccagcaagggctggcgggccaccagcaaggagctgctggccctggagcagcgcccgataccggacctgaatcagatgctggcacgggactggatcgatctgtcgccgctggaaagcggtctggagcaggcccgcgccgagcaacagttgcacaactatctggcggagcaattgcacgggcaagtggacagcgcctccgaccgggaaaatctctccctggcgcagcggctggaccgcctggtgacgcaaagagcgcaggctctggaaaaactggacgaacagcaaaagcagattcagcaccgcatcagcacactggaatcaaaacgggtgaactatccccgtgatgtggaggaggcgctacaggcgatccgcgagcagtgcccccaggccgaccctcgcgtgctctgcgatcacgtggaagtgcaggacccggaatggcaaatggccatcgagggttacctgggcggcgcccgcttcggcattctggtggagccggattacgaagccgaggcgatccgcgtggtacgccggctggccggccggcagcgcaacaaggcccgggtgatccagggtgagcaggcgcggcgggacgcggagaaagccgcgctgccggcggagtccatcttccatgtgctgcgtttttcccatcgcacggcggagcattatctgaaggcctcctatggcaatgtggtacgagtcggcgacgccgaaactctgcgccgcacccggcgtggtattaccagcgatggcctgggctccggcaactacgcgctgttccgctgcgatctggacgacagccagttggtgttcggcgagaccgcccgcgagcgcaacctgtatgcgcagcgcaacgccctgatggacgtacaggaaagctaccgccacgccagcgatgactatcaggcggtgcggcaactgcaacagcaggtgctcgagttcaagccgctggactgggtggccaccgtcactcacctgctgcaatgccagcgccagctgtccgacaccgaacaggccctggccaatctcgacctcagtgaccatgaagagctggaacggcaacagcaggacgcccgtcagcggcacaagcagctgagccaacggcagggcgaattgaaggaggaaaacggcaagctcggcgagcagcaacacgcctgcgaacgtgccatcaatgccctcgccgaccagagtgagcaactgcaacaggatcaggaagacgccgaggaacacctgcacgcctgcacccggtactggccggatctggatgtactgtcccgtatcgaagccatggaccggcgcttgcaggccgcccaggacgatattgatttcagcgttgaggaacaggcacagaccaagactctgaaccacgccgtcctcaccctggagcggcttgtcggtgactacaatcagcaggcccagccggcggatcagatccttatcgaaaccgccgaggagctgcacagcgccccgttctttggccacgtgcaccacctgcatcagcagctggacaacctgcacaaccggctgcgcaacaatgtcctgctgagcaaactggaacaactgggcggcctgcgtgacaccttcaacaccaccttcgtcagcgatctgtgcaaccagatccagcaagccatcaaggacggcgaacgtactctcaagaatctgaacaaggagctggaacaccattacttcggcgccgaccgggaacggttctccttcgactgggagtgggtgcaagaatacaaggaatactgggacttcttccgcgaagtcaccgagattcccaacctgggcgatggcgccagcctgttcgagagcaccctctccgacaaggccacggccgtgcgcgaccggctgctcgcgttgctgctggacggcgacgaacaacaggcactgcgcgagctggaacggatcagcgactaccggcgctatcgccgctacgacatcctcaaacacccggaaggcaaggcgccgatccgtctcagccagtacggcaccggctccggcggccagttggaaacgcccgcctacattatccgcgccgccgccatcaccagcgcgttccgcttcaacgaaggcgacagccacctgcgcatggtgatcgtcgacgaggcgttcatgcacatggacgaaacccgctcgcgccaggtgatccgttacctcaccgaaaccctgggcctgcaactgatcttcatcatgcccaccagcaaggccggccccttcctggacctggtcagcaaccagttcgtgttcagcaaggtgccaagcccggtgccggtgggcgaactcaatacccgcgtgctggtggaccgccagcaactcaaccaggaacgcatcgccgagctgtgggatcaacaccggcgcgtgatccgccagcaaggcgcgctggacttcatggaagggatttcgtga

SEQ ID NO: 47743 - DNA, 1128 bp, Alcanivorax dieselolei
atgagcgcgccgccctggctggaggaggagccctggctgcggcggttactgagctggttcctggaccggctggagcgcccacgcacccaggccatcacccggcgggtcaaaaaaaccacggtgccggaattgttccgcttcagtgaggacacccgctatcgctggcagttggtggaacggctggcacgggaataccgggtcttcagcatccattacgactcccggttggatccttttcaggaacgctacgagaacgcccaactgcgtcttgatccaagctgcgaagcgcttctgcgcgactggctcgatcgtccccgtgtcgatccacgacggcaggcctggcagcaggctctgagcggccatgaagcgcatttccaggatggcggcgcggctctgctcgatgcccaaccggcactggccggtgaatcaccggaagacatggtcggccacttcgtccttgccgctaattggctggacagcgacctcaccttgcgtgaactctccgcccgctgctttcgcggcgactccaagtttctcgatggccgccaggacctgctcgcccgcctgttcggcgagcgcgcccaacgcctccggccgcgccccttgctgctcaccgcctgggcgccagccggtttcgagcgattactgatcgtggaaaaccaggacagcttcctgcgtctggtggaacaggcgcccgtcggccacgccttgctctacagcggcggtttccgcgccagcgctcagcgcctcaccagcccccacacccgtttcgcctttctgcccggcagcgacggcgctgatttccaggcgcgctggctcagtaacaccttgcccgcgttcttctggggcgatctggatttcgccggcctgggtattctcgccgcgctgcgacacagcctgccgcaactggcggcctggcgcccgggctatgagcccatgctcctggcgctggaggatggccagggccatggcgccgaacaggcgggcaagggacgtcagaacgatcccggcaacaccggctgcccctacgcggaccagcaactgctgcccgccctccgcgaccaccagcgttttctggatcaggaaggcttcctcccggttctgtcctccccccgaacaccattgtaa

SEQ ID NO: 47744 - DNA, 1449 bp, Bacteroides vulgatus; identical to SEQ ID NO: 43782

SEQ ID NO: 47745 - DNA, 585 bp, Bacteroides vulgatus; identical to SEQ ID NO: 41699

SEQ ID NO: 47746 - DNA, 3357 bp, Bacteroides vulgatus
gtggcaggctttaagcttgactatttggaagtgtggaattggggaacctttgacaaaaaagtgtaccatatgaatttgcatggtaacaactcgctattgaccggagcaaacgcctcgggcaagagtacgctgatagatgctctgctcacgctgatggtgccactgaagcgccaacgattttacaatcaatcatcgggtgtggagaagaagggcaaccgtacagaggaatcgtacttctttggcaactatggcaatcagcagcaggagggtgcagcgagcacaaccacgctgagattgcgcgacaaaggggctcgttcggtattgcttgcatcgttctgcaatgtggacaagcgcgtggtgacgctgtttcaggtgcgctactacactggcgaggaactaaaggtactgtttggtgtagcccgagagtcgttgactatagagcgtgacttttcagagtttgacttgcatggcgattggcgcaagcgactgacgaaaaaatacaatacgaatgaaacaaaacgcacgatagagttttttgatggtccggtggcatatggcgaaaagatgataaccctcttcggtatgcgttcggacaaggcgcttacactcttcaatcagatagtgggtgtgaaagtgttggacgatctggacagttttattcgtacgaatatgctcgaggaactgccggctgaggagaagtatcaggaactgaaggacaacttccaaaatctgatggaggctaagactaatatcgataaggtgaaggagcagattgcccaactggaacctatcaatgcattgacagaggaactgaaggagatagacatacgcatagatgaaatggagcaggagaagagtgtggcagcctattggtttgctgcgcgaacggtggatttgtgcgacaaggagttggtgtgctgcaagagcgacttgaggaaactggaagataggttgaaggagttgaaggtgcagaagggtgagctggaacaagagcaaatgcgcttgacggtggctattgagaaggacgaggtgggtcagcagatacatgaaattgaaaaggaaatcaatcagagagtgaggatacgtgataaccgcaaggccaaagccgaagaatacgataagttggcaaagctggtgaagatggaacaaagtcctgatgtagaggtattcgaaattaatcgtgcgaccgccaaacgcgagaaagatgctctgcaagtgacgattgacaggcaacttatggaagagaagcgtcaggcacaaaaccgtcaggatgaaatcagtagcaacatagaagaacgaatggccaccatacgctatctgcagcagcataagaacaatatatccggtcgtgtggctgagattcgtgatgagatactggaagctgttggtgcaactaccgaagagattccattcattggtgaactgatatgtgtgaaggatgatgagcgtgattgggaatattccattgagcgtattcttcacaattttgcattgcggttggtagtgccggagaagtattacaagcaggtaaatgagtatgtgaatggtcataatctgcgaggtcgtatcgtgtatcagcgataccagggcgcagagactattcgtgagtttgaggataggacattgaaagcggattcgttgctccgtaagcttgaatacaagccaatgtgtttgtatttggattggcttgaggacaggttatttgctgagttcaactatagttgtgttgattcgcttgcggacttcaaccatctgcaagagaaagcagtaacaaaagaggggctgataaaggcgagaggtggtaagcatgagaaagacgaccgaccagagatacgaggcaaggaacactatgtgcttggctgggataacaaggagaaaattgccgtgttacaggcagaggtgcgtcagttgcagcaggaagaaaagatgacagcagctaaagtccgtaagctagaggaagacataaagaatgctcagaagaagcgggaaacctatttgacgctgtttagtaaatacgataaatttgatgatatcgactggcagtcgtgtgtactagtcattcagcaaaagcaagaacagaaacgacaactggaggaagccaataatcgggtgaagattttacaggagcaattggcgggggtgagaaaagaaatcggtttacttgatgatgagaacaatgaagctatcaaaaagaaaacattatcggagaatcgtgagaataagctcaaagaaaggagaaacgaaagtaattcagctttggctcaaataggcgtagttgatacggatacttttgagtcgcaacacacagatttactgaatgtggcattggaggatttgaacggaaagcgtgacacgttacaacatgagatcgatttagctttgcagaaacagcgtgaaacgaagagtcgcaagaatagcgatttgaagaacctgatttatcgcttcaagaatcccgcagaggaaattaccatgaagtatcacgattggcgttcggatgtgagccgtttgcccgaagccgtggagtttatgggcgaatatcaggcctattaccaacgattgcttgacgaagatttaccagggtttgaatcgcgcttcaacaagtatttgcaggagaatatcatcaacaaagtcagtgcattcaatgtattcttccaaaactggtgtcagtctatcaccaagaccatcgaccaattgaattcgtatcttataggcattgatttcaaagatgctccaaagacttatatccagttggtagcaaccaaacgattgaatgtggatgtgaaggagtttcaaaacctgctgagcagtgcaatacctaatattcatgagatgaattcaacaatcgatggaagcaagattcatttcgaacagcatattgaaccgctgatgtctcgcttacaggtcgaatcatggcgaaagtcggtgatggatgtgcgtggatggtacacatataagtcggaggagttttaccaagacgatgggcagaagcgtaacacctatgaggcgatggggcagctgtctggtggcgagaaagcacaattaacatacacgattctgggatcggctatcgcttaccagttcggattaaccaagagtggattagattcttcgttccgcttcattgcaatagatgaagcttttcgcgcacaggacgaggacaaggcacgctatctgatttcgctctgcaaacaactccatctgcagttgctcgtggtgactccgagcgacaatattcacatcgtggagaacgatatttcgtatgtgcattatgtggagcgcaagggcaactgttctgtgctctataatatgcctatcagtgagtttaaggcagaacgtgaaaggagtatggaagtatga

SEQ ID NO: 47747 - DNA, 1113 bp, Bacteroides vulgatus
ttgcgttcggtggtagctggctctgagtttgagccaattgtgatcccttgcgacaagaaggctagcgcatcgatggacgagtatcaacgtgaactgacggacatccgttcgcaatcgaaagaggtgaagggctttggttacacgattgagtggaaaacagtgaaaacaaaagcattgggcgaacaggatctgcctgagcgcgtgttattcgagagtgcatcggacattgagcgcttcttgcagaagtgtggtgaagtatcacagtttcgtaaggatgtggcaatgttgcttgatgagtttccgcagcttcgttcatgggtggaacgctatccgctgaaggtggtggaaaatgcttccttttggtctgatttgctgaaagttttgcgctattttgtggcaaacccttgtcctaggttgtacattcgtgaattgcccattgaggtgcataccaagtttattgaacgtaacaagggagtgcttcgtgagttgctggatattgtcattgtagagcatgtttgttcggatgagaaggtgttcgagaagcgctttggattgcgatacgatgagtcatgggtgcggattcgtgtgctggaagcatcgattgcgaatgaatacttttctggtgtagacgatcttacgatgcctcagagtcagttctgtgcgttgtcgttgcctgtgcaaaaggtgtttgtggtggagaataaaatcaacttcctgacttttcccaagttggcaggaagtctgctgatttgggggcatggattcaccattggcatcctcaagtctgttccgttcatgcggcacgcttcactatattattggggcgacattgatgcacagggcttcgaaattctttcgcagttccgcagttattttccccagacacaaagccttctgatggatcgcactacctttgacacatattttgaaggcgacaaaggcacaccaagcaatgtatcaaagcctctccatcttacccctgcggaagccgcactgtacgatcatgtcaagtttcacaacctacgtctagagcaagagaagattccgcaaaaatgtattaataatatattcaatagtttgttaaaaaatggccaggtaatatctgaggtctaa

SEQ ID NO: 47748 - DNA, 1473 bp, Pedobacter sp. PACM 27299
atgccgatgatagacagcgccaggattcttgaagtactcaatagctcagcaagtgtgaatttgctgaagctgaggaacagggatattgtgatagaatttctaatcaatacttttataaatgaggaagctaccgtttcctctgatcatgttcattctttattggctgacttcctggagcttaaacaggtagacaatgatgaggagtatgaaattgaaagttttgactcctatgaggtaaaggccagaaaatatgtgaggaagtggacggacagcggttttttaaccaattaccaggacgaccagggggagatattttacgagatttctgcacattccagtaaaaccatcgactggttactgagccttcagaaaaaagaatttgtaggtacagaatccaggttcaaagatattttcaatcaattgaaagacttggtggagttcaccaatggtgatcgcgacaatcgtctggccattttagaagagaaacgcctggaaattgaacaccagatcgaacagctgaaagccggtaaaaaggtgaagatctaccaggactatgaggtgattccacgttataaccaattgacacaagcggcaaaagaactgttgtcggactttaaagaggtggaagataactttaaagacatcaccagacaaatttaccagaaacatgcagaagggagcttaacgaaagaccatatcctggaatttacgttcgatgccctggatcagattaaagacagtcagcagggcaagagtttttacgccttctggtctttcctgcttgatccggttttacaagaggaatggaccacgctgagcaatacgctattcgaaagattagacgaaagagagattgtagtcggcgattttttcctgaaaggaatgaagaaatacctgcatgcctccggtcagaaagtatataaggcaaatgataagatggcggagaagttgggccgtatcattagagaatctgaaggttctaaaatccaggtgacacacaacgtaatccaggagattaaaacgatgctgatcgaagtaggtaagcaggaaaaccgtccggatatcggattggtattagaatcaagtctggagatttatccgttttttgaacagcgcttaatgctggagcagccggaagaactgctttacaatacaaggcctaagttagcagacaaagacatcttaagttcgaggcagcttggtaagttattcggtcagacgaagatcgataaagaagtgctgcggaagaagatcagaacggtattgtcagggagagcccgcgtttccctatttgaaatcattgaagccgatggtggtatcgcggatggtcttccagagctgtttgggtatttatccgtggccaaagagttcaagcataccatcaacccagaaaacacacagcgtattttatttgatgcccaagggcagaagtcaatcaacgtacctgaagtaatcctattaaagaatgagtaa

SEQ ID NO: 47749 - DNA, 573 bp, Pedobacter sp. PACM 27299
atgagtaattttgaagataaaacaaagccttattccaaggccatcatcaggctgctgaaaggcccggtgtactcccaatccagtgtttgggaagatattattcattaccagcgagagattcaacactatctgaatgtgattggtctggagctgatcttgaaaaaagaagaaggtctggctttctttaaacagtttgaaaataatgaaggccatacgatgggattgatctcccgtcgccagattggctttgaaacctctatcgtgctggtgattttgcgccagatgctcgaagatttcgacaacaatcctacgttaatcgatggcaatgagaaatttatcagccataaagagatccgtgaagagattgaactgttcctgccagaaaaatataaccgcgtgaaattcctgaaagaactggacagctatatccgcaaagttgtggagctgggctatttgaaagagcagcaggaaaccgatgcagagccgatttacaagattcaacgcatcattaaggaaaaagtaacattggatgttttaaaagattttaaactgaaactggaggaatatgtatag

SEQ ID NO: 47750 - DNA, 3402 bp, Pedobacter sp. PACM 27299
atgtatagtttatttagcacgagttccgacaaagcaggctaccgtctgcaatacatggaagtgtacaattggggaacatttgatggggagattttcaagatttcgcctaaaggaaacaattccctgctgacaggtgcaaatgcctccggtaaaagtacatttattgatgctttgctcactttgctggttccagtgaaaggagatcgattttataaccaaagttctggagtagagaaaaaaggagataggacggaagagacctatgtatatggtcattatggtaatattcagaacgaaggggagctaaaagcaacgactcaaaagctgagagaccataccgcttactccgtattattagcctcatttgaaaatacagaaggacaggtgatcacgctgttccaggtgcgctggtttagcaatggagagctgaaaagaagtttcggaattgcccatgtgcccctggaaattgaaaaagactttggccagtttgatggtaaagggatttggaagagacgcctggataaaatatacaactatgcggtttctaaaaagcgggtagagtttttggatggaccaacgaagtatgcggagagattggcatacttgttcggaatgcgttccgtaaatgccttaagcctgttcaatcaggtggtaggggtgaaggtgctggaagacctggatgaatttatccgcatgaacatgctggaatatcaggatgcagaagcggaatttatccagctgaaagagagttttatcaccctgatggatgcgaaaacaaacatcgaaaaggcgaaagaacagattgcacaattgataccaataaatgacatggctactcagcttgctgaaattgaagccaaactggaagtgctgcagaaagacaaggatactgcggtattctggttcgccggaaaaggagtagagctgatcactgccaagctggataaaaacaaagaggtgctgcagcaattaaaagcagacctgatccagctgaaggaaaaggatgaagctgcaaggaagcaggaaagagcgctttctatgtccattgaaaatgaagaggtttggaaacaaattgaaaagattgaagaggagatcaagcaggcggagaaactaaggaaccaccgtcagcataaactagaaagctacaaccgtttggtggcagcgctagatctccctcaaaatccagatgcaattgtatttgccgattccagagctttaacacaagaaaagcgatcggaaggtgatgcacagcgcgaactggaagaagaaaagaaaagacaaattaagaatgagatcgaccgtctgcaggaagaagtagataacttgctggcagtagtaggttctcttcaaaaaaataaaaacaacatctccggtagagaagcagacatcagggaggatatcctggctcatgtaggcgctactaaagacgaattgccatttattggggagttgattcgcgtaagggaagaagacctggaatgggagccagcgatagaaaaagtgctccataatttcgctttgaggctgattgttcctgaaaagtattacaatgaggtcaatgcgtatgtgaatcgtacgaacttgaaagggcggattacttaccagcgctacaaaggatttacttcgatgggcagcctgaaaagaaggtcttatgagggagacttattggtcaacaaactggaatttaaagatggttctgtgtatgcagaatggttagaagatgcgattgccggacaatacaattacagctgtgccgaaagtctggaagaatttaaccgctatgaagaaaaagcactgacgaaagaaggactgatcaatgcggtaaaaggaaaacatgaaaaagacgaccgtccgcatattgccagaagagagaactttgtactcggatgggacaataaggataaaatcaacctcctgaaacaggagttgtcagttttccaggaaaagcaaaaagaaaatcagcagcagctggaattcatcaaccaatccatcaaaaagatcgatgagctgaaagagaaattctaccagctgtattctgattatgcggtgtttgaagacctgaactgggcggtttatgccacagaaattgaagagaaaaagacggtaaaagaaagcctggagaaaactaatgataaggttagggagctgcagaaacaactggaaatcgtaaaagggcagttagatgccattgataaggaaaaagagcgcagcgtgaagctaaagcacgatacggaatggatgaagcagagcctggagaaggaactgaccgcgaacaaggaaactctggtcttgtttgaaggacaccatccggaagtggccgaatttgaagcgactcatgaacatttattgaacattcagcatgtcaactttaaggcagtacaggatactttcagggagcagaatatgaaccttggaaatgaccttcgctctgaaaagcataagaaagaaaatgcggcgagaattaaaatcaataacttcaagcagcccagtgaacagctgacccagaagtttaaagattggcgttctgatgtgaatggattgccggattctacgaacctggagtttattgcggagtatcaaaaacgtttgcagcagctcaaagaagacaatctgccgaaatatgagcagaagtttgaagcttacctgcaggaaaccatcatcaataagattggtgatttcaggatgttcttcgaaaactgggcggaatccatcaaggaaaacgtaaaagtattgaacgaagcgctattcgagattgattttaaaagcacgccgaaaacctatattcagttggtcgccccagatcggatttatgaagatgtgaaaacttttagagcactgctaaataacgcaattcctaacggacaagaaggggaagatttgattgaaggtaagaagttgcatttcgacagacatattgagccgctaattgagaagttagaaaaagaagaatggcgcaaaaaagtgatggacgtgcgttcctggtatagctataaagcagaagagttttataaagaaaccggccagaagtataagacttatgaaaacatgggccagctttctggtggagaaaaagcacagctgacctatacgattttgggttctgcgattgcctaccaattcggactcacgaaagaaggattgcaaaataattccttccgttttatcgccatcgatgaagcttttaaagcccaggatgaggataaagcacgttatctgatcactttatgcagacagcttcatttacagctgctggtggtaacgcctagtgataacatccatattgtggaaaatgacatctcatttgtccacttcgtggagcgtaaagatgaaagacattcctggttgtatgacatgccaattgaacagtttaaagcagaaagagcgcattttgtgaaagattag

SEQ ID NO: 47751 - DNA, 714 bp, Xylella fastidiosa
atgaaggacacgctgtatgagagtgatgtcgtagcgaccccacgcaacgcactgccgacagtgcccgaactgtcacacctgatggtgtacttgctcaaaggggtgctgtaccgcaaccaagaagaacgcctatggtccagcttgctgcgtctacagacacaggtcagagaacacaccgccgtgctgtggctggatctagtactggacgaggccgaaggctacgccttcctaaagagccgccccgacccggacgccgccgaaggcagtgcccgcccgcctcggctgatcgtacgtcgcgcgctgccctacaaggtgagcctgatgctggcgctgctgcgcaaacgcatggcggagtccgatgcgcgcggcggtgccccccggctggtgctgacacgcgaggagattgccgaactgatgcgggtgttcctgcccgacgccaccaacgaggcacggctcattgatcagctcgacacgaccatcaagagggtggtcgagctggggtttttgcgccccttgccctccccctccagcagcacaccaaaccataacaactacgaagtaagccgcatcttgaaagcctttgtagatgcccaatggctggccgaattcgatgcacgcttggaggcctatcatgccgtgccatcggacgatcaagacgatcaagacgaacctgacaccacgcctgaagcacaaggggagtcaggcgatgcgtga

SEQ ID NO: 47752 - DNA, 3387 bp, Xylella fastidiosa
atgcgtgagacctccacactcggcctaaatttcgttgccaatgacaagcgtgtcggcttccggctacagcacctagaagtagtgaactggggcaccttcaacacccgtgtgtggtgctacaccctgggcgggcgcagcggcctgctgaccggcgacatcggttcgggcaagtccacactgattgacgcaatcaccaccctgttggtgccagcgcagcgcgtggcctacaacaaggccgctggggccgatgcccgcgaacgctcgttgcgctcctacgtgttgggctactacaagagcgaacgcaacgatgccaccggcaccgctaagcccgtagcactgcgcggcacgtcggactactccgtcatcctcggcgtcttccacaacgtcggctatgacaaggtcatcaccctggcccaggtcttctggctgaaggactcgcaaagccagcctgcccgactgttcgtggtggcagaacgcgcccttggcatcgccacggacttcaacaacttgggcggcgacatcaagaccctacgtaagaagcttcgcggtgcagggtgcgagctgttcgacagcttcccaccctacggggcgtggtttcgccgacgcttcggcatccaacacgagcaagcgttggagctgttccaccaaaccgtctcaatgaagtccgtgggcaatctcaccgacttcgtgtgcagccacatgctagaaccctgtgatatgggtagccgcattgaggcgttgatctgccacttcgacgacctggaccgggcgtatcaagccgtgctcacagccaagcagcaggtgaagttgctcgcccccctggtcgacgacggcaagaagcaccagtcgcagctagccaacattcaaaccttggaagctggacgtgacacactgcggccctacttcgcacagctcaagggggaactgctgaagcaccgcctggacgcactggcagccgaagcggcccagctaactgtggagatccagcgcctggaagaacagcgcaaggccgtagacagtgaagtcacccaactgcaacaggcactgcgagacaacggcggcgaccgcctggaagcgctggcggcagagattgagcaactggagcaaaccaaggcacaacgccaaaagaagtccgaccgctaccaaacgctactgaccaagattgacgagacagcgccagccgatgcaataggcttctccacccagcaacagcgctttgcgcaacataccgaggaattaaacgcagccattgcgacgttgcataacgacaagagtgagaaggactttgcgctccgcaatgctcggaaagatcacaccaccctattggcagaaatcaacagcctgcaacagcgccagagcaacatcagcgccgcccagatcggcatccgtcatgatctgtgtatggcattgtccattgatgcggaggcattgcctttcgcgggcgaactcatccaggtgcgtgaggacgcgcgcgattgggaaggcgccgccgagcggttgctacacagctttggcctcaccctgctggttccggacgcgtactacaaggctgtggccgagtgggtgaaccgcgagcagttgcagcgccgtctggtgtatttccatatgcgtccacgcaatacgacgcaggatgcagcgttacatgcgcagtcgctggtacacaaactcatcatcaaaccggagtcaccacactacacgtggctgcgacaggaacttcagcggcgctgcaacgtcgtctgctgtgacaccatggagcagttccatcgtgaggtccgcgccatcacgcaggcgggccagatcaaagaccccagtggccgccatgagaaggacgaccgccatcgcattgacgaccgcagccgctacgtcctcggctggagcgaagacagcatcaccgcattgggacaagacctcggcaccattcagcgggaatgccagaaacaacaggaacggctggatgcactcaacaagctgggggagtacccggactttgcggacatcgactggatgagcctggtccgccagatggccggacgcaaagaggaacaggaacagctccaagccacatctaacattttgcaaatcctgcaacagcaactcacagaggcgaagacgcaagtcaacgtactgcagggcaagtgggaaaacgcattgagcgaacagggcgaggtcaagagcaaacaaaaaacggcgcagcagatgtggaatcaggcccgtagcgcttgggatgatgcgccgctaagccaagcgcagatcgcgctattggctggctggcgccagcaagcgctgggggagcacgtgctatcggtcgaatcttgcgacaaccacgagcagcaagttcgccaatggctacaaaaacgtattgatgcggagaacgctcacctgagacaactgaatgaccgtattacaggcgccatgcaccgcttcaaagatcagttcaaggctgagaccgtggagatggacgcagacttggcggcgctgccagagtatgaacggatgctcaacggcttacagaaggacgacctgccccgattcgaggcgcgcttcaaagcactgctgaacgtcaacaccatcaacgagatcgccagctttaacgcccaactcaaccgtgagcgggagacgatcaccgagcgcatcaaggacatcaatcaatcgctgtacggcattgactacaaccaggatcactacatcaaccaatcactgcacggcattgactacaaaagggggcgctacatcacgctgctggcacaacccagcccggacgctgagatccgcgacttccagcaggatctacgggcatgtaccgaaggtacgttgaccggttcggacgatgaacagtattcggacgccaaattcctccaggtcaagcacatcattgaccgcttccggggccgtgaagggctgtcggatgccgaccggcgctggacggccaaggtcaccgacgtgcgcaactggtttgtgttttcggccagcgagcgctggcgcgccgatgagagcgagtacgagcactacgccgactcgggcggtaaatctggcggccagaaagaaaagctggcctacaccgtgttggcggcaagcctggcctaccagtttgggctgaagtgggatgaggtgcgttcagaatcgttccgcttcgtgattattgatgaggcgttcgggcgcggctcggacgagtcagccgagtacgggctgcgcctattccaaaagctcaacctgcaattgttgatcgtgacgccgctgcagaagattcacatcattgagccgttcgtctccagcgtgggattcgtgcacaacaagggcgggtgcgactcgcagctacgctgcctgtcgattgaggagtaccaggcggagaaaaccaatggaagcggaccgagaggcgacgcccgatga

SEQ ID NO: 47753 - DNA, 1218 bp, Xylella fastidiosa
atgagttgggccacaccagtcagcctgcgcgcccaggtggaacgcctgtggaagcggggcgacttgctgcgggcgctggtcacggacacacacgccatgacgtggccgcaccacctgaagctgcgggcacccaacgctgcggatctgtccgagcgctttcaggcggtgcgtgattgggtgcaggccatcgttggcaccccgcagattcggatccaatggcgggaatggaagcaccgcgtccaagggacacaacaggttcctgcagccgtctatctggacaccctgcaagacgcgttggctttcatcggtaagacgcatgaagcgctgcagtttgaagcggtgtggcagcagaccgcagccgcgcagccagtgctcctggcgtggctgttacgacgcccgacccaagcgctggaggtggccgaccgctgggaacgtcttttagccgtggtcgcctggcttcaggcgcatcctcgtccaggcgtttacctgcgccaagtagatgtgcacggggtggacagcaaattcattgagacgcacaaaagcgtgttgaccgcgctgctggacttggcgttgccgccagagagtatcgagacggccgccagcggcgtgcttcagttcacgcgccgcttcggcttcctcgacaagcctgtgccgatccggtttcgtctgcttgacgccgcgcagcccagcctgccgggctgcacagggctgccggacatcagcctagacgcggctcacttcgcggcactgacgctccctatcacgcgcgtcttcatcatcgagaacgaaatcagcttcctcaccttccccaaggtggccggtgcgatcgtcatcttcggcgctggctacggctgggagccgctggcacgcgccgcgtggctgcatgcctgccaactgcactactggggtgatatggatacccacggcttcgtcatccttaaccggctgcgtggctactttgggcacgtgacttctgtgctcatggaccaggacacattgttggcgcatcgcttgtactgggacaaggaatccgagccgacgcgtcaggccttggagcacctcaccacggaagaggctgccgtctacgatgacctgcgatacgatcgccaccagcccaggctgcgcctggagcaggagcggattggctttcgctgggtgtgcgatcggctggcctgcttgctctcaacagcccacgtagcaccaccccaggatgcgtaa

SEQ ID NO: 47754 - DNA, 1353 bp, Pseudomonas aeruginosa; identical to SEQ ID NO: 44235

SEQ ID NO: 47755 - DNA, 663 bp, Pseudomonas aeruginosa
atggatgatgaacagcctctcatgagcgccgctgtacaggtcgatgagcgccggacgccgcaacgggtacgggaggccgtacaggaaatgctcaagtacggtctgctggaagagagtcacaagcccaacctgtatcgctcagcgctttccaatatcgaggcggtcgacagaatcctggagccgctcgaccttgccatgggggtcgacgaggttcgggggctgttgttcgttatcgttcgccagggcgaggtggccgagcaggatgactggtcgcaccccctagtgcgtcggcaaaggctgaatctggagcagtctctgctgatagccatcctgcgccagcagttcatcgcctacgaacaggaaagcggtacgggcgccagtcaggcatcggtagtggtcgatgagctgattccccaattgcaggtttacctaggcgagctgggcagtgaggcaaaggagcgcaatcgcatcatcacgctgctggatcagctcaaggggcatggcctggtgtcggctttggatgcccatgatcgcgtcatcatccgtcccatcattacccacttggctaacccggagaacctgcaggcactcgtggcatggctgcgagagcaggtggagggcgcggcgacgccggctgccgatggcgaggaggatatggcatga

SEQ ID NO: 47756 - DNA, 2940 bp, Pseudomonas aeruginosa
ctgggggccgtgatctggttcgaaggcacaagctcctcggcatcggatctgaaaaaactgtggctgttaagcgagtcccccgagcagactctggagcattggctcagccagcatcacgcaggcggtatgcgggctttgcgtcagatggagaaggatgggacgggtatctggccttatcccagcaagaaagctttcttggccaggctgagggattacttcgaggtcggtgaaaacgcattcaccttgctcaaccgcgctgccggcctgaagcagctcaatagcattgacgagatctttcgcgagttggtgctggatgaccgttccgccttcgagcgggccgccgaggtcgccggcagcttcgatgatctaaccgacattcaccgagaactggaaacggctagaaagcagcagcgctcattgcaaccggtcgccgatggctgggagcgttaccaggtcttgcaagaacagctgcacgataagcaggctctcgaaggtatcctcccggtttggttcgccgagcaggggtatcgactgtggttggctgaaaccaacaggctcgagaaggagtacaaaaaggccgaactggatcaggagcaatgcaaaagtcagcttgaggcccagaaaggtgtggtcgatcaacatcgccagcgctacctgcgagtagggggcgcagggatagatcaattgcgcgagcgcatcgctgattgggtgagggagtgcgataagcgcagcctgaaagccgagcaataccaactcttggccaaaggccttggactagcggatgagttatcggccgctgctctcaaggagaatcagcagcatatcgcggcacgcctggaaatactggaccaacaaattactgacgcgcgccaaaaggcgttcgacgcaggcctcgtccagcaggaactcaatggtcgcctacagaccttacagcaggagggtgctgaggttgagaaacggccaggctcgaacctgcccgggcaatttcatgctttccgaagcgatctggcgcaggcgcttggtgtcaatgagtcggccctgcctttcgttgccgagctggtgcaggtcaagcccgaggagctggactggcgtggcgccatcgagcgggcaatcggtagccaccggctacgcatcctggtgccgcaggactcatcccaggccgcactgcgttgggtgaatcaacggcacaaccgcttgcatgtgcgcttgttggaggtacaggagccgacgtcgcgccccgtgttcttcgacgatggttttacccgcaagctgaccttcaaggagcatccgtaccgagaagccataaaggcactgctggcggacaatgaccgccactgcgtcgaaagcccggagcaattacgtcatacccctcatgccatgacggcccaggggctgatgtcgggcaaagaacgcttcttcgacaagcaggaccagaagcgtctggacgaagactggctgaccggcttcgataaccgtgaccgtctggccttcctggctgagcagattcgcgaggtcaatgagcagctcgagccagccaagctcgccttggatgctgcccagggcgacgttcgtcagttggagactcaagcttcgctgctgaatcgtgtcaaagaactgcagttcgaggatattgatctgccgggtgcccagagtcagctggagtcgctgcgtacgcaactggccaccctgacgcgccccgattctaaccttgccatgatcaaggtcgagctggatgcggccgaggccctgcaggagtctctggatcaacagctccgccaactgatcgaacagtacgttcagttaaaaactcagtttgaccaggccgcatccgctacccgtaaggcctataacagcgcggagaaagggctgaacgatacgcagcgtgaactggcgcaagcgcatttcccgactctgaccgcggatgacctcggcgatattgtcgagctggagcgcaagcatacgcgtgagcttcaagggcagctcaaagcgcttggcgagaaactgggcgatcagaaatcagagcttgccaaacgtatgtctgatgccctcaaggtagacaccggggcgcttgcagaggtcgggcgagagctggtggatgtccccaggtatctggagcgtctgcgtgtgctgaccgaggaagccttgccagagaaactcaagcgcttcctggaatacctcaatcgctcctcggatgacggcgtcacccaactgctcagctatatcgaccatgaagtctcgatgatcgaggaacgcctggatgacctgaatagtacgatgcagcgtgtcgactttcagcccggacgctatctgcgcctggttgcaggcaaggtcatccatgaaagcctgcgtaccctgcagcgcgcccagcgccaactgaactcggcgcgtttcatcgatgatgaaggcgagagccattacaaggcattgcaggatctcgtggggttgctcaaggacgcctgcgaacacagcaggaatcagggagccaaggcgcttctggatccgcgcttccgcctggagttcgcagtatcggtgatcgatcgagaaagcaggaatgtcatcgaaacccgaacaggttctcagggcggtagcggtggcgagaaggagatcattgcctcctacgtgctgaccgcttccctgagctatgcgctttgtcccgacggcagcagccggccgttgttcggcaccatcgttctcgacgaggcgttctcgcgcagctcccatgcggttgcaggtcggatcatcgctgcgttgagggaattcggcctgcacgctgtcttcatcacgcccaacaaggaaatgcgcctgttacgccaccacacgcgttcggcagtcgtcgttcatcggcgcggcctggagtccagtctggtttccctgagctgggaagctttggatgagcatcatcaacagcgcatcaaggctatgcatgaagtcgcccactga

SEQ ID NO: 47757 - DNA, 1182 bp, Pseudomonas aeruginosa; identical to SEQ ID NO: 44163

SEQ ID NO: 47758 - DNA, 1734 bp, Frigoribacterium sp. Leaf8
gtgaaccacccgtcggggcacgacgacgccctgagccgcgacgacgtgcgcgcggcgtacgaagacgaccccacctgggccctgctccgcggctacaacgcccgctggatgctgccgctcttctcccgccacctcgagcacgccgagggtccggtgtcggccgactggttccaccggcaggtcgccgacgccctcgagcagaacacggccgagcaggcggcgtccgagcaggccgcactcgagcaggcggcgtccgagcaggccgcccccgagcacccgacgtccgagcgggcgacgaccgagcgggaccccgaggaggcgcggcccgcgtccccgacgcccgtcgccacgccggcccccgccgagcagaagaccaccccggccgagtactgccgcagctgggtcgagagccgctggctcgtccgcacccgcgcctccggaccggacgcccgcgccgagtaccgcctgtcgccgcacgcgctcaaggcgctgcgcctcgtgcgcgacctcgtcgagcgtgacaacgccgtcagcgaggcccgcctcggcagcatcgcccacgccgtcgggcagctcgcgggcctcgccgaccccagccgcgggtcgcagctcacccggctcgacgagcagatcgccgagctcgagcgccgcaaggccgagatcgagcggcacggcaccgagcccaccgctcccgacgtgctgcgccgtcaggtccgcgaggtggtgcgtctgaccgcgtcgctgcccgaggacttccgccagctcggcgccatggtcgagcagcggcaccgcgaggtcgcgcgccgggcctcgtccgaacacgtcggcaagggcgcgctcgtcgaccagtacctgcgcgacaacgacctgctcgagcagacccccgagggacgcgcgtaccgcggcttcgcccagatgctgtcgtcgcgcgggatcgacgtcatgcgcgccgacatcgagaaggtcctcgcccagcccgacgcggccgcgcagctcaccgagcggcagcgcacgcagctcgagtcgctcatctcgtcgctgctcgccgaagagcagagcgtgcaagagacgtacggccggtggacgtcctcgctgcggcgcttcctcagccggtcgggctccgaccagcagcagcgcctgctcaccctcgccgaccgggcgctgcacgcgggcggcgtctgggccgagcgccggccgggccacgccatgctgcccgtcgagcacggcgacgggctcggcctcggggcgctcgacgtccgtgacgtcagccaggtgcagctgcacaccgatcgcgcgcggccgacggtcgacgtgcaggtgaccatcggcgacgcgaccctgccggaggccgaccgggccgccctccgcctcacctcgggcacgagcacggcggccgtgtcggcgacgatcgaccggctgctcgtcgaccgcgacgaggtcacgagcggcgacgtctaccaggcgaccgagcccgggttccgccgcctcgcgctcgtcctcagcatgctcgacctggcgctcgagcgcggcgtcgtcggcgacgacaccgagaccgtcgagctcgtcggcgatcccgccgaccccacgacgtcaggaggcgcgggtcggcaggtcacgctgccccgcctcgtcttccgacgcggtcccgcgggtccgcccggggccgagccgggcgtcgagcccgacgcccccgaccccacgaccggcacgaccagcacgaaggacctcgcatga

SEQ ID NO: 47759 - DNA, 1005 bp, Frigoribacterium sp. Leaf8
atgagccccgcagccccctgggacgagaccggcgtcgacgaggcgacccgcgcctcctcggccgaggcgaccgccacctcccccgacgagtcggcgcgcgcctcccgcgatgccttcgacgacggcgacgccgacgacgcggcggccggtggcgtcccggacgcgctaccgctggccggacgcaaggcgctcgtcacgctgctgacccaccggttcgtgtcccgcgcgcggcagcaggaggcctgggcgggcctactcgcgcacgaacccgagatccgggcgcggctcgaggagctgttcctggtgctggtcgtcgaccacgaccacgaggtcgccttcaagcgacagggcggcgaggacgacgtgcccgtgctgctgcgccgcgagaagccgctgtcgcgcgacgcctcgctgctgatggtcttcgcccgccgggagcacgccttcacggacgggcaagacgaggcggtcgtgatctcgaaggacgccgtggccgagttcctcggtcggtaccacgacgactcgggctccgacgaggtgcgcgcccgccgccgggtcgacgccgcgatcgccgcgctcgtcgcccgcgacctgctgacggccgagcccgacgaccccgaactgttcgtggtctcgcccgcgatcgtgccgctgatgaccgccgaccgactcgcgcacctcgagcgggtgtacctcgaggcggcaggcgtcgagggcgacccgaccgatggggacgaggtcggcatccccgtcgatgcggacgcggccgaagcggaggtcgacgccgacatcgatgccgacgccgacgccgacgctgacgagcccgaggtcgaggtcgaacccgatcccgccgacgacgaccccgcggacacggtggaggacacccccgacgccgaacccgacccgaccgccgtcccgctcgacctcgacctcgacctcgagcccgcgcccgcgcacgacgccggcaccggcaccgacaccgacacggaagcaccccaggcatga

SEQ ID NO: 47760 - DNA, 3456 bp, Frigoribacterium sp. Leaf8
atgagcatcgccgacaccccgcccgacctcggcatgttccactcgggccagtaccgcatcgagcaggtgcagctgctcaactggggcagctacgccggcctgcaccgcatgcccgtggggcgcggcggcatcgccatcctcggccccaccggtcgcggcaagtccaccgtgctcgacgcgatggccgcggtcatcatgcccaacccgcaggagttcaaccgggccgcccgcgacgacagccggcagcggtccgagcgcaccgtctacagctacgcgcgcggcaagaccgacgaggtccgcgacgccgcctccgaccgcacgacgacgcggttcctgcgtccgctcggccaggcgttcccgagcggtgcggccatcacctggtccaccgaactcggccagacggtcacggccgtccgcgtcgcctggatcggcgaggacaccgccagccaggacgacgtcacccaggcgagcgtctacctgctcgtgcagggccgcttcgacctcagccggctgtccgaggtgacgcgcgagggcacgagccagaaccccctgacccgtggctccctcgcccgcctgctcgaccccgcccacgacctcgcgacctcgtcgcagcccgagctgcgggtgcggttgtgcggtcagctcggcatcggcggcagcgacgagtcgcagctcaaggccctgaccctgctgcgtcgggcgcaggcgtcgaagggcgtgttctcgatcgacgacctgttcaagcagttcgtgctcgtgcagccgcaggcgctcagccgctgggagaccacgctcgccacctatcgcgaggcctcggcgctctacgacgtgttcgagacgacccgcaagaagctcgacgtgctcgaggccgtgccgacgctcgccgaccggtacgagctcgccggacgcgacggctcggccaagcgccgcctgctggtcgacgacgacgggccgagccggctccgcatctggttggccgaacgcgtcggcagctgggtcagcggcgaggtcgaccgcgtcacgaccgacaagcgcgagcagggcgaacgccggaggcgcgcccaggcggacgagcagctcgcgttccggtcccgtgaacaggccctggcgcggatcagcgagctcgggggcgaccccacgcagtcgctccgcgagcacgtggccgccgccgaggccgagctcgccgccgtcgagcgcacccgcggccggctcgccgccgcactcgacgggaccggcgcgtccctcccccgcgacgacgagcagctcgccgcgctcgggcagcgtgccgaccgcctctcggccgacgacgcggccgcccgggccgcgaccgccgacgcccggagcgacctcgccgcccgcatcggcgagacgaagcggtcgctggccgccctcgagaagcagaaacggtcgttcgaacagcgccgcagcaacgtgcccgacgacgcgatcgagcgacgccggcgcatcgccgagggggcgggcgtgccggtgtcggacctgccctacgccggcgagctgttcgaggtcgcgcccgagcacgccgggtgggccgtcgcgatcgagcgcgtgctcggcgacctcgccacgcacctcctcgtggaccgcgcgcacttcgacgccgtgcgccgctgggtggacgagaacgacgtgcggggacgcgtcacgctcgtgccggcgaccaccggggccgagccgacgctcaccccggtcgaccgcaccgtgcccgtcatggtgcggctcgacccggccagcccgttccgtggctggctccacgacgagctcgtcgccgaccgcagcgtgctctgcgtcgagggtcccgacgacctcggcggcccccgcccgaccggcacccgcggcgccgtgacccggcgcggcctccgcaccggctcgcgggaccgcgtgatcaaggacgaccggtcgacccgttcgtggatcgggctcgacaacgcggcccggatcgccgagctcggcgacgagatcgtggacctcgaggccgtgctggcccgggtccgcgccgagtacgacgcgatcgaggccgaggcggtcgaacgccgtcgcgtcgccgacgccgtcgcccgcgcgaaggagttcacctgggacgagctcgacaccgcccccgcgcaggcgaggctcgacgacctgcgcgcccagctggaccgcatcgccgtcgagcgtcccgaactggccacgttgcaggccgaggccgcgcagcacgacgacgaccgctcggccgcgacgcgccgcctggccgagatcgaccaggtgctcgcgcagctcgacgagaagcacgcgacgctcgtcgacatcgaggacgagttcgcggacgccgccgacgccgaccccctgaccgacgacgagcgggcactcctcgccccgctgccgttcgcggcaccgcgtgaggcgaccgacgtcgtgcggctgtaccgggacgcggcgtcgcagctgcgggcccaggtcgacgcgcacgaccgcgaccgggcgaacgccgagtcgacgctcgtcgtcgtcttcgagcggtacctcgaactcgaccgcaccgcgggcatcgacgccacgatcgagagcctgccggcggtccgggcgatccaccggcagctcgtcgaggacgacctgccccgcgcgagacagcgctggctcgagagggccggcagcgacgtgggcgacagccttcgggcgctgctcgtccagatcgaggaggacggccacgtcatccgccgcggcgtccgccccatctcgcaggccctgcggtcgatcgagttccggcagggctcgacgctcgacatcgagccgcggccggtgtcgaacggcgacctgctcgagttcaagcggaccctgcgcgagcacaccggcggggccgggagcgagggcacgtccgaggcacgctccgcggacggacgggccccggaggcgcgggacgcgtccgaggtcgagcgccggttcctgaggctccgccgcgacctcgcccacctcgaggagaagtcgaaggtcggtgacgcctggcgccggcgggtgctggacgcgcgggagcactaccagttccgggcgatcgagacccgcgccgacggaacgcagatcgtgcacgagggcgtggccggcaagtccggtggcgaggggcaggagctcatcgcgttcgtgctgggggccgccctgcggttccggctgggagacggcaccgaccgggtgccgacctacgcgccgatcgtcctcgacgagggcttcgtcaaggccgacgccgagtacaccggccgggccctggcggcgctgacctccctgggcttccagctcgtggtgggcgcgccgcgcgacaaggtcaacgccttcgagcagcacgtcgagagcgtggcgtacatctcgagtgatccgtcgaatcccgagctgtcgcgcatctaccccttgaccatccggcaggcgatccaggtcgagcagcacggtctcgaccccgccgcgctcgcctga

SEQ ID NO: 47761 - DNA, 1506 bp, Microbacterium sp. Leaf203
gtgagcagcacccgaaccgaagccgcgtacctgcgctcggtgacggcgttcaagaacccgacgctcgatctgctgcacgggcgattcgccccgttcgtcgtcgcggtgctgtcgatcgtgttcacccccgatcgccccgccgtcgcggtcgccgacgcccacgtcgaagtcgccgaggcgatcgacgaattgcgcgccgccggcatcgacaccgacgacgaccgccgcatccccgccggtaccgcgcgcgagatctgccgcgggtgggtgcgcgtgggctggctcggcctgcagatcgaagacgacgtcgaggtctaccgcctgtcggcgcacgccgtcggcgccctcgagatcgccggtcgtgcgggcggcggccgggcgcgggtctcgcgctcgcgcgtgcggacgctgctcgacgccgtcgaccgcctcgcgcgcgacgccgagagcgatcccgcgcggcgccgagaggccctgctcgaggaacgggcggctctggatgccgagatcgcggcgctcgacgggggcgtcgtcgaaccgctcgacgacgaccacctgctcgaagaggccgagaacgtcatccacctcgcgcgcgaactgcctgccgatttctcgcgcgtggccgaatccatcgccgcgatgcagcgcgacgtcgtggccgaactccgtcgtgatgtgcgccccaccggcgatgtgctgcgcgagtacctcgagcgcggtcgccaggtgatgcaggcgacccccgagggccgggcgttccagggagcgctgcgcctgatcggcgaccccgagaacatcgacgacctcaccgaccagctgcacgccgtgctcacccagccgttctcgcgcctgatgacccccgagcagcgcggagagctcgacgcgatcgccaggcgcgtcgaggccggcgtgcaggaggtgctcaccgcccagcgacgcgcctcgcacgtcatcaccgcgcaggtgcgcacgcacgacccgatccgcgaccggcaggtcgacgatctgctgcgctcggtcatggcgggtctgcaccgctggagccagacccgctcccccggtcgcgtcgaaccggtgcgcaccctgcccctcgccgacatcgggcacctgcgccgctcgctcggcgacgtgcgtcctcccggggcgccggcgccgttggcatccggagactccgacgtcgagttcgtcgacgccgacacgcgcgcgtggggcggcccgcactacgccgaactcgaggcgtacgtggccacgcttcccggtggcttcgacctcgcgacggccttcgccggagcggatgccgagacccggcgcccggtcgacctcgtcggcctgctcgagatcgtccaccgcgagggcctggtcgagaccgacgacgtctcgatcgtcgaggccgtccgtcccgacggcaccacccggcgcttcgccttcggcgcggtcatcgccgcgccctctcgcgtctcggacgcggaacccccgactgccacagaaacggatgccgatgactga

SEQ ID NO: 47762 - DNA, 729 bp, Microbacterium sp. Leaf203
atgactgacatcgacccgtccgcccctgacacggacacccccgccttcatcgccccggtggccatggagaacgaccccgacgcgctgttcgcgggcgaccgcggcacgctcgacgccgacgtgcggcgcgtgctggtgcggatccttcagcggcgcttcctcgtggccgacaactcgcccgccgagtggaagctgctgctcgagcaccagcagatgatcgagtcgcgcctgaacgacctgttcgtgcgcctcgtcgtcgaccacgcccgcggcgtcgcctacaaggagcaggtgcgcagcgacgacgtcgacgtgccgatcctgttgaaggacgaggcgtactcgcgcgccgagacgctcgtgctcgtctacctgcgcacggtgttccagcgcgagacgaccgccggcacggcatccgcccgcgtcgacgtcgaagaggtcgagcagaccgtgctcacttacttcagcgagaccgacggcacccgcgcgagccagcagcgggccgtccgcaccgcgatcgcgcgcctcgaccgcgagggcatcatcgaagaggagtccgaggggcgctaccgcatcgggccgctcatcgagatcgtgctcagcgccgaggtgctgcgcgatctgcagcggtggttggaggagcagacacgggatgccgacaccccggcgcccctgatcgatgacgccgagaccgtggcatccggaatcctcgaggaggagcgcgcatga

SEQ ID NO: 47763 - DNA, 3348 bp, Microbacterium sp. Leaf203
atgaccatgctcgagacgctgttcgggctgatccccgcggcctcccgcgggcagcagtgggtcgccgaagacctgcagctgatcaactggggcggatacgacggcacgcaccgcgtgcgcttcgcgccgaccgcgacgctgctgtgcggcggatcgggctcgggcaagtccacgctcatggacgcgtacgtcgcactgatgatgccgcacacgacccccttcaacggcgcctcgaacggcgcggtcgtgggtcgcccgcgcggccaggagcagcgcaacatcctctcctacggccgcggcaagctcgacgagtcgcgcaccgacgagggcaccaaagtgcgggtgctgcgcggcgacggggtcgacacgtggaccgcgatcggcatgacctgggccgaccacgacggcgcgcgcttcacggcggtgcgggcctggtacttccccgccgccgcccgcacgctcgacgacgccgtcaaggtgcgcgcgaccgtgcacggggcgttcgacctgcgccagctcgagcgcgcggcgcagagccacctctccgactcggccgtgcgggcggcgggcctcgacaccctcgcgaccgaccgcgagttctcggcgcggctgcacgccgtgctcggcatcggcgcggcgggagcgggctcgaaggcgatgagcctgctcgcgcgcatccaggccggtcagcagatcaccaccgtcgacgacctctacaagcgcatggtgctcgaagagcccgagacgctcgccgtggccgacgcggtcgtcacgcacttcgacgggctcgagtcgacgcgcacgcgcatgctcgaggcccgccagcaggtgcgggccctgcaaccgatccgcggcatgaagacgcgcatcgacgacgccgccgagcgcctgcgcctgatcgacgcgctcgggcgcttcggcgaccccgagtcgcgcgcctcgctctggcgcgcgcagcgacgggtcgacctgctcgaagcggtcgaggccgagctgcgcgaccgcacgcacgccaccgacgcgctcgtgcgcgaacgccaggccctcgccgacgcggcagaggccgaacgcgaggcactgggcgacgtgctgcgcgcggcgggcggcgaccggctcgacgcggcgcagcgcgaactgcggaccctcgagcggcgcctcgcgggcatgcagcgcgaccgcgaacggttcgaggcggccctcgccgtgctctcggtcgaggtcgccaccgagaagcagttcaccgcgctcgtcgccgaagcgcggcgcaccctcgccgacacgggtgccaagagcgcggtgcgcgacgccttcgtcgctgccagcagccggcacaccgacctgcgccagcagctcgccgccctcgaggtggagcaccgacgcacgcagacccgcgacgacaacatccccccgcgcctgcacgaggcgcgcgaggcgctggccgaggccgcggggctcaccgccgccgagctgcccttcgtcgccgagctcgtcgacgtgcgcaccgaattcgaaccgtggcgcggggcgttcaccctcgcgctgggcggattcgcgacgacgctgctcgtcgatgccgcgcacctctctgcgttccgcgccgcgatcgacagcgtgcgactctcggagcgcctccgattcgagggtgttcctaccgacctccccgagcgcggggcgctggacccggcgaccctgcccgggcgcctggagttccgttcctcgcacttcaccggctggctgcaggaccgcctcgagcagcagttcgcgttcgtctgcgtggatgccgcgtcggagctctcacagcaccgcatggcgctcacgatctcgggccagacgagtcagggcgcccgcggcgcccacggcggctcggcgcggcagagcatcctcggtttctcgtcccgcgtgcgcctcaccgagctcggcgagcagatcgtcaccgtccggcgcgacctcaccgccgccaaggccgcggtcgacgaggccgccgccgccctcgacgccttcgacgaccggcgcggcgcccttgagaagatcgcggacctgtcgtgggaccaggtcgacgtggcatccgtcgaacgcgatctcgaccgctggaacgaaaccgtcgtcgaggtcaccgcgggaaacccccgcatcgccgagctgcaggagcagatctcgggcgcgaaggcccgcgtcgcgcgcctgcgcgaggagatcggcggagccaagaccgagcagcagaccctcgccgcccgctgggccgagatcaccgacgacgtggatgccgcgcagatcctgctcgaacgggccgaggaccgtgagatgacgctcacccccgacgaggtcgcgtacctcgacgggctgttcgtggcgccctccggcgatgacgtctcgccctcgcagcggctcgcgcggttcgacgccgccctcgagtcggcgtcgaagcgtctgctcgaggaacagcgtgcgacccaggagacgtggagcgaccagcgcgagagcctccgccgcacgatgaccgcgttcaccgaccggtggccgagccccaacctgctcgccgaccccgatgaggcgctcggcgacttcgagcggatcctcagcgagctcgaggccagcggcctgcacgaactcgaagcggaatggcgcgactcgctgctgcgcctgtcgggcaacgacctcacgagcctcgactcggcgctcacgcgcgccctgcgcgagatccgcgagcgcatcgccccgatcaacgacatcatgcaggacctgccgttctacgacgacgaccaccgcctccagatcgttccgcgcgagagccagtcggaggtgcgcaagcgcttccgccgcgagctgcgcgacgttcgcgcggcgatcgacgcggcctcaacagacgaggagcgcgagggcgtgtacgggcgcatggcgcggttgatcaaccgcatccgccccaccgcccccgacttcgccgacctcgtcgacgtgcgcaaccacgtgcgggtcagcgccgagcgcttccgcgccgacacgggcgagcacgtggcgctctacgaccacatcggcgagaagtcgggcggcgaatcgcaggagctcatcgccttcatcgtgggtgcggccctgcgctaccagctcggggacgccggatcggagcgcccgcgctacgcccccgtcttcctcgacgaggcgctcatcaaggccgacgcgcacttcaccaagcgcgcgatcggcgcctggcgcggcctcggcttccagctcgtcatcggtgcaccgaacgacaagtacagcgcgatcgagccgcacgtcgacgtcgagtacgacatcctcaaggacacccgcgggcgctcgtgggcgaaggcgaaggtgggcgttccgggctga

SEQ ID NO: 47764 - DNA, 1548 bp, Plantibacter sp. Leaf1
gtgggagagatcgacggcgagttcgaccgtgtccggaacgctctggaacggcccgccatccgcttgctgagtcgtcccacggcgccggccgtcgtcgcgatcttccgcaccaccttcgggcgggacgtccagttcgtcgcggccgatcgcttccacctgcaggtggaggagtatctcgcggagctcggagcccgtggcgcccggatcccggcgggcggcgacgagcgcggtggcgggcggaccctctgccgggagtgggtgcacgatcagtggctcgtccggaccagcaccgacgacggcgaggagcagtattcgctcacgtcccacgcgctggaggcggtgtcgctcgtcgacggactggcgcacgaccgggcgttgatcagcgaatcgcggctgacgatgatcctcgactccgtccgtcgctgggcgctgcaggccgaccccgatcgggaggagcacctgcggcgcatcgacgcgcaactcgctgaactccaggcggagcgcgagcgtgtcgcggccggcggaacggtcgtcgcagcgagtgacgaccgcatgcacgacggctacgcgaacatcgccgacctcatccgccagctgccgagcgacttccgccgggtcgaggagtccgtgatcgcgatgcaccggcgcatcgtcgaggacttccggaacgacacgcggccgatcggtgagatcctcgacgactacctccggcgcaccgacgaactgatgacggccaccgccgagggccgtgcgttcgagggcgcgttcgagctgctgcggaacgacgagctgctgcaggacctcaaacgcgacctctcgacgatcctcgaccaccccttctcctcccgcctcggcccggcggagctccggggcttccgcggcgccgtcggcatcatccgtcagggcatcgacgacgtcctcgcgcagcggcgtcggctcaccgcgacgctccgcgaccacatcgtccatcacgacgtcgtccaggaccgcgagctcgacacgacgctgcgcgcgctcaaccagcgactcggcatctggatgcggaccgctggtccccgcgcgacggtggacgtgccgttgctccccgaggcgatcgacgtcgaacacctgcgtgaacgcttctacgaccccgacgtcgaagccgctcccccgccgatcaccacggcgccggaacggacggacgtcgcgtccatgtcactcgacaccttgcgctcgcagggcggccccctgctcgacgagctccgagccgggttgctcgcggcggcgacgtccggagcctcggacgcccacacggcgttcaccgggctcgaccccgagctgcggcgccccgtcgaactgttcggtctggtccacctgatgacgcagctcggcgcgtacgacgaggcgggtccccgacgccgctatgagacggtccgccccgacgggacgacggcggccttcgaccttccggccttccccctcggcgagaccggcatcaccggcttgacccgggccacgacgacctcgaccacggcgacccgcgatcgcgcgtcgcgcggaacggaatga

SEQ ID NO: 47765 - DNA, 849 bp, Plantibacter sp. Leaf1
atgaccatcgaaccggaacccacccaccgtgaatcgaccgaggcggcgaccgacggcgccctcagcgctgccccggtcgcgacgccggaccgcgcctcggacgccgagtcgttcgcgctcttcgagggcgacgagggtcgactcgacgccgctcagcgccgcgcgctggtcgccctactgaagcaccggtacgtcagcccggcactgcaaccggccgaatggcggaccatcctcgagtcggaggccctgctcggctcgcggctgaacgagctgttcttggaactccaggtcgatcgatccgccgaggtcgccttcaaacgccaggccggctccgagagcgggcggcggccgttcccgacgctgctccacgacacgagctacagccgtgaggagacgatcctgctcgtctacctgcgcacccggttgcgcaccgaattggcgaacggcgcccgcgccgccatcgtcgagcacgacgaactcctcggcttcgtcgcgagcttccgacccgagcacgccaccgaccgggcccgcgacgacggccgggtggagcgcgcgatcgagaagctgctgaccgcccgcgtgttgcttcgcaccaaggacgcccgtcgtcatcgcatcgcctccgtcgtcgagacgcttctcccgctcgaacgcctccaggagctgctcgagtggctggagacgcagacgcccgcggccgatgcaccgcaacccgagcaggagccggacacgccgtccggtccgggggcagcagccaccgatggagacgacgacgccgaacccgacgacaccgagccggacgacgtggcatcggacaccgcatcacgaccaggagaggacggacgatga

SEQ ID NO: 47766 - DNA, 3387 bp, Plantibacter sp. Leaf1
atgagccgccccaccgacaccgacaccctgctcgacctcgtcgagcagtggcgcatcgagcgcatgcagctcatcaactggggtgggttcgacgggtaccgctcggtcgacttcgcctcacgggcgacgctcatctccggcgcgtccggcaccggcaagagctcactcatggacgcctacctcgcggtcatgatgccgtcggacgtcccgttcaacggggcgtcgaacgatgcggccgtgggacgagcgcgcaacccggatcagcggaacctgctgacctacctgcgcggcaaggtcgactcggccagagacccccagaccggcgccatgcgcgacatcaacctccgcggatcggagcaactcacctggggcgccgtggcggtcaccttcgtcaatgacgacgaccgccggttcaccgtcgtccgcgcgtacctcgtccctcgacgtgcgctccgcaccggcgacctgtcgatgacgatggcgaccgtcgacggacccttcgacctcaccgagctcgaggccttcgtccccaagcggttcgacgccggtgagctccagggtcggatccccgggttcgtcgtccgcgacacgtacgcggagctgtcctacacgctgcacacccgtctcggcatcggagccggcggtgacggcggccgtgcgatgcggttgttggcgcgcatccaggccgggcagcacctgccgacggtcgacggactgtacaagtcgatggtgctggagcgaccgagcacctatgaggcggccgatcgcgcgctctcccacttcgaggcgctcgacgaggcatacctcgccatggagaccgagagccgcaaggcgcgggtcctggaacggctcggcgaactccgacgggactacgaggacggacaccgggccgcagccgaactcgagcggctcggcttcgctgaagacggcgaaacgcccttcgccgtgtggcgcagtcgtgcgcacgaggcattgctcgacgaggccgtctctcggaaccgccgtgagaaactcgccgccggtgcgaccctcgaggcggctcgagcccgggcgaccgccgccggggtccgggtgcgggagctcgaacgccaggtgtccgagcagggcggcagtgcgctgcgccgggcggaggaacgtcgcgaggcggcggaagcggcccacgccgaggccgtccggacacgagccctgttcgacgagcggaccgaacccctcgacgaaccactccacgatgaggcctcgttcgtggcggcgctcagccgcagcgaggagttcctcgacgacgacgacgcggcactcgaggccatcgaggccgaacgcgccgagctccaccgcgaggcgttcccgctcgaggagcggaacaccgaactccggctcgagctgcagtccctccgtggtcgcgacggcgcggtccccgatcggctccaccgggcgagactcgcgcttgccgaagccgccgggctcgatccggagcagctgccgttcgtcgcggagctcatcgacgtggcgccgacgcacgccgcctggcgtccggcgatcgaggtcaccctgcacggactcgccaggacggtactggtcgacgaggagcacctcgacgcgttcgcgcgggcgatcgacgcggtgcggatcccggtccgcctgcagttcgagggggtgccgctcggcgcgaccacggccccggcgccgggtgatcccgccttcgtctcgggccgcatcacgtacaaggcctccccgttcagtgcctgggtcgagcagcgggtgacgtcggaccgcatcgacgcccgatgcgtcgactcaccgtcccagctctcgggaggtggccgacgcgtcacggccaacggccagctgcgcgacggacgtcgtggctcacacggggatcccggtggggcccccatcctcggcttcacgaacgaggcacggatcgcgtccatcgagtccgagatggccgagctccgcgggcgactcgagctcatcgccggtcgccaggccgcggtccagcggcgcctggcgggcagggaggccgagcgtgcggcccaccgctaccgcctcgacagcgagtggtcgcggatcgatgtcgacggagccgcagcgcgtcgggatgccgccgcggcggacctcgaacgcctgctggacgccagcgacgtcctgcaggagctgcagggttcggtgacggccgcccagcgcgaactcgacgccgcgaacgccgagcggttccccgccgaggaccgcgtccgacgcctggacgaggaacacggttcgctcgtcgaccagcaggacgcggcgacgacggtgatcgaccgcttcgagcgttccggcgtcgacgaggtctccaccgacgacgtcgaacgcatcgaggccgccctcgccgccgtgggaggcgtcccgtccctgggcggcttcgcggacgcgatgaaacggctccgcacccgtctcggtgacgagctgagcgccgccgtccgcctggcggaacaggccgccatcgcccaggtccacgtgttcgagcactaccagtcgatctggcacgaccccaacctcggcacgacgctcgagtcctacggggactaccgcgcgatcctcgacggcatcctcggcaccggcctgcccgagcgccgccaggagtggcgccgccggttgtcccagtggagcggcgaggacctggtccccctcagcagcgcgttcgacagcgcggtcgaggagatcgaggaccggctcgtcccggtcaacgacatcctgcgcgacctcccgttcgggcccgcccacgaccggctgaagatcgtcctccgccgggtgcaccgcgaggaggccgccgccttccgacgggagctccgggcgctctcgggcgaggtgaccgccgaactcgacgacgacgccctggagggccggttccagcgcctgcgccgcttcatggagtcgatgcgggacaccgctgccacgtcgacttcggcgtccacccgcgaccaggtgctcgacgtccgtcgacacgtcgagatcaccgccgtgcggtacgacacctccggtcgcgatgtgagcgtctactcctcgctcggcgacaagagtggtggcgagacccaggagctcgtcgcgttcatcgtcggagccgccctccgctaccagctcggtgacgaggaccggcctcggccgaggttcgcgcccgtcctgctcgacgaaggcttcatcaaggcggactcggagttcgccggccgggccgtggtggcctggctccgtctcgggttccagctcgtgatcggtgccccgctcgacaaggtgacggcgctcgagccatacatggaccgactcctgtccatccggaaggacccggagacacgacacgcctgggtggcggagatcgagcgtgccgagcccgtcgagccgctcgaacggatcgggtga

SEQ ID NO: 47767 - DNA, 1671 bp, Frigoribacterium sp. Leaf44
gtgaaccacccgtcggggcacgacgacgccctgagccgcgacgacgtgcgcgcggcgtacgaagacgaccccacctgggccctgctccgcggctacaacgcccggtggatgctgccgctcttctcccgccacctcgagcacgccgagggtccggtgtcggccgactggttccaccggcaggtcgccgacgccctcgagcagaacgccgccgagcaggcggcgtccgagcgggaccccgaggaggcgcggcccgcgtccccgacgcccgtcgccacgccggcccccaccgagcagaagaccaccccggccgagtactgccgcagctgggtcgagagccgctggctcgtccgcacccgcgcctccggaccggacgcccgtgccgagtaccgcctgtcgccgcacgcgctcaaggcgctgcgtctcgtgcgcgacctcgtcgagcgtgacaacgccgtcagcgaggcccgcctcggcagcatcgcccacgccgtcggacagctcgcgggcctcgccgatcccagccgcgagtcgcaactcgcgcgcctcgacgagcagatcgccgagctcgagcgccgcaaggccgagatcgagcggcacggcaccgaacccaccgctcccgacgtgctgcgccgacaggtgcgcgaggtggtccgtctgaccgcgtcgctgcccgaggacttccggcagctcggcgccatggtcgagcagcggcaccgcgaggtcgcgcgccgggcgtcgtccgaacacgtcggcaagggcgcgctcgtcgaccagtacctgcgcgacaacgacctgctcgagcagacccccgagggacgcgcctaccgcggcttcgcccagatgttgtcgtcgcgcggcatcgacgtgatgcgggccgacatcgagaaggtcctcgcgcaacccgacgccgccgcacagctcaccgagcggcagcgcacgcagctcgagtcgctcatctcgtcgctgctcgccgaagagcagagcgtgcaagagacctacggtcgctggacgtcctcgctgcggcgcttcctcagccggtcgggctccgaccagcagcaacgcctgctcaccctcgccgaccgggcgctgcacgcgggtggcgtctgggccgagcgccggccgggccacgccatgctgccggtcgagcacggcgacgggctcgacctcggggcgctcgacgtccgcgacgtcagccaggtgcagctgcacacggaccgcgcacggccgacggtcgacgtgcaggtgacgatcggcgacgcgaccctgcccgaggccgaccgggccgccctccgcctcacctcgggcacgagcacggcggccgtctcggcgacgatcgaccggctgctcgccgaccacgacgaggtcacgagcgtcgacgtctaccgcgccaccgagcccgagttccgccgcctcgcgctcgtcctcagcatgctcgacctggcgctcgagcgcggcgtcgtcggcgacgacaccgagaccgtcgagctcgtcggcgatcccaccggccccggtgcgtcgtcggacgcgggcccaggaggcgcgggtcggcaggtcacgctgccccgcctcgtcttccggcgcgaccccgcgggcccgcccgacgccgcacccgccgcccccgccgagcccgccctcacgaccagcacgacctccacgaaggacctcgcatga

SEQ ID NO: 47768 - DNA, 981 bp, Frigoribacterium sp. Leaf44
atgagccccgcagccccctcggacgagaccggcgccgacgaggcgacctgcgcctccttcgccgaggcgatcgccccctccggcgacgaatcggcgcgcgcctcccgcgacgccttcgacgacggcgacgccgacgacggggcgaccggcgtcccggacgcgctgccgctggccggacgcaaggcactggtcacgctgctgacccatcggttcgtgtcccgcgcccggcagcaggaggcctgggccggcctgctcgcccacgaacccgagatccgggcgcggctcgaggagctgttcctggtgctggtcgtcgaccacgaccacgaggtcgcgttcaagcggcagggcggcgaggacgacgtccccgtgctgctgcgccgcgagaaaccgctgtcgcgcgacgcctcgctgctgatggtcttcgcgcgccgcgagcacgccttcaccgacggcctcgacgaggcggtcgtgatctcgaaggacgccgtggccgagttcctcggtcggtaccacgacgactcgggctccgacgaggtgcgcgcccgtcgccgggtcgacgccgcgatcgccgcgctcgtcgcccgcgacctgctgacggccgagcccgacgaccccgagctgttcgtcgtctcgcccgcgatcgtgccgctgatgaccgccgaccgactcgcgcacctcgagcgggtgtacctcgaggccgccggggtcgagggggacgagaccggcgaggacgacgacgcggtcgacacgaccggcgacccgagcaccgaggccgacccggctgacgacgtcgacgtcgacgtcgtcaccgtcgccgacccggaggtcgaaccccacctcgtcgacgaccctgccgccccggcggacgacgcccccgagcccgaccccgagcccgacccgaccgccgtcccgctcgacctcgacctcgagcccccgctcgacaccgacaccgacaccgacccggaagcaccccaggcatga

SEQ ID NO: 47769 - DNA, 3450 bp, Frigoribacterium sp. Leaf44
atgagcatcgccgacaccccgcccgacctcggcatgttccactcgggccagtaccgtatcgagcaggtgcagctgctgaactggggcagctacgccggcctgcaccgcatgcccgtggggcgcggcggcatcgccatcctggggcccaccggccgcggcaagtcgaccgtgctcgacgcgatggccgcggtcatcatgcccaacccgcaagagttcaaccgggccgcccgcgacgacagccgccagcggtccgagcgcacggtctacagctacgcgcgcggcaagaccgacgaggtccgcgacgccgcctccgaccgcacgacgacgcggttcctgcgaccgctcggccaggcgttcccgagcggtgcggcgatcacctggtcgaccgagctcggccagaccgtcacggccgtccgcgtcgcctggatcggcgaggacaccgcgagccaggacgacgtcacccaggcgagcgtctacctgctcgcgcagggccgcttcgacctcagccgcctgtccgaagtgacccgcgagggcacgagccagaacccgctgacccgcggctcgctcgcccgcctgctcgaccccaccaccgacctcgcgacctcgtcacagcccgagctgcgcgtgcgcctctgcggtcagctcggcatcggcggcagcgacgagtcacagctcaaggccctgaccctgctgcgtcgggcgcaggcgtcgaagggcgtgttctcgatcgacgacctgttcaagcagttcgtgctcgtgcagccgcaggcgctgagccggtgggagaccaccctcgccacctaccgtgaggcctcggccctctacgacgtgttcgagacgacccgcaagaagctcgacgtgctcgagtccgtgccgacgctcgccgaccgctacgagctggccggccgcgacggaacggccaagcgccgcctgctcgcggacgccgacgggcccagccgcctgcgcgtctggttggccgaacgcgtcggcagctgggtcagcggcgaggtcgaccgcgtcacgaccgagaaacgcgagcagggcgaacgccggaggcgcgcccaggcggacgagcagctcgcgttccggtcccgtgaacaggccctggcgcggatcagcgagctcgggggcgaccccacgcagtcgctccgcgagcacgtggccgccgccgaggccgagctcgcggccgtcgagcgcacccgtggccggctcgccgccgccctggagtccaccggcgagtccctcccccggaacgacgagcagctcgccgccctcggacagcgcgccgaccgcctcgcggccgacgacgccgcggcccgggccgcgaccgccgacacccgcagcgacctcgccgcccgcatcggtgagacgaagcgcgccctcgccgccctcgagaagcagaagcggtcgttcgagcagcgccgcagcaacgtgcccgacgacgcgatcgagcgacgtcgccgcatcgccgagggagcgggcgtgccggtgtcgagcctgccctacgccggcgagctgttcgaggtcgcgcccgagcacaccgggtgggccgtcgcgatcgagcgggtgctcggcgatctcgccacgcacctcctcgtcgaccgctcgcacttcgacgccgtgcgccgctgggtgaacgagaacgacgtgcgcggacgcgtcacgctcgtgccggcgaccgccggggccgagccgaagctcacccccgtcgaccacaccgtgcccgcgatggtgcggctcgacccggccagtccgttccgcggctggctgcacgacgagctcgtcggcgaccggagtgtgctctgcgtcgagggtcccgacgacctcgacgacccgcgtccgaccggcacccgcggcgccgtcacgcgacggggcctccgcaccgggtcgcgcgaccgtgtgatcaaggacgaccggacgacccgctcgtggatcggcctcgacaacgccgcgcgcatcgccgagctcggcgacgagatcgtcgacctcgaggccgtgctggcccgggtccgcggcgagtacgacgcgatcgaagccgaggcggccgaccgccgccgggtcgccgacgccgtcgcccggtcgaaggagttcacctgggacgagctcgacaccgcgcccgcccagacgcgactcgacgacctgcgcgcccagctcgaccgcatcgcggtcgagcgtcccgagctcgcgacgttgcaggccgaggcgacgcagcacgacgacgaccgctccgtcgcgacgcgccgcctggccgagatcgaccaggtgctggcgcagctcgacgagaagcacgcgacgctcgtcgacatcgaggacgagttcgcggacgccgccgacgccgagcccctgaccgacgacgagcgggccctgctcgccccgctgccgttcgcggcaccgcgcgaggcgaccgacgtcgcccggctccaccgggacgccgcgtcgcagctgcgggcccaggtcgacgcgcacgaccgcgaccgggcgaacgccgagtcgacgctcgtcgtcgtcttcgagcgctacctcgagctcgaccgcaccgcgggcatcgacgccacgatcgagagcctgccgtcggtccgcgcgatccaccggcagctcgtcgaggacgacctgccgcacgcgaagcagcgctggctcgagaaggccggcagcgacgtgggcgacagcctccgggcgctgctcgtccagatcgaggaggacggccacgtcatccgtcgcggcgtccgcccgatctcgcaggcgttgcggtcgatcgagttccgccaggggtcgacgctcgacatcgagccgcggccggtgtcgaacggcgacctgctcgagttcaagcgcaccctgcgggagcacaccggcggggccgggggcgcgtccgaggcacgggcatcggacggacgagccccggaggcgcgggacgcgtccgaggtcgagcgccggttcctgaggctccgccgcgacctcgcccacctcgaggagaagtcgaaggtcggtgacgcctggcgccgccgggtgctggacgcgcgggagcactaccagttccgggcgatcgagacccgggccgacggcacgcagatcgtccacgagggcgtcgccggcaagtcgggcggcgaggggcaggagctcatcgcgttcgtgctcggggccgcgctgcggttccggctgggcgacggcaccgaccgggtgccgacctacgcgccgatcgtgctcgacgagggtttcgtcaaggccgacgccgagtacaccggccgggccctggcggcgctgacctcattgggcttccagctcgtggtgggcgcgccgcgcgacaaggtcaacgccttcgagcagcacgtcgagagcgtggcctacatctcgagcgacccgtcgaaccccgagctgtcgcgcatctacccgctgacgatccgccaggcgatcgaggtcgagcagcacggcctcgaccccgccgcgctcggctga

SEQ ID NO: 47770 - DNA, 1509 bp, Stenotrophomonas sp. Leaf70
atgccacaatcgccgccgcacggcaggaagctgcaggaccccgacgttttgaccacgaccacccccacgaccaccccgccgctgttcacggtcgtacccgccggcatcttcggcccgctggcctcggccaaccgccagaactactggtcgctgctgtgccggatgttcgacgagttcttcggcccggatgcgccggtgccgcccagccacggcttcccgcgccgcgagatcaccgccgcgatcgagcgctacctgctcaccgacgacccgtgggaagacgaggatgggcaggccccggacgcgccgctgaacgtgcgcgccaacgccatccacgaccgcttccgcgccgccggctggctgcgccaggagcgcatcggcgcgcgcgagatggtgaccatgccgccgatggtggcgcagctgctgtccaccctggtggagttcagcgagcacggcccgactttcgtctcggccaagatgcgctcggtggagctgcagctgcagcaggtcgccgaagggcgcatggacggcggcatcctcgacgaggctgccgaccaggcgcgccggctgctggtgtcgctggcctcgatgagcctgcaggtgcgcgacctgatgccggagctgagcaaggccgagaccaccgctcagttcgcccggcagtggttcgaacgctatgtcggccagctgttcatcggcgactacgccgaactgcaccgcgccgaccacccgatggcgcggcgcagctcgatcctggcgatggtgcagcagctcgaatccggcgccccgcgcgagacgctggtggcctggtaccgcgagcacgtcaccggcggcgacgaggcgcgcgcgcagcagcggctgtcgcgcagcctgggccggttgcgcgagctggagcgcatcgacgaatacctgacccgcctggacgaggacatccgccaggccaaccgccgcgcgctggccttcctcgactaccgcctgtgcgcgcccgaccgactcgacgtgctgctgcgccgcgcctgccgcggcgtgctgtcggcgccggaagaggcgctgcgcctgccggtggcaccggggccgctgatggacgagacgcgcctgcgcccgccgcaccgcaggccggtgccgattccgcgcagcgccaatgccaccaccccgcccacacccgagcagctggcgcggctgtcgctgctgcggcggatgaagcgcgcgcgcctggtcaacgccgaggacatggcgcgctacgtcggccgccacctgcagcagggcgcggcgatcgactcggcgcggctggacatcgccagcatcgaggacctgcgcgcctaccagaccctgctcacgctcgccctgcgcggcaaccgcatcggcggcctgcgccgcgaggacccgctcggccggctgctgcgcggcttccgcgtcgagctgctcgatgccggcagcggcgagaacaacgattacctgcgcggcccgcgcttccgcatcctgcgggtcggcgcaacactcccggaaaccgcatga

SEQ ID NO: 47771 - DNA, 627 bp, Stenotrophomonas sp. Leaf70
atgaaacgcagctggaacaccctgagccagatgtccaacggcacctacgccgtgcaggacttcgagcgcgccgcctaccgcctggccaccgagcaggtgctgtacgccaccgacgcgcgttcgcgcgtggcctaccacctggtcgaagaccactaccccgatttcgtctccgcgctggagccgctgggcatccgcctggagcgcaacgcgcactaccgctacgtggtggcgctgccggcgcatggcgaaggcgcaccggtgacgctggacgaaaccctggccctgctggtgctgcgccagcgctacgacgaagcgatgcggcaaggcctgatcgaggatcacggcgaagtggtggtggagctgcccgaactgcaggaaagctggcaggccttgaccggccgcgcgatgcccgacgtcggcgcgctgcgcgcgctggcgcgcacgctcaagcgctggggcgtgagccgattggtggagtcggaaggcgacgacccgcagccgttccacctgcgggtgcgcccggccatcgtcgagatcgtcggtgagcagtggctgcagcgactggaccagcacaaccgcgacgaagcgggcgacgtggacgcggaggacgacgatgcagcagcttga

SEQ ID NO: 47772 - DNA, 3432 bp, Stenotrophomonas sp. Leaf70
atgcagcagcttgaacgcatccacctggtccagttcttcctgttcgaggcgcagagcctgcagctggacgcgaccagcgccatcatcgcgcccaacggcgccggcaagagcgccctgctcgacgccctgcagatcgtgctgctgggcggcgaccgcagccgcatccgtttcaacgcgcaggccggcggcagccaccgcgcgcgcaccatccgcgactactgcctgggcgtgttccgcagcggcgatgaaggccgcaagcgccgcaccgccaccacctacatctcgctggtgttccgcgacaccgagaccggcgtgccattgaccgccggcatcgcgctcggcgcctcggtcgatgaacccgaacaccgcacgcatggcctgtacctgctgccaggcgtggcgctggaactggacgaacacctggagcgggtcaagggcaaggaactgccgctggcctggaacactttccgcgagcacatcgcgcgccgctgcaaggacgtgggcgaaacgccgcaactgcatcccaacgccgagcgcttcctgcgcgacctgctgctgcgcctgcgcgccagcccgtcggccagccccgacctcaatgcctaccgcaaggccttcctcaacgcgctgaacctgcagcgggtcgaggacgtggacctgttcgtgcgcaccctggtggccgaggaccggcccaccgacatcgcccgtttccgcgcgctgctggacagcttccgccagatcaaggaaaagatcgaacaggtgcggcagcgcatcgacgccgccgaaggcgccgagcgccagtacgagaagatcgccgggcaggcgacccgcgccgcgtccgcgcgcgcactggccgccgaatacgcgcgcgacctgtacagcgagcagctggaccaggccgagggcgcgctggccgatgcgcagagcgcgctggccgacacccgccgcggcctcgccgacacccgcgtcgagcgcgacaccctgcgcgaggaacaggcgcgcgccaatgcccgcctgcagggcagcgccggctatggcgagcaggcgcagctggacgaactgtccggtcgcgaccgcgagcgtctggcgcagctgaagaaggacctgacgcgcgaagtcgctttcgtgcgcgaccagttccgccagctcgacgcgctggcgctggacgatgtcgacggcacggcactggccgccgcgcgcgccgaatgggacgactggcatgccggactgtcggcgctggccgccgaggatgcgttgccatggacgccggacgacctgttcgcgcgcgcgcgccaggcgctgcgcgcggccgcgccgctgcgcgagcggatcgaccgccatgcccgccagctgcacgccgcgcacgacaaggcgcgcgatgcgctggaaaccgcgcgccagaaccagaagcgcctggccgccggccaggccgagctgcacccggatacggtgcggctgatgagctacctgcgcgaagccaatatcgacgcgcgcccggtctgcgacctggtgcgggtcaccgacccgacctggcagcacgccatcgaaggctatctgcgcagcaacgtcgaagccctgctgatcccggacaaggacgaggagcgcgcggtcaagctgtaccgcggcctgtccggcgggcgctcggtatatggcgtcaagctggcgctgtcgagccaggcgcgcaggtcgcgcggcgccgaggaaccggaggccggcagcgtcgccgcgctgctggagggcgtcaatgccgatgcgctggccttcctgcgccgccagctcggagaactgcgctgcgtggagaccgagtccgaactggtgcgcagccgccagggcctgacccgcgacggcctgctttcgcgcggcggcagcatcgaacgcctgcgcctgccggcagcgggcgacctgcgcatcggtgcgtccgacaaccgcgcgcgcctgcgcgtgctgcacgaggaaatcgagaaggccgagcaggagctgcgccagatcgaaccgcgcctgcgtcgcgccgacgattgccagcgcggcctggcgcggctggccgatgccgatgcggtggcgcaggcgctgcacgagcgcgtgctcgagcaccggcaggtggccgagcgctaccgcagcgcgcaggaaagccgtctggcctcgctcgatccggacctgctgcgcctgtccgaacagctgcgcgaactgaacgcccagctagctgattgcgagaagcgcgccgatgcgctggtcggccaggaagccgtggcggcggccaacctcgaacgcacgcacggcctgctcgatggcctgcgccagcaggaagacctggtcgcgcgccgcgcggtggaagccttcgccgatccggacgtcgacccgaaccgggtcgaacgccagcgcgaggagctggacgagaaatatccgtcgctggaagagcgcgcccgccgctgcgaggaacgcgccagggacagcgacgcgcagctggcgcggctgctgcccgaagcctggagcgggttggcgcagtacgcgcgcgaccatggcctggaactggatttcgatgccagcgcctggcgcccggcgcgcggcctgctgcagcgcgagctggcccagctgcgcgacaccgagctggtgcagtacgaggaggaggcacggcaggcctacgccactgccgtggataccttccgcaccggcgtggcctccaccctgtacgacaacttcacccggctcaagacccagatcgccacgctcaaccgcaccctgcgcgccagcccggccttctccaacaacgagcgctaccagttccattacgaggtggtgccggagttccgcgagctgcaccgcttcatccagcgcgccgccgacatcggcggcgaggacaccctgttcgagagcgccggccaggtgcccgaggcgttccgcgcgctggtcgaggacaaggcggccacccacgtggccaactcgccactggacgactaccgccgcttcttccgcttcgaggtgcagatccgccaggaagatcgggtgatcggcagcctcagcgagcgcatgcgctcgggctccggcggcgagcaccgcgcgccgctgtacgtgattgccggcgccgcgctggccgccgcctacggcaagagcgaggcgcacccgggcgggctggggctgatcctgctcgacgagttcggcgacaagatcgacgcgcagaacgcgcgtgccatcaccggctacctgcgctcgctgggcctgcagctgatgctggccgcgccggacaccgcgcagggcacgctgtccggcgtgctggacagctacatcgagctgttccgcgacggcgacctgctgcaggccgaacgcatcgaagtcaccgaagcggcgcgtaccctgctgctgtccgaccagttcgacctgcacccggaactgctggcggccgagaccaaacgcatcgaacgcgagcaggccacggcctga

SEQ ID NO: 47773 - DNA, 1353 bp, Pseudomonas sp. Leaf83
atggaggatgcgctgcaagcgctgtccgaaatgctggctgcttatgccagccaggagctttacgaaatcgacccagatgcaacgcatctccaagcaggtcgtgaacttcgtgaatggatcaagcggcgcctcgtcgtagagcgagagggccgtatctatgcaaccgacgcgctggagtcagccatccagttcgtagattcgctggatagtcggatcatgacttccacagcatctcgcctttcggtggttcagcgcgagatcgaaaacctggaaacgggtctgaaccccagcccaactggccgtattgccagcctgcgccgccgaatccaggatttggagcacgagctagcgcaggtagaagctggccacgtcgtcgtgctggatgaagcgcaggcgatagagggcatacgcgaggtatataacctggccaccagcctacgcgcggactttcgacgagttgaagactcttggcgcgaggcggatcgcgctcttcgacactccatcatcagtgagcagtctcaccgtggagaaatcgtcgatcggttgttggacgggcaagatgctctactcaacactcccgaggggcgtgtcttcgaaagcttccagcagcaactgaggcagtccgctgagctggaaaccatgcgtgagcgtttgcgcaccatccttcgtcacccagcggttccaaaggcactgaatcgtccccagcaacgtgagctacgttggctggcgttacgcctggttcgggagtcgcaggctgtgctccaagcgcgcgcccgaagcgagcgcgatgttcgtggcttcatgaagacggggctggccgccgagcatcatcgcgtcggacagttactcaatgatttcttcaatctagcgctcagcgtcgactggcaacgccagtcagaacgccgtaagcctgcatgtttaccaccagttggcgtagccattaccggtatcccggcaatcgagcgtctccgcttcaagaccctggatgacgatgatacgggcgagctggatctgagtttgaagcctgcggggttggagcagattgatgatgacttctgggatgccttcgacgggctggatcgtgaagcgctgattcaggacaccctggctgtgctggcggagcaggggcgccctgtgagtctcggggagcttgcgtctttgcttccacctgctcacgacctagaaacctttgcgctctggttggcgatggcacgcgaggcaggtattgaggtgctgaaagaggagcgtcagctcgtggagctagttgacgaggatgagcaacgctggcgcttcaatctgccttatgtcggactcgaccacgaggcactcaaggacatcgattgggagttgtga

SEQ ID NO: 47774 - DNA, 663 bp, Pseudomonas sp. Leaf83
atggatgatgaacagcctcttatgagcgccgctgttcaggtcgatgagtgccggacgccgcaacgggtacgtgaggccgtacaggaaatgctcaagtacgggctgctggaagaaagtcacaagcccaacctgtatcgctcagcgctttccaatatcgaggcggtcgacagaattctggaacccctcgaccttgccatgggggtcgacgaggttcgggggctggtgtttgttaccgttcgccagggcgaggtagccgagcaggatgaatggtcgcacccccttgtgcgtcggcaaaggctgaatctggagcagtccctgctgatagccattctgcgacagcatttcattgcgtacgaacaggaaagcggtacgggcgccagtcaggcactggtagcggttgatgaactgattccccaattgcaggtttacctgggcgagctgggcagtgaggctaaggagcgcaatcgcatcatcacactgctggaccagctcaaggggcatggtctggtgtcggctctggatgctcatgatcgagtcatcatccgccccatcattacccacttggccaacccagaaaacctgcaggcactcgtggcttggctgcgcgagcaggtggagggcgcggctacgccggttgctggtgctgaggaggatgaggcgtga

SEQ ID NO: 47775 - DNA, 2940 bp, Pseudomonas sp. Leaf83
ctgggtgctgtgctctggttcgagggcacaagctcctcggcgtccgatctgaaaaaactttggcttttaagcgagtcccccgagcagacgctggagcattggctcagccagcatcacgcaggtggcatgcgggcgctgcgtcagatggagaaggatgggacgggtatctggccttatcccagcaagaaagctttcttggccaggctgagggattacttcgaggtcggtgaaaacgctttcaccttgctcaaccgcgctgccggcctgaagcagctcaacagtattgatgagatctttcgagagctggtactggatgaccgctccgccttcgagcgggctgccgaggtcgccagcagcttcgatgatctaactgacatccaccgagaactggaaaccgctagaaagcagcagcgctcgctgcaacctgtcgccgatggctgggaacgttatagggccttgcaagaacagttgcaggataaacaagcgctcgaaggcatcctcccggtctggttcgccgaacaggggtatcgcctgtggttggctgaaaccaacaggcttgagaaggcgcaaaaacaggccgaactgaatcaggagcaatgcaggggacagtttgatatccagaagggcgtggtcgatcagcatcgtcagcgctacctgcgagtaggcggtgcagagatagatctattgcgcgcgcgcatcgcggattgggttcgggagtttgataaacggcgcctgaaagccgagcagtaccagcgtttggccaaagggctaggactcgtggaggagttatcagccgctgcgctcgaggaaaatcagcagcagatcacggcacgcctggaagtactggccgagcaaattactgaggcacggcaaaaggcgttcgatacaggcattgtccagaaagaactcgatggccgcctgcagagcttgcagcaggagcgtgccgaggtcgaacgacggccaggctcgaacctgcctgggcattttcatgcttttcgaggggagctggcgcagatgcttggcgtcgatgaatcggccctgcctttcgttgccgagctggtgcaggtcaagcccgaggagctggcctggcggggggccatcgagcgggcaatcggcagccaccgcctgcgtatcctggtgccgcagggtgcgtccgaggctgcactgcgttgggtgaaccaacgacacaaccgcttgcatgtgcgcttgttggaggtcaaggaaccgtcgtcgcgccctgtgttcttcgacgatggttatacccgcaagctgaccttcaaggagcatccgtaccgcgaagcggtaaaggcgctactggcggacaacgaccgacattgcgtggagagcacggagcaattgcgttataccccgcacgccatgacggctcaggggctgatgtcgggtaaagaacgcttcttcgacaagcaggaccagaagcgcctcgatgaagactggctgaccggcttcgataacctcgaccgtctggccttcctgactgaacaaattcgcgaggtcaatgaacagctcgcgcctgccaagctggccttggatgctgcccagggcgatgtccgcaagttggaggatcaagcttcgctgctgcagcgcgtcgaagaactacagttcgaggagattgatctgccgggcgccgagcgtcagctggagtcgctgcgtgctcagctggacaccctgacacgtcccgactctgacctcgcccttatcaaggctgagctggatgaagctgaggcattgctggactctctggatcgacagaggcaacaacttatcgagcagtgcggtcagttgaaaattcagttcgagcaggccgcatccgctacccgtaaggcttatcgcggcgccgaaaaggggctgagcgatacgcaacgtgagttggcgctagcgcacttcccgaccctgagtgctgatgaccttggcgatattgtcgagctggagcgcaagcatacgcatgagctgcaagggcagctcaaaacactcggcgaaaaactaggcgatcagaaatccgagcttaccaaacggatgtccgacgccctgaaggtagacaccggggcgcttgcagaagttgggcgagagctggtggacgtacccaagtatctggagcgtctacgcgtgctgaccgaggaagccctgcccgagaaactcaagcgcttcctggaatacctcaatcgttcctcggatgacggcgtcacccagttgctcagctatatcgaccatgaagtctcgatgattgaggagcgcctggatgacctgaacagtacgatgcagcgtgtcgactttcagcccggacgctatctgcgcttggtcgcgaaaaaggtcattcatgaaagccttcgcaccttgcaacaggctcagcgtcaactgaactcggcgcgtttcatcgatgatgaaggcgagagccactacaaggcattgcaggcgctcgttggcctgctcaaggatgcttgcgagcacagcaggaatcagggcgccaaggcgctgctggatccgcgcttccgcctggagttcgcggtctcggtgatcgatcgcgaaagcaggagtgtcatcgaaacccgaacaggttctcagggcggtagtggtggcgagaaagagatcatcgcctcctatgtgctgaccgcttccctcagctatgcgctctgtcccgacggcagcagccggccgttgttcggcaccatcgtgctcgacgaggcgttctcgcgcagctcccatgcggttgccggtcggatcatcgcagcgctgagggaattcggcctgcatgctgtcttcatcacgcccaacaaggaaatgcgcctgttgcgccaccatacgcgttcggcagtcgtcgttcatcggcgcggcatggaatccagtctggtttccctgagctgggaagctttggatgagcatcatcaacagcgcatcaaggccatgcatgaagtcgcccactga

SEQ ID NO: 47776 - DNA, 1158 bp, Pseudomonas sp. Leaf83
atgaagtcgcccactgatatcagtcgcagcctggccagacaatggcagcgctccagcgtacgcttggaacgcttgctcaatcccgctagctggccgcaaagcctcaacatcggcaagccttcggcacgtctattcactgacaacatccaggcggtactccggcatgtggagaactggcggagcgtgaacgtgggtaaagtcgactgggagcccgtcagctaccgagcagggctgtcccccatttccttgccgatgcgttggcacttgcgtagcccctccgaatggattgccgcgagcgatgatccaagggttagccaggaatacgctcaactcgagtatctggtcgagcaggtagacagtgcctttcatgcgctgctggtggtacaacggagcttgtggttgacgaagccgtctgaagaagtcgtcgccacggcgcgactcgccacccggttgtcgccaggctgtgcccgaggccgtccgctgcgcctgcttgccgagcacggcgtagacaccaagtttttcgagcgcaacgccagcttgctgacctggctcctcgacgagcgcttcggaggcgcggcgtccgagcaaggcctgacgacttttctagatgcctttgaagaaagcagccactgggttctggtcgttccccttcagcctgagctgttgcccttcaagcggctcagactcactactgcggaactggccgaaaccccacttcccgcttcgcgattgctcgtggtggaaaatgagcaatgcattcacttgctgcctgagaacttaccggacaccctggctgtgctgggctcaggactcgatttgcagtggctagcgtccgcgcacctggccgggaaacagatcgcatactggggcgatatggatacctggggcttgctgatgctggcgcgagcgagactccatcaaccagcagtcgaagcactattgatggagcaagagctgtttgaacagcactcaccggtgagcgcagtcgttgagccgaccaaagctctggattcggccccacctggtttgctggctgacgaagcggacttctatcggtatctgctggtgcaagaacgaggacgccttgagcaggagtacctgccaaaggaacaagttgagcgcgctatcgagcagtgggctcgaaagatccctgtatag

SEQ ID NO: 47777 - DNA, 1413 bp, Methylobacterium sp. Leaf85
atgctgttcacccgcctccccgacgatctgttcaagccgctcgcctcgccgagccgggccttcaacgcggcgctgctgctgcatctgcatgccagggtgttcgccgagaccaccgaacccctgcgcaagagcgagctgctggcctccatcggtgatttctccgccgactggtcccagggcgagatcgccgacgacgaggccacgccggtcgatccggtggagcgacgctcggcggtctaccggcggcttctcgacgccggctggctggtggaacggcgcgagcgctacgtgccggtggtcgatttcgatccggatgcccgcctcgtcattgaggaactcgcccgtctcgaccggggcgagacccgctcctatggcggcgcggtactggaggtactgggtagcctggagagcgcggtggccaacccggccgaacgttcggaggccctggtcaatgcggccaaggcctcgcgcgccttcctcggacatctgcgcagcctcgccggctcgatgcgcaagatcgaggagcggatcctgcgcgaggaagaccagggcgtcgcgttccgcctctatttcgaggagttcgtcgcgcgccatctcgtcagcgactaccgcaccctgcacacgcgcctgaacccgttccgcttccgctccggcatcgtccgcgaggcgggccgcgccctgcgcgacgacctcaccctgcgggctctcgccgaagcggggctgcgcgaagggagggcacacgacctgtccctggccgagcgggcggtgcgggcggatctcgccgaaatcctctcgatcttcgaggggctcgaccggcatctcgacgccgtggccgacatcgtggcacgcctggagcgccggatcgcggcggccctgcgctacaccgaccatcgcgattccgaccggatcgagcgtaccgccgcggcgttgcgggcggtgggcgccgccgaatggtcggagaccggtcccttcgccgaggtctcgctcctgcgtccgcccatcggcgagccgcatctctacaccccccgcatgcggcgcgcggcgatcctgtccgagccgctgccggagatccatctcgaccctgccatcgaggccttcatcctggccaaggacgccttccgccagcgggtgatggtgacgccggagcgcgtcatcgccttcgtcgagcgcaagctcggggcgagccccgccgtccggggttccgagatcgtggtggcggatgtggacgagttcgtggtgttccagcgcctgcgcgagatcgacgtgctgttcgacggcatcctgaccacgcgctaccgcctctcgcgggtcgcgggccgcgtctcaaacggctggctcgactgcccggacttcctggtggagcgccgaaacccggcgttccgcccggcatcggttcgcccacgcggcgcctga

SEQ ID NO: 47778 - DNA, 636 bp, Methylobacterium sp. Leaf85
atgatcgaggccttccgcgccatcgtcgacggcgacgagcctccgcctccggggacgcgcgcgccctccggggaggatctgacgcgggcgctccaggtgctgctcaagagccagtgcatctattccgacacccccggcatcgggcgctcctacgagcttgcccggcactacgcgcccttcttcaagggctacttcgcctgcctcggatacggggtcgaggtttcgccccgtgaccagatggtgttcctgcgcgtgcccccggacggggtgcgccacgacggccaggccgagcgcctgcgcaaggacgagaccctcgtcctgctcgccctgcgtctcgcctacgaggaggggctgcgcgcgcaccgcgtcaccaccgacggcgtggtcgaatgcaccaccgacgacatcgccgaatcgatccgcaccgtcgcccggagcgaggcgccggaggaggcgcgcctcaccgaaatcctccgcctcttcgcccgcaagggcgccctgcgcctgggggagcgcgacaaggccgagaagatcacgccgctgatgcttctaccgggcatcgccgtgctctcgcccgatgcctggatggaacaggtccgcgcctgggccgcggcgcgcctcgacgacgacggctga

SEQ ID NO: 47779 - DNA, 3456 bp, Methylobacterium sp. Leaf85
gtgtaccgcctcaccgacatcgtcctctccaactggtacctgatccggcgcgagcagatccgcatccggggggcggctgccctggtggggccgacgggcgccggcaaatcgacgatcttcgatgccgttggaacggtgctggccggcaacaatgccagccgcctcgccctcaacgcctccgcctcggggcgcagcgcccgcacggtccgcgattactgcctcggctggatcagcgacccggccgagggcggacgcccgacccgcgaggcctgcgagaccctgatcgttctggtcttcgagaacgagaccaccggccgcgtcgtctcggtgggcctcgctttggcggcccgtgccgaggacagccgcgagaccacgctgtcgcgcttcatcgcggtcggccatcgcttcgagatcgccgattacgtccgcgagaccgcggagggcagcttcgtcgcgccctggccggagatcgccaaggacctgcgcatccaggccgaccggttcgaggaattccgctcgtcgggcgagcgcttcaccgccgaattgctggcgctgatgcgcgagggggcgtcgagtccggagccacggcatttcctgcgcaccttctccaacgccgtggcgtttaagccgatcttcgattcctccgccttcgtgcgctccttcgtgctcgaaccggagcccctggacgtcgcccgcatccgccagtcggtggagaactggcgccgcctgctggagacgatcgaggagttggagcgccgactcacgcatctcgggcgcatcctgaagcgctacgagacctgggccgaggccagcctctcggccaccctcgacgatctgcgcgccgccagcgccgatctgcgccggcgcatcctcgattacgcgaccgcccgctccaggctcggcgaggtggccgagcgcctgcgcatcgcccgcgagagtgtggccaccagccaggggttcgtgcgcgagatcgacggggagatcgccggcaagaaggcgatgctcgccgggagccagggggaggggcggctcgccgcctccaatgccggcctcgccatgctggcgcgcgacaagcgcgacctctccgcccgcgtcgcggacctcgttgggatggtgcaggaggcgggcaagctcaacaccctgttctccgagattcagcggatcgatcccgacgccgcccggatcgtggccgcgtgctcgcgctccggcctgcgccgcgaggcgccccccgaggaatccctgcgcatcgacggccccctcggcgggttgatcgagatgctcgcggccctgcccgacatcgccacccccctcgacaccgccgccgaggatatggccctgcgcgcccgggcccaggagaaggaggcgcaggccctctcggccgagatcggcaccgggcggacgggcggcgcccgcctctcctgcgacacggcgggctttcgcgacgagctggcccggctcgggatcgaggccacgccgatctgcgagctcgccgagatcaccgatccgaaatgggggccggccctggagggtctgctcggcggcgcccgcgaggccctggtggtggagccggacaggctcaacgaagccttcgcccatctcgaggcccgcaagagccagttctaccgctgcttgctggtcaagaccaccgacaccgcgcgccgccggggcgggcgcgacgacgaggggccgatctcgctgatcgagacccgcgatcctcacgcccaggccttcctcgccgcgcgtctcgggggctacgatctcgccccgaacgacgcggccctcgcccatatgagccgcgcggtggcgccgagcggccgttccacctccggcatggcctattccgtggtgcggccggtccagttgatgatgacgcggggcagccgcggccccacggcggagggacggcagaacctggagcgcgcggtggccgaggcgcggcgcctgcgcggtgaggcgggcgtgctgcgcgaggccgcccgcatcgccgccatgctgcgggtccgcctcgcggaagcgaatctcgacatcgtctccctgcgccaggaggccgacgccatggaagggcgccggcgcagcctcaccaccgagcgtgaggccgtggagaaggcggataccggcgcgctggaggccgagatcaaggaactcgccaaggagcgctcggcctatctcacggagctggtccaagttctggagcccaagcgcgacgcgctgctcggcgaggaagctgggctgaaggcgaaggtcgccaccgcgcgggaggcgatacgcggcgcgctccaggcgaggcgcagcgcccatgcgcgctggatcgccggtgattccgtccgcatccgacttgtccggccggatgggttcgatccgctggcggtggcgaaggcccgggccgacgccgcaggcctcgaatccaaggaactggcggctttggccaatgcggcgcgcggcgccgcccgcgaggcgatggagacggcgcgcacgcaaggccgtgccgccgagcgcgatctcgccgaatattgcgtgcaatggcggatcgagaacccgctcggcaacggcgacgccccggcctccttcggtttctcctgggtcgcccgcgcccatgacgaggtggcgggccacgagttgcggcgctatcgcgaccaggcggtgcgggcagagggcgagatgcgccgcctcatgaccgaggacctgctgacgcgcctcgccgacaagttcgagcgggtccgcacccgcctcgacgccctgaacgaacgcctctccacccagaccttcaccggccagacctacgcgttcgaggcgaccgtcgaccgccgctacgccgccgtgcatgccctcgccacagaggtggctcgctcggccgacgcggcgcaggcgattctgccgggggaaggcgaggaagcgccttcggggccgctcgccgccgccatcgaggagatcaccgccctgatcgccggggacgagagcgcggcgcggctcgccgattaccgcaactatttcgtctacgagatcggcatgcgcgacaaggcgggcaaccgcaccaccatgtcgaaccgggccctgcgcggctcgggcggcgaggcgcaggcgccgttctacgtggccatcgccgcctcgctcgcctcggcctattaccccggcgaccggcccggcgacgagaatcccggcctcggcctctgcctcctcgacgaggccttctccaaactcgacgtgcgcaactcgcaggccctggtggacctctatcaggcctgggggctgcaactcctcatcgccgccccggaagacaagcgcaccacgctcaccgaggtgatggacaccatcgtcaccgtctataagagcccggacctgacctcggtgcggatcgaagccgagcatccgctggagacggccaagcgcgcgctggcggccatcaacccggagcggcagggaatcgagacgttccgggtctccgacgcggcggagtga

SEQ ID NO: 47780 - DNA, 1731 bp, Frigoribacterium sp. Leaf254
gtgaaccacccgtcggggcacgacgacgccctgagccgcgacgacgtgcgcgcggcgtacgaagacgaccccacctgggccctgctccgcggctacaacgcccggtggatgctgccgctcttctcccaccacctcgagcacgccgaggggccggtgtcggccgactggttccaccggcaggtcgccgacgccctcgagcagaacgccgccgagcaggccgcgctcgagcaggccacccccgagcacccggcctccgagccggcgacgaccgagcgggacctcgaggaggcgcggcccgcgtccccgacgcccgtcgccacgccggcccccgccgagcagaagaccaccccggccgagtactgccgcagctgggtcgagagccgctggctcgtccgcacccgcgcctccggaccggacgcccgcgccgagtaccgcctgtcgccgcacgcgctcaaggcgctgcgtctcgtgcgcgacctcgtcgagcgcgacaacgccgtcagcgaggcccgcctcggcagcatcgcccatgccgtcgggcagctcgccggcctcgccgaccccagccgcgagtcgcagctcgcgcgcctcgacgagcagatcgccgagctcgagcgccgcaaggccgagatcgagcggcacggcaccgaacccaccgctcccgacgtgctgcgccgacaggtccgcgaggtggtgcgtctgaccgcgtcgctgcccgaggacttccggcagctcggcgccatggtcgagcagcggcaccgcgaggtcgcgcgccgggcgtcgtccgaacacgtcggcaagggtgcgctcgtcgaccagtacctgcgcgacaacgacctgctcgagcagacccccgagggacgcgcttaccgcggcttcgcccagatgttgtcgtcgcgcggcatcgacgtgatgcgggccgacatcgagaaggtcctcgcccagcccgacgccgccgcacagctcaccgagcggcagcgcacgcagctcgagtcgctcatctcgtcgctgctcgccgaagagcagagcgtgcaagagacctacggtcgctggacgtcctcgctgcggcgattcctcagccggtcgggttccgaccagcagcagcgcctgctgaccctcgccgaccgggcgctgcacgcgggcggcgtctgggccgagcgtcggccgggccacgccatgctgccggtcgagcacggcgacggactgggcctcggggcgctcgacgtccgcgacgtcagccaggtgcagctgcacaccgaccgcgcacggccgacggtcgacgtgcaggtgacgatcggcgacgcgaccctgcccgaggccgaccgggccgccctccgcctcacctcgggcacgagcacggcggccgtctcggcgacgatcgaccggctgctcgccgaccacgacgaggtcacgagcgtcgacgtgtaccgcgccaccgagcccgagttccgccgcctcgcgctcgtcctcagcatgctcgacctggcgctcgagcgcggcgtcgtcggcgacgacaccgagaccgtcgagctcgccggcgatcccaccggccccggcgcgtcggcggacgcgaggccgggaggcgcgggtccaggaggcgcgggtcggcaggtcacgctgccccgcctcgtcttccggcgcgatcccgcggggccgcccgacgccgagcccgccgcccccaccgccgccgacctcacgaccagcccgacctccacgaaggaccccgcatga

SEQ ID NO: 47781 - DNA, 996 bp, Frigoribacterium sp. Leaf254
atgagccccgcagccccctcggacgagaccggcgtcgacgaggcgacccgcgcctccttcgccgaggcgaccgccccctccgtcgacgagtcggcgcgcgcctcccgcgatgccttcgacgacggcgacgccgacgacggggcggccggcgtcccggacgcgctgccgctggccgggcgcaaggccctggtcacgctgttgacccaccggttcgtgtcgcgcgcccggcagcaggaggcctgggccgggctgctcgcccacgaacccgagatccgggcgaggctcgacgagctgttcctcgtactcgtcgtcgatcacgaccacgaggtcgccttcaagcggcagagcggcgaggacgacgtgcccgtgctgctgcgccgtgagaagcccctctcgcgggacgcctcgctgctgatggtcttcgcccgccgcgagcacgccttcaccgacggtctcgacgaggccgtcgtcatctcgaaggactccgtcgccgagttcctcgggcggtaccacgacgactcgggctccgacgaggtgcgggcgcgtcgccgggtcgacgccgcgatcgccgcgctcgtcgcccgcgacctgctgacggccgagcccgacgaccccgagctgttcgtcgtctcgcccgcgatcgttccgctgatgaccgccgaccggctggcgcacctcgagcgggtgtacctcgaggcggcgggggtcgagggcgacgtgaccggcgagggcgaggtcgaggtcgacgcaccgggcgacgcgcgcgccgaggccgacgccgacgccgacgcgacggacgacgccgaggacatcgccgtcgaacccgaggtcgaacccgaccccgccgaggacgacgaccccgccgcccaggccgacgacgcccccgagcccgaacccgacccgaccgccgtcccgctcgacctcgacctcgacctcgagcccccgcacgacgccgacacggacaccgacaccgacccggaagcaccccaggcatga

SEQ ID NO: 47782 - DNA, 3465 bp, Frigoribacterium sp. Leaf254
atgagcatcgccgacacctcgcccgacctcggcatgttccactcgggccagtaccgcatcgagcaggtgcagctgctcaactggggcagctacgccggcctgcaccgcatgcccgtggggcgcggtggcatcgccatcctcggccccaccggccgcggcaagtcgaccgtgctcgacgcgatggccgcggtgatcatgcccaacccgcaagagttcaaccgggccgcccgcgacgacagccgtcagcggtccgagcgcacggtctacagctacgcacgcggcaagaccgacgaggtgcgcgacgccgcctccgaccggacgacgacgcggttcctgcgaccgctcggccaggcgttcccgagcggtgccgcgatcacctggtcgaccgagctcggccagaccgtcacggccgtccgcgtcgcctggatcggcgaggacaccgcgagccaggacgacgtcacccaggcgagcgtctacctgctcgtgcagggccgcttcgacctcagccgcctctccgaggtgacccgcgagggcacgagccagaacccgctgacccgcggctctctcgcccgtctgctcgaccccgcccacgacctcgcgacctcgtcgcagcccgagctgcgggtgcagctctgcggtcagctcggcatcggcggcagcgacgagtcgcaactcaaggccctgaccctcctgcggcgggcgcaggcgtccaagggcgtgttctcgatcgacgacctcttcaagcagttcgtgctcgtccagccgcaggcgctcagccggtgggagaccacgctcgccacctaccgcgaggcgtccgcgctctacgacgtgttcgagacgacccgcaagaagctcgacgtgctcgagggcgtgccgacgctcgccgaccggtacgagctcgccggccgcgacgggtcggccaagcgccgcctgctcgcggacgccgacgggcccagccgcctgcgcgtctggctggccgaacgcgtcggcagctgggtcagcggcgaggtcgaccgcgtcacgaccgagaagcgcgagcagggcgaacgccggaggcgcgcccaggcggacgagcagctcgcgttccggtcccgtgaacaggccctggcgcggatcagcgagctcgggggcgatcccacgcagtcgctccgcgagcacgtggccgccgccgaggccgagctcgccgccgtcgagcgcacccgcggccggctcgccgccgccctggacgggaccggcgagtccctcccccggaacgacgagcaactcgtcgccctcgggcagcgcgccgaccgcctcgcggccgacgacgccgcggcccgcgccgcgaccgccgacgcccgcagcgacctcgccgcccgcatcggcgagaccaagcgggccctcgccgccctcgagaagcagaagcggtcgttcgagcagcgccgcagcaacgtgcccgacgacgcgatcgagcgacgtcgccgcatcgccgagggggcgggcgtgccggtgtcgagcctgccctacgccggcgagctgttcgaggtcgcgcccgagcacaccgggtgggccgtcgcgatcgagcgggtgctcggcgatctcgccacgcacctcctcgtcgaccgcgcgcacttcgacgccgtgcgccgctgggtgaacgagaacgacgtgcgcggacgcgtcacgctcgtgccggcgaccgccgaggccgagccgaccctcacgcccgtcgaccacaccgtgcccgcgatggtgcggctcgacccggccagcccgttccggggctggctgcacgacgagctcgtcgccgaccggagcgtgctctgcgtcgagggtcccgacgacttggacgacccgcgcccggccggcacccgcggcgccgtcacccggcggggcctccgcaccgggtcgcgcgaccgcgtgatcaaggacgaccgggcgacccgctcgtggatcggcctcgacaacgcggcacgcatcgccgagctcggcgacgagatcgtcgacctggaagccgtgctggcccgggtccgtggcgagtacgacgcgatcgaggccgaggcggccgaccgccgtcgcgtcgccgacgccgtcgcccgggcgaaggagttcacctgggacgagctcgacaccgcccccgcgcaggcgaggctcgacgacctgcgcgcccaggtcgaccgcatcgcggtcgagcgtcccgagctcgcgacgttgcaggccgaggccacgcagcacgacgacgaccgctccgccgcgacgcgccgcctggccgagatcgaccaggtcctcgcgcagctcgacgagaagcacgcgacgctcgtcgacatcgaggacgagttcgcggacgccgccgacgccgagcccctcaccgacgacgaacgggcactcctcgcgccgctgccgttcgccgcaccccgcgaggcgaccgacgtcgcccggctctaccgggacgccgcgtcgcagctgcgggcccaggtcgacgcgcacgaccgcgaccgggcgaacgccgagtcgacgctcgtcgtcgtcttcgagcgatacctcgaactcgaccgcaccgcgggcatcgacgcgacgatcgagagcctgccgtcggtcagggcgatccaccggcagctcgtcgaggacgacctgccgcacgcgaagcagcggtggctcgagaaggccggcagcgacgtgggcgacagcctgcgggcgctgctcgtccagatcgaggaggacggccacgtcatccgccgcggcgtccgcccgatctcgcaggcgttgcggtcgatcgagttccgccagggctcgacgctcgacatcgagccgcggccggtgtcgaacggcgacctgctcgagttcaagcgcaccctgcgagagcacaccggcggggccgagggcacgtccgaggcacggtcctcggacggacggtcctcgcaggcgcagaccccggaggcgcgggacgcgtccgaggtcgagcgccggttcctgaggctccgccgcgacctcgcccacctcgaggagaagtcgaaggtcggcgacgcctggcgacgccgggtgctggacgcccgcgagcactaccagttccgggcgatcgagacccgggccgacggcacgcagatcgtgcacgagggtgtggccggcaagtccggtggcgaggggcaggagctcatcgcgttcgtgctcggggccgccctgcggttccggctgggcgacggcaccgaccgggtgccgacctacgcgccgatcgtgctcgacgagggcttcgtcaaggccgacgccgagtacaccggccgggcgctggcggcgctgacctcgctgggcttccagctcgtggtgggcgcgccgcgcgacaaggtcaacgcgttcgagcagcacgtcgagagcgtggcctacatctcgagcgacccgtcgagccccgagctgtcgcgcatctacccgctgacgatccgccaggcgatcgaggtcgagcagcacggcctcgacccggccgcgctcgcctga

SEQ ID NO: 47783 - DNA, 1425 bp, Methylobacterium sp. Leaf86
atgcttttcgcccgcctctccgacgacctgttcaagccgctcgcctcgccgagccgggctttcaacgcggccctgctgctgcatctgcatgcgcgcgtcttcgcagagactaccgaacctctgcgcaagagcgagttgctcgcctccatcggcgatttttccgccgactggtcccagggcgagatcgccgacgacgatgccacgccggccgatccgatcgagcgccgctccgcggtctatcggcgtctcctggaggccggctggctcgtggagcggcgcgagcgctacgtgccggtggtcgatctcgaccccgatgcccgccacgtcatcgaggaactggcgcgtatcgatcggggcgagacccgctcctatggcggcgccgtgctcgaagtgctgggcagtctcgagagtgccgtggccaacccggccgagcgttcggaggccctggtcaacgccgccaaggcgtcccgcgccttcctcggacacctgcgcagcctcgcgggctccatgcgcaagatcgaggagcgcatcctgcgcgaggaggaccagggtacggcgttccggctctatttcgaggagttcgtcgcgcgccacctcgtcagtgactaccgtacccttcacacacgactgaacccgttccgcttccgctccggcatcgtccgggaggccggacgggcgttgcgcgaccccctcaccatccgggccctcgccgaagcgggactgcgtgaggggcgggccgccgaccttcccctcgccgagcgggcggtgcggcgcgacctcgcggagatcctgtcgatcttcgaggggctcgaccggcatctcgacagcgtcgccgacatcgtcgcccggctggagcgccggatcgccgcgtccctgcgctacacggatcaccgcgattccgaccggatcgagcgcacggcggcggcgctacgggtggtgggggctgccgaatggtcggattcggcgcccctcgcccaggtctcgctgctgcgtccgccgatcggggagcctcatttctatacgcctcggatgaggcggacagcgatcctgtccgagcccctgccggagatccatctcgacccggcgatcgaggccttcatcctcgccaaggacgccttccgccagcgggtgatggtgacgcccgagcgcgtcatcgccttcgtcgagcgcaagctcgggacgaaccccgccatccgcggatccgagatcgtcgtggcggatgtggacgagttcgtggtgttccagcgtctgcgcgagatcgacgtgctgttcgacgggctcctcaacgatcgctaccgcctcacccgtgtcgcgggccgtgtctccaacggctggctcgattgtccggatttcatggtggagcggtcgtccccgcccccaacacgcgggccagcgagcgcgggcgaacggcgaccgcggagataa

SEQ ID NO: 47784 - DNA, 636 bp, Methylobacterium sp. Leaf86
atgatcgaggccttccgcgccatcgtcgatggcgacgagccaccgcctccgggtgcccgtgcaccgtccgaggaggatctcatccgcgcgcttcaagtcgtgctgaagagccagtgcctctatgccgatacgcccggtatcggccggtcctacgagatcgcccggtattacgcaccgttcttcaaaagctattttgcctgtctcggctactcgttcgaggtctcgccccgcgaccagatggtgttcctgcgcgtgcccgccgacggcgtacgccatgacgggcaggccgagcgcctgcgcaaggacgagaccctcgtgctactggccctgcgcctcgcctatgaggaagggcttcgggaacaccgcgtcaccaccgacggtgtcgtggaatgtaccaccgatgacatcgccgaatcgatccgcaccgccgcccgcagcgaggcgccggaagaagcgcgcctcacggagatcctgcgccttttcgcccgcaagggtgcccttcgcctgggcgagcgcgacaaggtcgagaagatcacgccgctgatgatccttcccggtgtcgcggtgctctcacccgattcctggatggagcaggtccgcgcctgggcagcggcgcgaatggacgatgacggctga

SEQ ID NO: 47785 - DNA, 3456 bp, Methylobacterium sp. Leaf86
gtgtatcggctcaccgacatcgccctctcgaattggtacctgatccgccgcgaacagatccggatccggggagcggctgccttggtggggccgacgggggccggcaagtcgacgatcttcgacgctgtcggtaccgtgctcgccggcaacaacgccagccgcctcgccctcaacgcgtctgcctcggggcgcagcgcccgcacagtccgcgattactgcctcggctggatcagcgaccccgccgaaggcggccgtcccacccgtgaggcctgcgagaccctcatcgtcctcgtcttcgagaacgagaccaccggacgtgtcgtatccgtcggtctcgcgctcgcggcccgggccgaagacagtcgcgagaccacgctctcgcgcttcatcgcggtcggacaccggttcgagatcgccgattacgttcgcgagaccgccgagggcagatacgtggcgccctggccggagatcgcaaaggatctccgcatccgggcggacaggttcgaggagttccgctcatcgggcgagcgtttcaccgccgacgtcctggcgctgatgcgcgagggcgcgccgagccccgagccgcgccacttcctgcgtacgttctccaacgccgtggcgttcaagccgatcttcgattcctccgccttcgtgcgctcattcgtcctcgaacccgagcccctggacgtcgcgcgcatccgccagtcggtggagaactggcgccgtctcctggagaccatcgaggaattggagcgccggctctcccatctcggccgaatcctcaagcgctacgaaacctgggcggaagccagcctctcggccaccctcgacgagttacgagcggccggcgccgacctgcgccgccgcatcctcgactacagccaggcccgctctcgcctcggcgacgtggcggaacgcctgcgcatcgcccgcgagagcgtgagcaccagccagggtttcgtgcgcgagatcgacggcgagatcgcgggcaagaaagcgatgctggccgggagccagggggaggggcggctcgccgcctccaatgccggcctcgccatgctggcgcgcgacaagcgcgacctcgccactcgcgtcgccgatctggtggggctggtgcaggaggcgggcaagctcaacgtcgtcttctccgagatccagcgcatcgatccggaatcggcgcggatcgtggccgcctgctcgcgctccggcctgcgccgcgatgcgccccccgaggaatcgcttcgctcggacggaccgctcggcccccttctcacggccctcgcctctctctccgacatcgccacccccctcgataccgctgccgaggacatggccctgcgtgcccgcgcccaggagaaggaggcgcatgccctctcggccgaagtcggcagcgggcgcgcgggcggcgcgcgcctctcctccgacacggccactttccgcgacgaactcgcccggctcgggatcgaggcgacgccgatctgcgaactcgccgaaatcaccgatccgaaatggggaccggctctggagggcctgctcggaggcgcccgcgaagctctcgtcgtcgaaccggaccggctgaatgaggctttcgcccatctcgaagcccgcaagagccagttctatcgctgcctgctggtgaagacgacggacaccgcgcgccgccggggcgggcgcgacgacgaagggccgatctcgctgatcgagactcgcgatccccatgcccaggcgtttctcgcggcccggctcggcggctacgatctcgcccccaacgacgcggccttggcccatatgagccgcgccgtggcgccgagcggccgctcgacctccggcatggcctattccgtagtgcggccggttcaactgatgatgacccgtggcagccgcggtcccacggcggagagccggcagaacctggaacacgcggtcaatgaggcacggcgcctgcgcggcgcggccggcgtgctgcgcgaggccgcccgcattgccgccatgctgcgggtccgactcgccgacgccaatctcgacatcgtcttcctgcgccaggaggctgacgcgatggagggacggcgacgcagcctcaccaccgagcgtgaagccgtggagaaggccgataccggcgcgttggaggccgagatcaagaagctcgccaaggagcgatcggcctatctcaccgaactcgttcaggtgctggagccgaagcgcgacgcgctgctcggcgaagaagcgggcctgaaggcgaaggtcgccaccgcgcgggaggcgatccgcgccgcgcttcaggcaaggcgcggcgcccatgcccgctggatcgcgggggattccgtgcgcatccgtctcgtccggccggacgggttcgatccgctggcggtggccaaagcgcgggccgacgcggcgggcctcgaatccaaggagttggcggctttggccaatgcggcgcgcggcgccgcccgcgaggcgatggagacggcgcgcacgcaaggccgtgccgcagagcgcgatctcgccgaatactgcgttcagtggcgcatcgagaaccccctgggtaacggtgatgctccggcctccttcggcttttcctgggtcgcccgcgcccatgacgaggtggcgggccacgagttgcggcgctaccgcgaccaggccgtgcgcgcggagagcgagatgcgccgcctcatgaccgaggacctgctgactcgcctcgccgacaagttcgagcgggtccgcacccgactcgatgccctgaacgaacgtctctcgacccagaccttcaccggccagacctacgccttcgaggccaccgtcgatcgtcgctacgccgccgtgcatgccctcgccaccgaggtggcgcgttcggccgacgcagcgcaggcgatcctgccgggggagggcgaggacgtacccccggggccgctcgctgccgcgatcgaggagatcaccgccctgatcgccggggacgagagcgcggcgcggcttgccgattaccgcaattacttcgtctacgagatcggcatgcgcgacaagacgggcaaccgcaccaccatgtcgaaccgggccttgcgtggctcgggaggcgaggcgcaggcgccgttctacgtcgccatcgccgcgtcactcgcctcggcctattatcctggagaccggcccggcgacgagaatcccggcctcggactctgtcttctcgacgaggccttctcgaaactcgacgtgcgcaactcccaggctttggtcgacctctaccaagcctggggattgcagcttctcatcgcggcgcccgaggacaagcgcaccacgctcaccgaggtgatggacaccatcgtcaccgtctacaagagcccggatctgacttcggtccggatcgaggccgagcatccgctcgaggcggctaagcgcgcgctcgccgccatcaacccggaacgccagggtatcgagcgattccaggtctccgacgcggcggagtga

SEQ ID NO: 47786 - DNA, 1653 bp, Curtobacterium sp. Leaf261
gtgaccgacctggaacgcgagttctcccgcgtccggcaggtcctcgaccgtccgacgctccgactcatgtcgcggccgacgtccgccgccgtgatcgccgtcttccgcacggtgttcgaccgcgacgtgcagtacgtcccggcagaccgcatgcacctgcaggtcgaggagcacgtcgcgcgcctgcggtccctcggggcacgggtcccggcgggagcggcgggagcggcgggagcggcgggagcggcgggagcggcgggagcggcggggagcacctcggaccaggaccgccctgacggccggaccctctgccgggagtgggtgtccgcacagtggctcgtccgctccaactcccccgacggcgacgagcagtactccctgacgtcccacgcgctcgagtcgctctccctcgtcgacgcgctctccaccgaccgtgcactcatcagcgagtcccggctgacgatgatcgtcgacgccgtccaccgctgggcccaccgcgcggacccggaccgcgacgcgcacctccgacgcctcgacgcccagatcgacgagctgcaggccgagcggggccggatccgggacggtggcgacgtcgtcacggtcgacgctccgaggatgcgggacgggtacgcgaacctcatcgacctgatccggcagctcccgagcgacttcaaacgggtcgaggaggccgtcgcgacgatgcaccgcgagatcgtcgaggacttccggcaggagctccgcccgatcggcgaggtcctcgacgactacctcgcacggaccgactcgctgatggagtccacgccggagggtcgcgcgttcgagggtgcgttcgaactcctgcgggacgacgacctgctcgtgcgcctgcgggacgacatcgcgacgatcctcacccacccgttcgcgcagtcgctgacgagccaggaacgccgcgccttccggaacaccgtcgccatcctccgccaggggatcgaggacgtcctcgcccagcggcgccagctcaccgccacgctccgcgaccagatcgtcgcccacgacgtcgtccgcgaccgtgaactcgaggccaccctccgcagtgtgaaccgccgactcgcgaccctgatgcaggctccgggcggcccgaccagggtgccgctcgaactgctgccgccgaccgccgagatcgagcacctgcgcgagcggttccacgacccggactccgactccgtcccgccggcgatcgaggacgaggacctcgacgcgttcgagcccgtcgaggtcgacgacctgcgccgccacggcggtccgctcctcgacgagctccgcgccgccctcgccgcagctgtcgggagtaccaccgacgcggtgttcaacgcgctcccggctgcgcaccggcgtcctgtcgagctgttcgggctcgcgcacgtcctggccgcggtcgacgggctcgacggcgccaccgcgacgacacaccgggcgatccgcccggacggcaccacggtgaccttcgacatgccggccgtgcgggtcgaacgcgatctggacgcggccggcccgaccggttcgggacatccgagcggcgaacgaacacggcccgatgtcccgaaccggtcggccggcccgaacgaccccgtccggcgaggaccggagcacgacaggagcaccgatgactga

SEQ ID NO: 47787 - DNA, 1020 bp, Curtobacterium sp. Leaf261
atgtcccgaaccggtcggccggcccgaacgaccccgtccggcgaggaccggagcacgacaggagcaccgatgactgacccggcacccgcgtccgcaggcctcgacagcgcagacgtcgacaccagcgacctcgacaccagcgacgaccacgacagcaccttcgcgctcttcgagggcgacgagggccacctcgcagaccccgaacgccgagcactcgtcgcactcctccgacaccgctacgtcagcgcccgctcgcaccccgtggagtggcgcgccctgctgaccgccgagcaccacctccgctcccggctcaacgacctgttcctcgagctgcacatcgaccacgagcgcgaggtcgcgttcaagcgccaggcccgctcggagagcaccaggcggccgttcccgacgctcctccacgacaccgcctacacacgcgaggagacgctcgtcctcgtgtacctccggatgcggctccgcgccgacacccggccgggccccgaccaggtcgtcgtcgaccggagcgaggtcctcggccacgttgcggggttccgtccggcgaccgcgaccgaccggacccgcgacgagggtcgggtcgcgaaggccatcgaccgcctcgtcaccgccaggatcctgctccgcacgacggacccggaccgcttccggatcgcgagcgtcgtcgaggtcctgctccccctcgagcgcctgcaggagctggaccgctggctgcagacccagaccgacacagcggcccagaccggtgcagtgacccagaccgacacagcggcccagaccggtgcggtgaccgagaccggtgcggtgaccgagaccggactggaggcgcggggcggccccgcaccgtccctcccgtccgacacggtgaccgtcgccggactggaggcgcggggcggctccgcaccgttcctcccgtccggtgcggagcacgatgaccagggtgacccggacgccgttccggacgacccgaccgacgcaccgctcgagggactggacgaccgcgcatga

SEQ ID NO: 47788 - DNA, 3528 bp, Curtobacterium sp. Leaf261
atgaccgacgcacgcacgaccgaggacgtcggactcttcgacgtcgtggcgcagtggcgcgccgagagcctccaggtcgtcaactggggcgggttccagggccaccggcagatcgacctgtccgaggggtcgacgctcgtctccggtgcctccgggaccggcaagtcgacgctcatggacgcgtacctcgcggtgatgatgccgtccgacgtgccgttcaacggtgcgtcgaacgacgccacgaccggccgcgcacggagtgccgaccagcggaacctgctgacgtacctgcgcggcaaggtggactcccggcgcgacccggagaccgggagcctccgggacgtgaacctccgcggcgacgaccaggcaacgtggggtgccgtcgcggtgacgttccggaacgacgacgagcgacggttcaccgtgttccgcgcctacgtcgtgccgaagcgggcgcgcggcgtgtcggacatccagatgacgatggcgacggtcgacgacgtcttcgacctccggcggctcgagcagttcgtcccgacgcggttcaatgccgccgagctcgccgggtacgtcccggggctcgtcgtccgcgacacctacacggagctggcctacacgttgcagacccgtctcggcatcggcgacagcggtggcggtggccgggcgatgcgactgctcgcccggatccaggccggccagcacatgccgaccgtcgacacgctgtacaagtcgatggtgctcgagaccccggggacgtacgatgccgcggaccgggccctcgcgcacttcgcggcgctcgacgagtcctacgaggcgatggacaccgaggagcgcaaggtccgcatcctcgagccgatcaccggactgcacgaggagatcgagcggagccgggcgtccgctgcggcgctcgacggcatcggggcgctcgatccgtccggcgaggcgccgctggcgtactggaccgccgccaggaagcgtgcgctgctcgacgccgaggtcgcacggaacgcccgtgagcggacggccgcggccgcggagctcaccgcggcgaccgtccggcacaccgcggacgaggtccagctccgcgacgccgaggcccgactccgcgagaacggcggcaacgcgctgcagcagctcgaggaccggatcgaccgcgtcacggcggacgttgcggcggtccgggccgcgcgggcgacgttcgaggagcggaccgcggtgctctcgcgcgaaccgggagcgtcctcgtcgaccgacgcgcgctcgtcgactgacgcgcgctcgtcgactgacgcgcgctcgtcgaccgacgcgcgctcgtcgaccgacgcgcgctcgtcgaccgacgcgcgctcgctcacggacgcccgctcgttcgcggagacgcagtccaggagctccgcgttcctgaccgagttcgacgccgagcgcgcggccctcggtgaccgccgcgacgcgctcagccgcgaggagtacccgctcctcgaccgcgagcgggaactccgacgcgagcggaactccctcgagcaccgccagggcgccatgccgctgccgatgcacgaggcacgggtcgcgatggctgccgcggcggggctcgacccgagcgacgtgcccttcgtggccgagctcctcgacgtcctgccgggcgaggagcactggcggaccgcgatcgagtccgtcctcgccccggtcgcgcggaccctgctcgtcgacgaggagcacctcgaccgcttcagcgccgcgatcgacgacgtgcggatccccgtgcggatcgcgttcgagggcgtcgcacccgggtcactcccggcccccgccggtgacccgtcgatggtgtccggcaaggtcgcgctcaaggactcccccttcgcggcctgggtgcacgaccggatcaccgccgaccgtgccgacgcccggtgtgtcgaggacgccgccgacctcggcggcggtggtcgacgcgtgaccgcgagcgggcagctccgcgacggtcggcgcggacagcacggcgaccgtcggcagccgaacatcatcggcttcaccaacgaggcgcgcctcctggtcgtcgaccgtgagctcaccgagatcgccgccgacatcgccggactggaggcacggcgtgcgtccgtcacgcgcgacctgtccgacctggaggcactccgcgtcgcccaccagcacgtcgtcgacacgacgtgggaccgcatcgacgtggccggcggagccgccgcgctcgaccgcctcgagcgggagcggacggcactgctcgccgccgacgacggcctccgcacgctccgcgactccgtcgccgggttccgtcgggcgctcgacacgtccgcagatcggcggtccgaggcccgcaccggcgtggcacggctcgacgagcgtcacgcggtgctcgtcgacggccaggacgccgccgccgaggtcctggagcggttcgacgaccgcgcggacctgctgcccgacgacacccagaccggcatcctcgaggaggccttcgcggagatcggggcgccggccgacctggacggcttcgacgacgccgcgcgacgactccgccggcgactcgaggagcgtctgacccaggcactcgacggcgcctccgcggcgaccatcgccatggtcacgaccttccagcgctaccaggacgcctggccggaccccaacctcggcaccggggccgcgtcgtacccggactacgcgcggatcctggagcagatcctggagaccgggctgcactcgcgccgggccgagtggcgtcgccggctcagccagtggagcggcgaggacctcgtcccgctcgccggtgccttcgaccgggccgtcgtggagatcgaggagcggctcgagccggtcaacgagatcctccgggagctgccgttcggggccaaccgcgaccgactgcggatcgccctccgacgggtgtcccgcgaggacgtggcgtcgttccgtcgcgagctcaaggccctgtccgcgaacgtcgccgaggcgctcccggacgacgcgctcgagacgcggttccgacgcctccgccggttcatggacacgatccgcccggacgccggtgcccccggccggcccggcgccggtggcggtcccggcgggcgtggcacggggtcgctgctccgggatgcggtgctcgacgtccgacggcacatggagatcaccgccgtccggtacgacaccgacggcaacgacctcggggtctactcgtccctcggcgacaagagcggtggcgagacgcaggagctcgtcgcgttcatcgtcggggcggcactccgctaccagctcggcgacgagacgaggccccgcccgcggttcgccccggtgttcctcgacgaggcgttcatcaaggcggactccgagttcgccgggcgtgccgtcgcggcgtggctccggctcgggttccagctggtcgtcagcgcgcccctcgacaaggtgaccgcgctcgagccgagcatggaccggctgctggcgatgcgcaagcacccgacgaccgggcactcgtccgtgacggagatcgtccgggccgactga

SEQ ID NO: 47789 - DNA, 1389 bp, Methylobacterium sp. Leaf89
atgctgttcacacacctctccgacgacctgttcaagccgctcgcctcgccgagccgggccttcaatgcggcgctcctgctgcacctgcacggtcgggtcttcggggacaccgccgaacccctgcgcaagagcgaacttctgacggcgatcggtgacttcgccgccgatttcgtggaccgggagatcgacgacgacgcctccggcacggtggaaccgagcgagcgccgctcggtcgtctatcgccgccttctcgatgccggctggctggtggagcggcgggagcgctatgttccagtggtcgagttcgaccccgaggcccggatggtcatcgaggaactggcgcggctcgacaggggcgagcggcgctcctacggcggtgccgtcctcgacgtgctgggcagtctggaaagcgcgatcgccaacccagccgagcgatccgaggccctggtcaacgcggccaagtcggcccgtaccttcctcagtcatctgcgcagcctggctggatcgatgcgcaagagcgaggagcgcatcctgcgcgaggcggatcagggcgtcgccctgcgcctctacttcgaggagttcgtcgcgcggcacctcgtcagcgactaccggacgctgcacacccgcttcaatcctttccgcttccggtcgggaatcgtgcgcgaggccggccgtgccctgcgcgatcccctcaccctgcgcgccctgaccgatgcgggtctccgggaggggcgggcgcccgaccgggagacggccgagcgcgccgtccgcggcgatctggccgagatcctggcgatcttcgagggtctcgatcgccacctcgacgtggtcgccgacatcgtcgcccggctcgagcgccggatcgccgccacgctgcgctacctggaccatcgggattccgaccggatcgagcgcacggccgcggccctgcgcgcggtggctggtggcgatgacgacctcgccagcctgcccgatccccaggtctcgctgttccgtaccccgatcggcgagccgcattgttacgcaccgcgcctgcgccgggcggcgatcgaatccgagccgttgcccgagatcgagatcgatcccgttatcgaagccttcatcgccgccaaggacgcgttccgggagcgcgtcgcggtcacgcccgagcggatcgtggccttcatcgaggcacggctcgggccggagcgcaccatccggggctcccagatccggatcgccgacgtcgacgatttcgtcgtgttccagcgcctgcgggagatcgacgtcctgttcgacgggagcctgcgcggccgctatcggctttcgcggatggagggtcgggtgtcgaatggctggctcgattgcccggacttcctgctggagcgggcgccggcgctgcgccgctag

SEQ ID NO: 47790 - DNA, 636 bp, Methylobacterium sp. Leaf89
atgctcgaatcgtttcgcgccatcgtcgatggtgaggacttgccgccgcccggagcccgcgcgccttcggaagaggagttgacccgggcgcttcaggtcctcctgaagagccaatgcgtctacgccggaacaccgggcatcgggcgctcctatgagctcgcacggcactacgcgcccttcttccaagcctacttcgcgtgcctcggctaccagttcgacgtgatgcatcgcgatcagatggtgtgcctgcgggttccgcccgagggcgtccgtcacgatgcccaggccgagcgcctgcgcaaggacgagactctggtcttgctcgcccttcgtctcgcctacgaggaaggcctgcgtgcccaccgggtgaccaccgagggtgtcgtggaatgcacgaccgacgacatcgtcgaatcgatccgcaccgctacgcgtagcgatccgccggaagaggctcgactcaccgagatcctccgtctgttcgcgcgcaagggggccctgcgcctgggcgaacgcgacaaggtcgagaagatcacacccttgatggtgatgcccgggatcgcggtgttgtcgccggacgcctggatggatcaggtccgagcctggggggctgcgcgcggcgacgaggaggcgtga

SEQ ID NO: 47791 - DNA, 3456 bp, Methylobacterium sp. Leaf89
gtgtaccgccttaccgatatcgtcctctcgaactggtacctgatccgccgcgagcagattcggatccggggcgcggctgcgctggtgggacctacgggggccggcaagtcgaccatcttcgatgcggtcggcacggtgctggcgggcaacaatgccagccgcctcgccctcaacgcttcggcctcgggacgcagcgcccggaccgtgcgagattactgcctcggctggatcagcgatccggccgagggcggacgccctacccgtgaagcctgcgagacactgatcgtcctggtcttcgagaacgagaccacggggcgcgtcgtctccgccgggctcgccctggcggcccgggcagaagacagccgcgagacgaccctgtcccgcttcgtccatgtcggccaccgcttcgaggtcgccgactacgtccgtgaggcgccgggcggaagcttcgtcgcgccctgggccgagatcgccaaggacctgcgcacccgcgggagcaccttcgacgagtaccgagcgtccggcgagcgcttcaccgccgaactcctccgaaaccttcgcgagggcgcggcggtgccggagccgcgccacttcctgcgcaccttctccaacgccgtggcgttcaagccgatcttcgattcctcggccttcgtccggtccttcgtgctcgaacccgagcccctggacgtcgcccgcatccggcaatcggtggagacctggcggcgcctcctcgagaccatcgaggagttggaacggcgcctcgcccacctcgcccggatcgtcgggcgctacgagacctgggccgaggcgagcctcgcctcggttctcggagacctgcgcgccgctgatgcggacctgcgtcggcgcatcatcgacaccgtgaccgcccgccagaccctcaaggacgtcgccgagcgcctgcgcatcgcgcgcgagagcgtcgccaccagccagggcttcgtgcgcgaaatcgacggcgagatcgcgggtaagaaggcgctgctcgccggcaccgccgccgaggggcgcctcgccgcctcgaacgccggcctcgccatgctggcccgcgaccgacgggacctggccgcccgggtcgccgaactggtcggaatcgtcctcgacaccggcaagctcgcggtgatcctcggcacgattcgcacggtctcgcccgaagccgcccgcctggtggaggcctgcgcccgatcgggtcttcgacgcgaggccaatcccgaggaaacgctgcggtccgacggatcgctcgccgcgttgctcgccggactggctggaatgcccccgatcgccgcacccctcgagcgggcggcggaggacgcggcgctgcgcgcccgcgccctggagaacgaggcgcagtcccgcgcgccggcaccgagcgcggggcgcggggcggcgccgcgtctgtcctcggacgtggcggcgttccgcgaagagctgtcccgcctcggcatcgtggcgacaccgatctgcgagctggccgagatcatcgattcaaaatgggggcaggccctcgagggcctcctcggcggcgcccgcgaggcgctggtcgtgcaaccagaccgcctcaacgatgcgttcgcgcatctcgaagcacgcaagagccagttctaccgctgtctcctcgtaaagacgaccgatacggcccggcggcgcggcgggcgcgacgacgagggtccgctcgccctgatcgagacggccgatccccacgcgcaggccttcctcggcgcgcgcctcggcggctacgatctcgccccgaacgacgcggccctcacgcatatgagccgggccgtggccccgagcgggcgctcgacctcgggcatggcttattcggtggtgcgcccggtccagctcatgatgacccggggccaccggggtccgaccgcagagagccgccaggattgggagcaagcggtcgccgaggcgcgccgagctcgggcagaggccgatgtcctgcgggaagcggcccggatcgggaccgccctcgcgcgccgcctgtccgaaacgaacctggatctcgctgaattgcgcgccgaggcggacgcgatcgagggccgacgccgcagcctgaccacggagcgggagagcgtcgagcgggccgagaccggcgtcctggaggccgagctcgcggagctcgccaaggagcgttcggcctatctcaccgagcttgtccaggtgctggagccgaagcgagacctgctgctgggcgaggaggccggcctgaaggccaaggttgcggcgagccgcgaggccgcccgtgctgcgctccaggcgcgccggaccgcgtatcagcgctgggccggcggcgacagcatgcgcatccggctcgtgcgtccggacgccttcgacccgaaggcgctcgcgacgctgcgtgccgagcgtgcggatctcgacgccaaggcgctggcgagccatgccaataccgggcgtgcgcgagcccgtgaagcggcggagacggcgcgaacgcagggcagggcggccgagcgcgacctcgccgagtactgcgtgcagtggcgggtggaaaatccgctgggggcgggcgacgtgccggcctccttcggctacggctgggcgaagcgggcccatgacgaggtggcgagccacgaactgcggcgctaccgggaccaggcgcggcgggcggagagcgagatgcgccgcctgatgatcgaagacctgttgacccggctcgcggacaagttcgagcgcgtacgcgcccggctcgaggccctcaacgagcgcctgtcgagccagaccttcacggggcagacctatgccttcgaggccgaggtggatcggcgctacgccgccgtccatgccctggcgacagaggtcgcccgctcgccggatgcggcccaggcgatcctgccggacgagggcggcgcgattcccgatggcccgctcgcggcggcgatcgacgagatcaccgccctgatcgccggtgaagagagcgccgcgcgtctcgcggactaccggaactacttcgtctacgagatcggcatgcgcgatcgggcgggaaaccgcaccacgatgtcgaaccgcgcgctgcgagggtcgggcggcgaagcgcaggcgcccttctacgtcgccatcgcggcgtcgctcgcctcggcgtattatccgggcgaccgacccggcgacgagaaccccggcctcggcctctgccttctcgacgaggcgttctcgaagctcgacgtgcgcaacagtcaggccctggtcgatctctatcaggcgtgggggctgcaactgctgatcgcggccccggaagacaagcggacgaccttgaccgaggtgatggacaccatcgttaccgtctacaagagcccggatctctcctccgtgcgaatcgaggccgaacaccccctggaagctgccaagcgcgccctggcggcgatcaatcccgagcgccagggcatcgaaggcttccggatcaccgacgccgccgagtag

SEQ ID NO: 47792 - DNA, 1413 bp, Methylobacterium sp. Leaf90
atgctgttcactcatctcgccgacgacctcttccgaccgctcgcttcgccgagccgcgccttcaacgcggccctgctgctgcacctgcatgcccgcgtgttcggcgatgccgccgagccgctgcgcaagagcgagttgctggccgccatcggcgacttctccgccggctggagccaggccgagattgccgacgacgaggcgacgccggtcgatccgatcgagcggcgctcggcggtgttccggcggctgatcgaggcgggctggctggtggagcggcgcgagcgctacgtgccggtggtcgatttcgaccccgatgcgcggctcctgatcgaggaactggcccggatcgagcgcggtgagacccgctcctatggcggcgcggtgctcgaagtcctgagcgcgctggagagcgccatcgccagccccgccgaccgctcggaggccctgcgcaacgcggcgaaagcctcgcgcaccttccttggccacctgcgcggcttggccggcgccatgcgcaagctcgaagagcgcatcctgcgcgagcccgatctgagcgcggccttccggctctatttcgaggagttcgtcgagcgacacctcgtctccgactaccggacgctgcacacccgcttcaatccgttccgcttccgctccggcatcgtgcgcgaggccgggcgcgccctgcgcgatccgctgacgctcagggcgctggccgacggcaacttgcgcgagggccgcgccgccgacatcaccgcggccgagcggatggtgcgcaccgatctcgtcgagatcctctcgatcttcgagggactcgacccgcatctcgatgcggtggccgaggtggttgcccggctggaacggcgcatctcggccgcgctccgctaccgcgacccgcgcgactcggcccggatcgagcgggcggcggcggcgctccgcgcggtcggcgcgggcgaggacgacctcgccggcctgcccttgccgcagatctcgctgttgcgcccgccgatcggcccgccgcagctcacgaatccgcgcatgccacgccggatcatcgagtacgagccgctgccggagatcgacatcgatccggcgatcgaggcgttcatcgccgccaaggacgagttccgccgccgtatcaccgtgacgccggagcgcatcgttgcctatctcgacgcccggctcgcccaggtgaaggctctgcgcggctcggacatccaggtcgatgacgtcgatgcctttgtcgtcttccagcgcctgcgcgagatcgacgtgctgttcgacggagtcctgcgcagccgctaccgcgtcgcccggatcgaggtccgcgtctccaacggctggctcgactgtccggacttcatgatcgagcgcataccgccccccgccgcccggcgcggagccggcaaagcaggctga

SEQ ID NO: 47793 - DNA, 636 bp, Methylobacterium sp. Leaf90
atgctcgaacccttccgtgccatcctcgacggcgaggagatgcccccgcccggcagcgccgcgccaagcgaggaggagctgacccgtgcgcttcaggtgatgctgaagagccagtgcatctacgccgcgaccaccggcatcggccgatcctacgaactcgcccggcactacgcgccgttcttccgcgactacttcgcctgccttggctaccgcttcgaggtcgcccaccgcgaccagatggtgttcctcgccctgccgccggacggcgtgcgccacgacgcgcagggcgagcggttgcgcaaggacgagacgctggtgctgctggcgctccggctcgcctacgaggagggcctgcgcgaccaccgcgtttccaccgacggcacggtggaatgcaccaccgacgacatcgccgacgcgatccgctccgccgcccgcaccgaacccccggacgaggcgcgcctgatcgagatcctgcgcctgttcgcccgcaagggtgccctgcggctgggcgagcgcgaccgggccgagcgggtcaccccgctgatggtgatgccgggcatcaccgtgctttcgccggatgcctggatggatcaggtccgcgcctgggcctccgccggggaggggaggggcgtctga

SEQ ID NO: 47794 - DNA, 3480 bp, Methylobacterium sp. Leaf90
gtgtaccgcctcaccgacattgcgatctcgaattggtacctcatccggcgcgagcagatccggattcggggcgcggcggcgctcgtcggtcccacgggggcgggcaagtcgacgatcttcgatgcggtcggcacggtgctggccggcaacaatgcgagccggctcgcgctcaacgcctccgcctcgggccgcagcgcacgcacggtgcgcgactactgcctcggctggatcagcgacccggccgagggcgggcgcccgacgcgcgaggcctgcgagacgcttatcgcgctcgtgttcgagaaccccgcgagcggccgcatcgtcacggtcggtctggctctcgccgcccgctccgaggagccgaaggaggagacgctttcgcgcttcatcgccgtcggccaccgtttcgagatcgccgattacgtgcgcgagacgagcgagggcagcttcgtcgcgccctgggccgagatcgccgccgacctccgccgccgagccgatacgttcgaggagtttcgcacctccggcgagcgcttcaccgccgccgtgctggcgaccctgcgcgagggggcggccgtgcccgatccgcgccagttcctgcgcaccttctccaacgcggtggcgttcaagccgatcttcgacaccagcgccttcgtgcgcagcttcgtgctggaggccgagccgctcgatgtcgcccgcatccgccagtcgatcgagacgtggcggcgcctgctggagaccatcgaggaactggagaagcgcctcgcccacctctcgcgcatctgcgcgcgctacgagggctgggcgcgagcgagcctcaccgccgccctcgacgagatgcgcgccgccggtgcggatctgcgccgccgcatcctcgaccatgcggaggcctgtcgcctgctcgccgagacgtcggagcgcctgcgcatcgcccgcgaaagcgtggtgacgagccagggcttcgtgcgcgagatcgacaccgagatcgccgcccgcaaggcgctgatcgtcggcagcgtggcggaggcgcggctcgcggcctcccatgccggtctcgccatggtcgctcgcgaccggcgcgacctgaccaaccgcctcgccgggatcgtcggcctcgtgcaggatgccggccgcctcagcgccattgccggtcccttgcgccggatcgatcttcaggcggcgcgcatcgtcgaggcctgcgcccgctcggggctgcgccgcgaggcgccgcctgaggacattttacgggtcgatgggccgctgaaaggtctgctcgaagggctcgcgcagatgccggacgtgtccagcaccctggaagaggaagcggaagacctcgcccttaaggcccgtgagcgcgagaacgaggttcgcggcctcgatgggcaggtgaatgccggccgttcctcggccgcgcgcctgtcctccgacacggaggcgttccgcgaggagctgggccggctcggcatcgaggcggcgccgatctgcgaactcgccgagatcgtcgatccgaaatggggcccggccctcgaaggcctgctcggccgcgcccgcgaggcgcttgtggtcgagcccgaccggctggaccgcgccttcgccctgctcgagtcgcgaaagaaccagttcttccgctgtctccttgtgaagaccaccgatacggcgcggcgcgccgcgcggcgcttcgatgatgggccgatgggcctgatcgagaccgacagcgaccacgccgaggccttcctcgcggcgcggctcggtggctacgacctcgcgcccgacgatgccgcgctccggaacatgagccgcgccgtggcgccgagcgggcgctcgacttctggcatggcctattcggtggtgcgccccgtgccgctgatgatgacccgcggccagcgcgggcccaccgccgaaacccgccgccgcctcgacgaggcgcgcgaggaggcgcggaccctgcgagccgaggccacggtgatgcgcgaggccgcccgcatcgccgcgctgctgcggagccggctggcggaagcgccgatcgatctcgaggccctgcgcgccgaggccgatgccatcgagggccgccgccgcagcctctccaccgagcaggagaccgtcgcccgcgccgatgccggcgtgatcgaggcggaattgaatgagcttcagaaggagcgctcggcctatctcaccgaactcgtgcaggtgctggagcccaagcgcgacgccgcgctcgcggaggaggcggggctgaaggcccgtgtcgcgcaagggagggaggcggcgcgcgccgcgttcctggcctaccgcacggcgctcaagcgctggacctccggcgacaccgtccgcatccgcctcaccggcaccgttcccgccgacgtgccggacacggtggccgggatcgccgccgcgcgtgccgaccgggccgcgctcgacaccaaggcgctggcgtcgctggcctcgcaggcccgcgcctccgcccgcgaggccgccgacagcgtgcgcaaccagggccgcgccgccgagcgggatcttgccgagtactgcgccgcgtggcgcgtcgagaacccgctcggttcgggcgagcagccggcctcgttcggctatgcctgggcgacccgcgagcgcgacgaggtggcggggcacgaactgcgccgctaccgcgaccagtcgctccgggcggaggccgagatgcgccgcctgatgaccgaagatctgctgacgcggctcgccgacaagttcgagcggatgcgtgcccggctcgacgccctcaacgagcgactggcgtcgcagaccttcaccggccagacctatgccttcgaggcggaggtggaccgccgctacgccgccgtccacgcgctcgctaccgaagtcgcgcgctcgcccgatgcggcgcaggcggtgctgccaagccccgacaatagcgctgagggcggaccggataacagcccgctcgccgccgcactcgccgagatcacggcgctgatcgagggcgaggagaacgcggcgcggctggccgattaccgcaactacttcgtctacgagatcggcatgcgcgaccgggcgggcaaccgcaccaccctgtcgagccgggcgctgcgcggttcgggcggcgaggcgcaggcgccgttctacgtcgcgatcgccgcctccatggcctcggcctattatcccggtgatcgccccggcgacgagacaccgggccttggcctctgccttctcgatgaagccttctcgaaactcgacgtgcgcaacagccagtcgctggtcgatctcttccgcgcctggggcctgcagctcctcatcgccgcgcctgaggacaagcgcacgacgctgacggaagtgatggatacggtcgtcaccgtgtacaaaagcccggatctcggctcggtgcgaatcgaggccgagcatccgctggaaaccgccaagcgggcgctggccgaaatcaacccggatcggcgcggaatcgacgcgttccgcctgcccagcgccgccgaataa

SEQ ID NO: 47795 - DNA, 1800 bp, Frigoribacterium sp. Leaf263
gtgaacgaatcgtcagggcccgacgacgccctgagccgtgacgacgtgcgcgtcgcgcacgaggacgaccccacgtgggccctgctccgcagctacaacagccgctggatgctcccgctcttctcgcgccatctcgagcacgccgagggtcccgtctcggccgactggttccaccagcaggtcgcccaggccctcgagctgaacgcgctcgatcagaccgcgcccgaccagaccgcgccagtccggaccgcgccagtccaggccggaaccgaggaggcgcgggtcggcggatccggggcgacggccgcccccgagacccgcaccaccccggtcgactactgccggagctgggtcgccagccggtggctgatccgcacccgcgcctcctcgacggacgacggcggggcacgccacggcgacgccggccacggcggctcgagcagcacgacgaccggcacctcccccgtggccgacggctggggcgcgttcggcgccgctcatccgagcggcacggcggcggggtcggccccgacgcgcgcctcgagcccgcccccgcgcggcgaggcccgcgcgcagtaccggctctccccctccgcgctcaaggcgctgcgcatcgtccgcgagctcgtggagcaggacaacgcggtgagcgaggcgcgactcggcagcatcgcccacgccgtcgggcagctcgccggtctcgcggacccgagcgtcgaggcgcagacggcgcggatcgacgagcagatcgccgagctgcagcgccgccgggcccgcatcgagcagcacggcaccgagccggtcggccccgacgtgctgaagcgccaggtgcgcgaggtggtgcggctgaccgcgtcgctccccgaggacttccgtcaactgagcagcatggtcgagcagcggcaccgcgaggtggcgcgccgggcgaccgtcgagcacgtcggcaagggcgcgctcgtcgagcagtacctgcgcgagaacgacctgctcgagcagacccccgaggggcgcgcgtaccgcggtttcgcgcagatgctgtcgtcgcgcgagatcgacgtgatgcgggccgacatcgagctgatcctcgatcatccggccgccggcgagcatctgaccgagcggcagcgcacgcagctcgagtcgctgatctcgtcgctgctggccgaggagcagtctgtgcaagagacgtacgggcgctggacgtcgtcgctccgccggttcctcagccggtcgtcgaccgagcggcaccagagactgctcaccctcgccgaccgggccctgcacgccggcggcgtctgggccgaacgccgacccggcccggccgtgctgcccgtcgacgtgctcggcctcggtgcgctcgacgtcgtcgacatcagccaggcgcagctgcacagcgaccgcgggcggccgacggtcgacgtgcaggtgcccgagggcgacgccatgctgccggcggccgaccgggccgcgctccgcctctcgtccggcacgagcaccgcggcggtcgcggcgaccctcgagcgtctgctcgaggccgacgagaccgtcacgagcgccgatctgcacgaggcgaccgaccccgagttccgccggctcgggctcgtgctcagcatgctcgacctcgccatcgaccagggcctcgtcgacgagagcaccgagaccgtcacgctgacgagcgccgacgacgcaggaggcgcggatcgccgggtcgtcctcccccgcctcgtcttccggcgaccgcccgcacggggcgacgacgcccccgactccgccccgcagtccgagagagaccccgcatga

SEQ ID NO: 47796 - DNA, 954 bp, Frigoribacterium sp. Leaf263
atgagccccgaccagtacgacgcgaccgacgcggccacgccgacccgcacctcctcgggggcgcaggaggtgaccgggtcggcgacggcggacggcgtcgacgccgccaccgccggagcggccctcgaccggggcgacgacgggtcgccggatcggctgcgcgacgagctgcccctcgccggacggaaggcgctcgtgacgctgctgacgcatcgcttcgtgtcgcggtcccggcagggcgaggcctgggccgccctcgtcgcctacgagcccgagatccgcgcgcgactggacgagatgttcctcgtgctgatcgtcgatcacgagtacgaggtcgccttcaagcggcagagcggacaggacgacgtgccgatcctgctgcgtcgcgagaagccgatgtcgcgcgacgcctcgctgctgctggtgttcctccgccgggagcacgccttcagcgacgcccacgacgagtccgtcgtggtgtcgcgccaccagatcgcggagttcctcgaccggtaccacgacgacgcctcgcacgacgagatccgctcgacgcggcgggtcgacgcggccatcgcggccatggtgacgcgcgacctgctcgagccggagcccgacgaccccgcgctgttcgtcgtcgcacccgcgatcgtgcctctcgtgacggccgagcagctcgcgcacctcgagagggtgttcctcgaggcggccggggccgatgcgcccgtcgacgccccgctcggcgtcgaggacgacgagccgtcggacgacgaggactccgacgacggacgccccgacgacgggccgcgtctcgtcgccgaccccgccgtcggcgattccggcgccgacgaggcgcccgacgccgccgaggcgcccgacgccgacgaggccccgcgccccgacccgaccgccgtcgcgctcgacatccccctcgacccggaagcagaccaggcatga

SEQ ID NO: 47797 - DNA, 3486 bp, Frigoribacterium sp. Leaf263
atgatccccgccgacgcgacccgcacctccccggccttcggaacggcccccgagacggcccccgagtcgacctccgacgacgaggcgacgcccgatctcggcatgttccactcggggcagtaccgcatccagcaggtgcagctgctcaactggggcagctactcggggctgcaccgcatgcccgtcggccgcggcggcatcgcgatcctcggccccaccgggcgcggcaagtcgaccgtgctcgacgccatggcggccgtcatcatgccgaacccgcaggagttcaaccgcgccgcccgcgacgacagccgccagcgctccgagcgcaccgtctacagctacgcgcgcggcaagaccgacgagatccgcgacgccgcctccgaccggacgaccacgcggttcctccgaccgctcggcgaggccttcgcgagcggtgccgcgatcacgtacgcgaccgagctcgggcagaccctcacggccgtccgcctcgcctggatcggcaccgacacctcgagtcaggacgacgtgacgcaggccagcgtctacctgctcgtccgcgggcccttcgacctcagccgactgaccgaggtcaagcgcgacgccagcagctcgagtccgctgacgaagggctccctcgcgcgcctcctcgatcccctgcgcgacctggtcacctcctcgcagcccgagttccgggtgcggctctgcggcgagctcggcatcggcggcagcgacgagtcgcagctgaaggcgctgacgctgctgcgtcgggcgcaggcctcgaagggcgtcttctcgatcgacgagctgttcaagcagttcgtgctgacgcagccgaaggccctctcccgctgggagaccacgctcggcacgtaccgcgaggcctcggctctctacgacgtcttcgagacgacgcgcaggaagctcgccgtgctcgagccggtgccgggcctcgccgaccgctacgagatcgcgggccacgatgcgaccgagaagcgccgcctggtcgacgagaccgacggcccgagccggttgcgcgtctggctcgccgagaaggtcgggagctgggtcagcggcgaggtcgaccgggtcaccggcgacaagcgcgccctgtcggagtcgaggaggcgcgcggccgccgacgacaccgccgcgtaccgtgcccgtgagcaggccctggcccgcatctcggatctcggcggcgacccctcccagtcgctccgccagctcgtggccaccgccgagcgcgacctcgccgtgatcgaacgcgagcgtcggcgcttcgcgacggcgctcgacggcacgggcgagtccgtgccgaccagcgagaagcagctcgtggccctgcggcagcgtgccggggtgctcgcggcggaggacgccgcggcccgcgccgcggccgacgaggtgcgcggcgagctcgccgcccgcatcggcgagacgaagcgcgccctgtcggcccgcgaggcgcagcgccgctcgttcgagcagcgcggtggcaacgtccccgacgacgcggccgagcgtcgactgcgcatcgccgagggcaccggcatcccggtcgcgggtctgccctacgccggcgagctgttcgaggtcgccgcggcgcacaccgactggagcgtggcgatcgagcgggtcgtcggcgacctggccacgcacctcctcgtcgaccgctcgaggttcgacgccgtccgccgcttcgtcaacgacaacgacatgcgcggccgcatcacgctcgtccccgcctcgaccggcgtcgagcccacgcgcgaggccgtcgcccggaccgtccccgcgatgctgcagttcgacgagcggagcccgttcgccggctggctcgtcgacgagatcgtgcgcgagcgcagcgtgctgtgcgtcgagggtccggacgacctcgactcgcccgtgcccaccggtgcccgcggcgcggtcacgcgggccggcctccggacggggtcggggggccgggtcgtgaaggacgaccggcgatcacggtcgtggatcggactcgacaacagcgcccggatcgccgagctgaccgacgagatcgcatcgctcgagcgcgacctgaccgtcgcccgcgccgcatgggactccgccgaggccgagtcgtcggcacgccgccgcatgctcgacgccgtggcccggtcgaccgagttctcgtggaccgacatcgacaccgcgcccgcgcaggcccgcctggacgacctgcagggtcagctcgaccggttgtccgacgagcgtcccgagctcgcgacgctgcaggccgacgcccgccgccacgacgacgagcgctcggccgcgacccgacgcctcgccgagctcgaccacgagctggcccgtctcgacgccgagcactcgaccctcgtcgacatcgaggacgccttcagcgacgccctcggcggcgccgacccgctcaccgaccacgagcgcgccctgctcgcgcccctgcccttcgccgctccgcgcgaggtggccgacgtcgagcggtcgtaccgcgaggcgctgggtctgctgcgcggtcagatcgacggccacgaccgcgagcgcacgcaggccgagaacaccctcgtgctgatcttcgagcggtacctcgagctcgaccggacggccggcatcgacgcgtcgatcgacagcctcggcgccgtcagggccatccaccgcaccctcgtcgacgacgccctgccgagcgcgaagcaggactggctcgcgaaggccggcgccgacatgggcgacagcctccgggccctgctcgtgcagatcgaggaggacggtcacgtcatccggcgcggcgtccggcccatctcgcaggctctgcggtcgatcgagttccgcgaggggtcgacgctcgacatcgagccgcggcccgtgtcgaacggcgacctcgtcgagttcaagcggaccctgcgcgagcacatcggcgaccgatccgaggcgccgcgcgaccccgccgagatcgagcgtcggttcatcaccctgcggcgcgacctggcccacctcgaagagcgctcgaagatcggcgacgcctggcgccgccgggtgctcgacgcgcgcgagcactaccagttccgggcgatcgagacgcgggtcgacggcacgcagatcgttcacgagggggtcgccggcaagtcgggcggcgaggggcaggagctcatcgccttcgtgctcggcgcggccctgcgcttccgactcggcgacggcaccgaccgggtgccgacctacgcgccgatcgtgctcgacgagggcttcgtgaaggccgacgacgagtacaccgggcggtcgctcgcggcgctgacgtccctggggttccagctcgtggtcggtgcgccgcgcgacaaggtgaacgcgttcgagaggcacgtcgacagcgtcgcgtacatctcgagcgaccccgcgcaccccgagctctcgcgcatctaccccctgaccatccgccaggcgatggaggtcgagcgccacgggctcgaccccgccgccctcagctga

SEQ ID NO: 47798 - DNA, 1413 bp, Methylobacterium sp. Leaf93
atgctgtttactcgcctccccgacgatctgttcaagccgcttgcctcgccgagccgggccttcaacgcggccctgctgctgcatctgcatgccagggtgttcgccgagaccaccgaacctctgcgcaagagcgaactgctcgcctccatcggtgatttctccgccgactggtcccagggcgagatcgccgacgacgaggcgacgccagtcgatccggtggagcgacgctcggcggtctaccggcggcttctcgacgccggctggctggtggaacggcgcgagcgctacgtgccggtggtcgatttcgatccggatgcccgcctcgtcattgaggaactcgcccgtctcgaccggggcgagacccgctcctatggcggcgcggtgctggaggtactgggtagcctggagagcgcggtggccaacccggccgaacgttcggaggccctggtcaacgcagccaaggcctcgcgcgccttcctcgggcatctgcgcagcctcgccggctcgatgcgcaagatcgaggagcggatcctgcgcgaggaagaccagggcgtcgcgttccgcctctatttcgaggagttcgtggcgcgccatctcgtcagcgactaccgcaccctgcacacgcgcctgaacccgttccgcttccgctccggcatcgtccgcgaggcgggccgcgccctgcgcgacgacctcaccctgcgggcgctctccgaagcggggctgcgcgaggggagggcgcccgagctgtccctggccgagcgggcggtgcgggcggatctcgccgagatcctgtcgatcttcgaggggctcgaccggcatctcgacgccgtggccgacatcgtggcacgcctggagcgccggatcgcggcggccctgcgctacaccgaccatcgcgattccgaccggatcgagcgtaccgccgcggcgttgcgggccgtaggcgccgccgaatggtcggagaccgctccctccgccgaggtctcgctcctgcgtccgcccatcggcgagccgcatctctacaccccccgcatgcggcgcgcggcgatcctgtccgagccgctgccggagatccatctcgaccctgccatcgaggccttcatcctggccaaggacgccttccgccagcgggtgatggtgacgcctgagcgcgtcatcgccttcgtcgagcgcaagcttggggcgagccccgccgtccggggttccgagatcgtggtggcggatgtggacgagttcgtggtgttccagcgcctgcgcgagatcgacgtgctgttcgacggtatcctgaccacgcgctaccgcctctcgcgggtcgagggccgcgtttccaacggctggctcgactgcccggacttcctggtggagcgacgaaacccggcggtccgccccgtatcggttcgcccgcgcggcgcatga

SEQ ID NO: 47799 - DNA, 636 bp, Methylobacterium sp. Leaf93
atgatcgaggccttccgcgccatcgtcgacggtgacgagcctccgcctccggggacgcgggcaccgtccggggaggatctgacgcgggcgctccaagtgctgctcaagagtcagtgcgtctattccgatacccccggcatcgggcgctcttacgagatcgcccggcactacgcgccctttttcaagagttacttcgcctgcctcggctacggattcgaggtctcgccccgcgaccagatggtgttcctgcgcgtgcccccggacggggtgcgccatgacggccaggccgagcgcctgcgcaaggacgagaccctcgtcctgctcgccttgcgtctcgcctacgaggaggggctgcgcgcgcaccgcgtcaccaccgacggcgtggtggaatgcaccaccgacgacatcgccgaatcgatccgcaccgctgcccggagcgaggcgccggaggaggcgcgcctcactgaaatcctccgcctcttcgcccgcaagggtgccctgcgcctgggggagcgcgacaaggccgagaaaatcacgccgctgatgctgctaccgggcatcgccgtgctctcgcccgatgcctggatggaacaggtccgcgcctgggccgcggcgcgcctcgacgacgacggctga

SEQ ID NO: 47800 - DNA, 3456 bp, Methylobacterium sp. Leaf93
gtgtaccgcctcaccgacatcgtcctctccaactggtacctgatccggcgcgagcagatccgcatccggggggcggctgccctggtggggccgacgggcgccggcaaatcgacgatctttgatgccgttggaacggtgctggccggcaacaatgccagccgcctcgccctcaacgcctccgcctcagggcgtagcgcccgcacggtccgcgattactgcctcggctggatcagcgacccggccgagggcggacgcccgacccgcgaggcctgcgagaccctgatcgtcctggtcttcgagaacgagaccaccggccgcgtcgtctcggtgggcctcgctttggcggcccgtgccgaggacagccgcgagaccacgctgtcgcgcttcatcgcggtcggccaccgcttcgagatcgccgattacgtccgcgagaccgcagagggcagcttcgtcgcgccctggccggagatcgccaaggacctgcgcatccaggccgaccggttcgaggaattccgctcgtcgggcgagcgcttcaccgccgaattgctggcgctgatgcgcgagggggcgtcgagtccggagccacggcatttcctgcgcaccttctccaacgccgtggcgttcaagccgatcttcgattcctccgccttcgtgcgctccttcgtgctcgaaccggagcccctggacgttgcccgcatccgccagtcggtggagaactggcgccgcttgctggagacgatcgaggagttggagcgccgactcacgcatctcgggcgcatcctgaagcgctacgagacctgggccgaggccagcctctcggccgccctcgacgatctgcgcgccgccggcgccgatctgcgccggcgcatcctcgattacgcgaccgcccgctccaggctcggcgaggtggccgagcgcctgcgcatcgcccgcgagagtgtggccaccagccaggggttcgtgcgcgagatcgacggggagatcgccggcaagaaggcgatgctcgccgggagccagggcgaggggcggctcgccgcctccaatgccggcctcgccatgctggcgcgcgacaagcgcgacctctccgcccgcgtcgccgacctcgtggggatggtgcaggaggcgggcaagctcaacaccctgttctccgagattcagcggatcgatcccgacgccgcccggatcgtggccgcctgcgcgcgctccggcctgcgccgcgaggcgccccccgaggaatccctgcgcatcgacggccccctcggcggcctgatcgagatgctcgtggccctgcccgacatcgccacgcccctcgacactgccgccgaggatatggccctgcgcgcgcgggcccaggagaaggaggcgcaggtcctctcggccgagatcggcaccgggcggacgggcggcgcccgcctctcttccgacacggcgggcttccgcgacgaactcgctcggctcgggatcgaggccacgccgatttgcgagctcgccgagatcaccgatccgaaatgggggccggccctggagggcctgctcggcggcgcccgcgaggccctggtggtggagccggacaggctgaacgaagcctttgcccatctcgaagcccgcaagagccagttctaccgctgcctgctggtcaagaccacggacaccgcccggcgccggggcgggcgcgacgacgaagggccgatctcgctcatcgagacccgcgatcctcacgcccaggccttcctcgccgcgcgtctcgggggctacgatctcgccccgaacgacgcggccctcgcccatatgagccgcgcggtggcgccgagcggccgctccacctcgggcatggcctattccgtggtgcggccggtccagttgatgatgacgcggggcagccgcggccccacggcggagggacggcagaacctggagcgcgccgtggccgaggcgcggcgcctgcgcggcgaggcgggcgtgctgcgcgaggccgcccgcatcgccgccatgcttcgggtccgcctcgcagaagcgaatctcgacatcgtctcccttcgccaggaggccgacgccatggaagggcgccggcgcagcctcaccaccgagcgcgaggccgtggagaaggcggataccggcgcgctggaggccgagatcaaggaactcgccaaggagcgctcggcctatctcacggagctggtccaggtgctggagcccaagcgcgacgcgctgctcggcgaggaagcggggctgaaggcaaaggtcaccaccgcgcgggaggcgatacgcggcgcgctccaggcgaggcgcagcgcccacgcgcgctggatcgccggcgattccgtccgcatccgactcgtccggccggacgggttcgatccgctggcagtggctaaggcgcgcgccgacgccgcgggcctggagtcgaaggaactggcggccttggccaatgcggcgcgcggcgccgcccgcgaggcgatggagacggcgcgcacgcaaggccgtgccgccgagcgcgatctcgccgaatattgcgtgcaatggcggatcgagaacccgctcggcaatggcgacgccccggcctccttcggtttttcctgggtcgcccgcgcccatgacgaggtggccggccacgagttgcggcgctatcgcgaccaggcggtgcgggcagagggcgagatgcgccgcctcatgaccgaggacctgctgacgcgcctcgccgacaagttcgagcgggtccgcacccgcctcgacgccctgaacgagcgtctctccacacagaccttcaccggccagacctacgcgttcgaggccaccgtcgaccgccgctatgctgccgtgcatgccctcgccaccgaggtggctcgctcggccgacgcggcgcaggcgattctgccgggggaaggcgaggaagcgccttcgggtccgctcgccgccgccatcgaggagatcaccgccctgatcgccggcgacgagagcgcggcgcggctcgccgattaccgcaactatttcgtctacgagatcggcatgcgcgacaaggcgggcaaccgcaccaccatgtcgaaccgggccctgcgcggctcgggcggcgaggcgcaggcgccgttctacgtggccatcgccgcctcgctcgcctcggcctattaccccggcgaccggcccggcgacgagaatccgggcctcggcctctgtctcctcgacgaggccttctccaagctcgacgtgcgcaactcgcaggccctggtcgatctctatcaggcctgggggctgcaactcctcatcgccgccccggaggataagcgcacgacgctcaccgaggtgatggacaccatcgttaccgtctacaagagcccggacctgacctcggtgcggatcgaagccgagcatccgctggagacggccaagcgcgccctcgcggccatcaacccggaacgacagggaatcgagacgttccaggtctccgacgcggcggagtga

SEQ ID NO: 47801 - DNA, 1377 bp, Methylobacterium sp. Leaf99
atgctgttcacccgcctctccgacgacctgttccggccgctggcctccccgagccgggccttcaacgcggccctgctgctgcacctgcacgcgcgggtgttcggcgacacggccgaggccctgcgcaagaccgaacttttggccgccatcggcgatttctccgccgattacgcgcaaggggagatcgccgacgacgagaccacccccgtcgatcccatcgagcggcgctccgccgtctatcggcgcctgctcgaggccggctggctggtggagcggcgcgagcgctacgtgccggtggtggatttcgatcccgaggcccgcatcctcatcgaggaactggcccgcctcgaccggggcgagacccgttcctacggcggcgccgtcctcgacgtgctcggcagcctggagagtgccaccgccaacccggccgagcgctccgaggccctggtcaacgccgccaaggcgtcgcgggccttcctcagccacctgcggacgctggcgggctccatgcgcaagatcgaggcccgcatcctggcccaggaggaccagcgcgccgccttccggctctatttcgacgagttcgtcgcccgccacatcgtcagcgactaccgcaccctgcacacccgcctgaacccgttccggttccgctccggcatcgtgcgcgaggcgggccgggcgctgcgcgaccccctcaccctgcgggccctcgccgaggcgggcctgcgcgagggccgggcgcccgacgtcgaggcggcggagcgggccgtgcgcgcggatctcgccgagatcctggcgatcttcgagggcctcgaccgccacctcgacgcggtcgccgacatcgtcgcccgcctggagcggcggatcgcggcggccttacgctacatggaccaccgcgattccgaccggatcgagcgcacggccgcggcgctccgcgccgtcgccggggcgcccgaggcgatggcggacatgccgcccgccgggatctcgctcctgcgcccgcccatcggcgccgtgcatctctacgcgccgcgcctcaagcgcccgcccatcgactgcgagcccctgccggaactcttcctcgatccggccgtggaggccttcatcgccgccaaggacgcgttccggcaccgtgtcgccgtgacgccggaccggatggcggacttcgtcgaggacaggctcgggcgcaagggcgccatccggggctcgcagatgcccatcgccgacgtcgacgccttcgtggtgttccagcgcctgcgcgagatcgacgtgctgttcgatggcagcctgagcgggcgctaccgcctgtcccgcgtcgagggccgggtcgccaacggctggctcgactgcccggatttcctgctggagcggacccgctga

SEQ ID NO: 47802 - DNA, 633 bp, Methylobacterium sp. Leaf99
atgctcgaacccttccgcgccatcgtcgacggcgacgagccgccgccgcccggcgcccgcgcgccctccgacgaggagctgacccgcgccctgcaggtgctgctgaagagccagtgcgtctattccggcacccctggcatcggccggacctacgacctcgcccgccactacgcgccgttcttccaaggctacttcgcctgcctcgggtacggtttcgaggtctcgcaccgcgaccagatggtgtttttgcgcgtgcccgcggacggcgtgcgccacgacggccaggccgagcgcctgcgtaaggacgagaccctggtgctgctcgccctgcggctcgcctacgaagagggcctgcgcgatcaccgcgtcaccaccgagggggtggtcgagtgcaccaccgacgacatcgccgaatcgatccgcaccgccacccgcagcgaccctccggaagagacccgcctgttggagattctgcgcctgttctcccgcaagggcgccctgcgcctgggcgagcgcgacaagaccgaaaagctcacgcccctgatggtcctgcccggcatcggcgtgctctcgcccgacgcctggatggagcatgtccgggcctgggcttccgccggggatgacgcggcctga

SEQ ID NO: 47803 - DNA, 3459 bp, Methylobacterium sp. Leaf99
gtgtatcgcctcaccgacatcgccctctcgaactggtacctgatccggcgcgagcagatccgcatccgcggcgcgacggccctcgtcgggccgacgggggcgggcaagtcgacgatcttcgacgccgtcggcacggtgctggccggcaacaacgccagccggctggccctcaacgcctcggcgtccggccgctccgcccgcaccgtgcgcgattactgcctcggctggatcagcgacccggccgagggcgggcgaccgacccgcgaggcctgcgagaccctcatcgtcctggtgttcgagaacccggtctcgggccgcgtcgtctccgtcgggctggcgctcgcggcacgggccgaggacagccgcgagaccaccctgtcgcgcttcgtctgcaccggccaccgcttcgagattgccgactacgtccgcgagaccccggacggctccttcgtcgcgccctggaccgagatcgccaaggacctgcgcatccgctccgaaacgttcgaggagttccgtgcctcgggcgagcgcttcacggcggaggtgctcgggctcctgcgcgagggcgcgccggtgccggaaccccgccacttcctgcgcaccttctccaacgccgtggcgttcaagccgatcttcgattcctccgccttcgtgcgctccttcgtgctggagcccgagcccctcgatgtcgcccgcatccgccagtccgtggagaactggcgccgcctgctcgagaccatcgaggagctggagcggcgcctgtcgcatctcggccgcatcctcgcccgctacgagacctgggccgaggcgagcctgtcggccgccctcgacgacctgcgcgccgccggcgccgatctccgccgccgcgtggtcgaacacaccaccgcccgcaccggcctcgccgatgtggccgaacgcctgcgcatcgcccgtgagagcgtgacgacgagccagggcttcgtgcgcgacatcgacggcgagatcgccgccaagaaggcgatgatggccgggacccacgcgcagggacgcctcgccgcctccgatgccggcctgtccgttctcacccgcgatcgacgcgacctgaccctgcgggtcaccggcctcgttggcctgatccacgacgtagcacgcctgtcggcggtgatcggcgaaatccgccgcatcgacgcgggggccgcccgcttcgtcgaggcctgcacccgcgcggggctccgccgcgaggccccgccggaggaaaccctgcgctcggacggtcccctcgggggcctggtggcggggctcatcgacctgcccgacatcgccggtcccctcgacacggcggccgaggacatggccctgcgcgcccgcgcggcggaaacggaggcgcaggccctgtcggcgcccttcgccggcggcggggcggccaagggcgcgcgcctgtcctccgacgtggcggcgttccgcgacgaactcgcccgcctcggcatcgacgccgtgccggtctgcgagctcgccgagatcgtcgagccgaaatggggcatggccctggagggcctgctcggcggcgcccgcgaggccctggtggtccagcccgaccgcctgaaccaggccttcgcccatctcgaagcccgcaaggcgcagttctaccgctgccttctggtgaagaccacggacacggcccggcgccggggcggacgctacgacgacggccccctcggcatgatcgagacccgcgatccccatgccgaggcgttcctcgcggcgcggctggggggctacgacctcgcccccgacgatgcggcccttgcccatatgagccgcgccgtggccccgagcgggcgctcgacctccggcatggcctattcggtcgtccgcccggtccagctcatgatgacgcggggcagccgcggcccgaccgaggccggccgcgaggccatggagcgggcggtggccgaggcgcggcgcctgcgcggcgaggccggggtcctgcgcgaggccgcccgcatcgccgccgggctcaggctccgtctggccgaagcgcccatcgatctgccggccctgcgggccgagtgcgacgccctcgagggccgtcgccgcagcctcgccaccgagcgcgagagcgtcgagaaggccgataccggcgccctcgaagccgagctcaaggaactcgccaaggagcgctcggcctacctcaccgagctcgtgcaggtgctggagcccaagcgcgacgccctgctcggcgaggaagccggcctgaaggccaaggtcgcgtcctcccgcgaggccgcgcgcgcggcgctcggtgcccggcgctcggcccatgcccgctgggtcggcggcgacaccgtccgcatccggctggtgcgccccgaggggttcgatccgagggccgtggcgaaggcgcgcgccgacctcgccggcctcgacgccaaggaactcggggccgccgccgcggccgcccgcagcgccgcccgcgaggccctggagacggcccgcacgcaagggcgcaccgccgagcgggatctcgccgagtattgcgtgcagtggcgcatcgacaatcccctcgggcgcggcgacgccccggcctcgttcggctacggctggacccggcgcgcctacgacgaggtcgcgggccacgagttgcggcgctaccgcgaccaggccgtgcgcgccgagggcgagatgcgccgcctcatgaccgaggatctgctgacgcgcctcgccgacaagttcgagcgcgtccgcgcccgcctcgacgccctgaacgagcgcctgtcgagccagaccttcaccggccagacctacgccttcgaggccgccgtcgaccgccgctacgccgccgtccacgcgctggccacggaagtcgcgcgttcgcccgacgcggcgcaggcaatcctgccgggcgagggcacgacgccccccgacggcccgctctcggcggccatcgaggagatctccgccctcatcgccggcgaggagagcgcggcgcggctggccgattaccgcaactacttcgtctacgagatcggcatgcgcgacgccgccggcaaccgcaccaccatgtcgaaccgggccctgcgcggctccggcggcgaagcgcaggcgccgttctacgtcgccatcgcggcctccctcgcctcggcctactatcccggcgaccggcccggcgacgagaatccggggctgggcctctgtctcctcgacgaggcgttctcgaagctcgacgtgcgcaactcccaggccctggtcgatctctaccaggcctggggcctgcagcttctcatcgccgcgcccgaggacaagcgcacgaccctcaccgaggtgatggacaccatcgtcaccgtctacaagagcccggacctcaagggcgtgcgcatcgaatccgagcacccccttgaggccgccaagcgcgcgctggccgccatcaacccggaacgccaggggatcgaggggtttcgcctgcccggtgctgcggcgtga

SEQ ID NO: 47804 - DNA, 1377 bp, Methylobacterium sp. Leaf102
atgctgttcacccgcctgtccgacgacctgttccggcccctcgcctccccgagccgggccttcaacgccgccctgctgctgcacctgcacgcgcgggtgttcggcgacacggccgagcccctgcgcaagaccgagctgctcgccgccatcggcgacttctccgccgattacgcccaaggcgagatcgccgacgacgagactacgcccgtcgatcccatcgagcggcgctcggccgtctaccggcgcctgctggactccggctggctggtggagcggcgcgagcgctacgtgccggtggtggatttcgaccccgaggcccgcatcctcatcgaggaactcgcccgcctcgaccggggcgagacccgctcctacggcggcgccgtgctcgatgtgctgggcagcctggagagcgccatcgccaacccggccgagcgttccgaggccctggtcaacgccgccaaggcgtcgcgggccttcctcagccacctgcggacgctcgccggctccatgcgcaagatcgaggcgcgcatcctggcgcaggaggaccagcgcgcggccttccggctctacttcgacgagttcgtggcccgccacatcgtcagcgactaccgcaccctgcacacccgcctgaacccgttccgcttccgctccggtatcgtgcgcgaggcgggccgcgccttgcgcgatcccctcaccctgcgggccctggcggaggccgggatccgcgagggccgtgcgcccgatgtcgaggtggccgagcgggccgtgcgggcggatctcgccgagatcctggcgatcttcgagggcctcgaccgtcacctcgacgcggtggccgacatcgtcgcccgcctggagcggcgaatcgcggcggccctgcgctacatggaccaccgggattccgaccgcatcgaacgcacggccgcggcgctccgcgccgtggcgggcaccgatgcgccgatggagggcatgccaccggccgggatctcgctcctgcgcccgcccatcggcgccgtccacctctacgcgccgcgcctcaagcgcccgcccatcgactgcgagcccctgccggaactcttcctcgatccggccgtggaggccttcatcgcggcgaaggacgcgttccgccaccgcgtggcggtgacgcccgaccggatggtggacttcctcgagggccggctcgggcgcaagggcgccgtgcggggttcgcagatgccgatcgccgacgtcgatgccttcgtggtgttccagcgcctgcgcgagatcgacgtgctgttcgacgggagcctgagcggtcgctaccgcctctcgcgggtcgagggccgggttgccaacggctggctcgactgcccggacttcctgctggaacgcacacgctga

SEQ ID NO: 47805 - DNA, 633 bp, Methylobacterium sp. Leaf102
atgctcgaagccttccgcgccatcgtcgacggcgacgagccgccgccgcccggcgcccgtgcgccctccgacgaggagctgacccgcgccctgcaggtgctgctcaagagccagtgcgtctattccggcacccccggcatcgggcggacctacgacctcacccggcactacgcgccgttcttccagagctacttcgcctgccttgggtacggtttcgaggtctcgcaccgggaccagatggtgttcctgcgcgtgcccccggagggcgtgcgccacgacggtcaggccgagcgcctgcgcaaggacgagaccctggtgctgctcgccctgcggctcgcctacgaggaagggcttcgcgaccaccgcgtcaccaccgagggggtggtggaatgcaccaccgacgacatcgccgaatcgatccgcaccgccacccgcagcgacccgccggaggagacccgcttgctggagatcctgcggctgttctcccggaaaggcgccctgcgcctgggcgagcgcgacaagaccgaaaagctcacgcccctgatggtgctgcccggcatcggcgtgctctcgcccgacgcctggatggagcacgtccgggcctgggcttcggccggggatgacgccgcctga

SEQ ID NO: 47806 - DNA, 3459 bp, Methylobacterium sp. Leaf102
gtgtatcgcctcaccgacatcgccctctcgaactggtacctgatccggcgcgagcagattcgcatccgcggcgcgacggccctcgtcggaccgacgggggccggcaagtcgacgatcttcgacgccgtcggcacggtgctggccggcaacaacgccagccgtctggcgctcaacgcctcggcgtcgggccgctcggcccgcacggtgcgcgactattgcctcggctggatcagcgacccggccgagggcggccgcccgacccgcgaggcctgcgagaccctcatcgtcctcgtgttcgagaacccggtctcgggccgcgtcgtctccgttgggctggcgctgagcgcccgggccgaggacagccgcgagaccaccctgtcgcgcttcgtctgcacaggccatcgcttcgagatcgccgactacgtccgcgagacgcccgacggctccttcgtcgcgccctgggccgagatcgccaaggatctgcgcatccgctccgagaccttcgaggagttccgcgcgtccggcgagcgcttcaccgcggaggtgctcgggctcctgcgcgagggcgcgccggtgcccgaaccccgccacttcctgcgcaccttctccaatgcggtggccttcaagccgatcttcgattcctccgccttcgtgcgctccttcgtgctggagcccgagcccctcgacgtcgcccgcatccgccagtcggtggagaactggcgccgtctcctcgagaccatcgaggagttggagcggcgcctgtcgcatctcggccgcatcctcgcccgctacgagacctgggcggaggcgagcctgtcggcggccctcgacgacctacgggccgccggcgcggatctgcgccgccgagtcgtcgaatacacaaccgcccgcaccggcctcgccgatgtcgccgagcgcctgcgcatcgcccgcgagagcgtgacgacgagccagggcttcgtgcgcgacatcgacggcgagatcgcgcagaagaaggccctcatggccgggacccacgcgcaggggcggctcgccgcctccgatgcgggcctcgccgtgctcacccgcgaccgacgcgacctcaccctgcgggtgacgggcctcgtcggcctgatccaggacgtcgcccgcctgacggcggtcatcggcgaggtccgccgcgtcgatccgggtgcagcccgcttcgtcgaggcctgcgcccgcgcggggctccgccgcgaggccccgccggaggaaacgcttcgctcggacgggcccctgaatgccctggtgacggcgctcgtcgacatgcccgacatcgccggccccctcgatacggcggccgaggacatggccctgcgcgcccgcggcgccgagacggaggcgcagggcctttcggcgcccttcgccggcggcggggcggccaagggcgcgcgcctgtcctcggacgtggcggcgttccgggacgaactcgcgcggctgggcatcgacgccgtgccggtctgcgaactcgccgagatcgtcgagccgaaatggggcatggccctggagggccttctggggggtgctcgcgaagccctggtggtgcagcccgaccggctgaaccaggcgttcgcccatctcgaagcccggaaagcacagttctaccgctgccttctggtcaagactacggacacggcccggcgccggggcgggcgctacgacgacggccccttgggcatgatcgagacccgcgatccccacgccgaggcgttcctcgccgcgcgcctcggcggctacgacctcgcccccgacgatgcggccctcgcgcatatgagccgggccgtggcgccgagcgggcgctcgacctccggcatggcctattcggtggtccgtcccgtgcagctcatgatgacgcggggcagtcgcggtccgacccaggagggccgcgaggccatggagcgggctgtggccgaggcgcggcgcctgcgcggcgaggccggggtgctgcgcgaggccgcccgcatcgccgcgcagctcaaggcacgtctggccgaagcgcccatcgacctgcccggcctacgggccgagtgcgacgccatcgagggccgccgccgcagtctcgccaccgagcgcgagagcgtcgagaaggccgataccggcgccctcgaagccgaattgaaggagctcgcgaaggagcgttcggcctacctcacggaactcgtgcaggtgctcgaacccaagcgcgatgccctgctgggcgaggaagcgggcctgaaggccaaggtcgcctcctcccgcgaggcggcgcgcgcggcgctggccgcccggcgctcggcgcatgcgcgctgggtcggcggcgacacggtccgcatccgcctcgtgcgtccggagggcttcgacccgcgggccgtggccaaggcccgggcggacctcgccggcctcgacgcgaaggaactcgccgccgccgccgccgccgcccgcagcgccgcccgcgaggccctcgagacggcccgtacgcagggccgcaccgccgagcgcgacttggccgagtattgcgtgcagtggcggatcgacaaccctctggggcgcggcgacgctccggcctcgttcggctacggctggacccggcgcgcctacgacgaggtcgcgggccacgagctcaggcgctaccgcgatcaggccgtgcgggcggaaggcgagatgcgccgcctgatgaccgaggacctgctgacgcgtctcgccgacaagttcgagcgcgtccgcgcccgcctcgacgccctcaacgaacgcctgtcgagccagaccttcaccggccagacctacgccttcgaggccgccgtcgaccggcgctacgccgccgtccacgcgcttgccaccgaagtcgcacgctcgcccgatgcggcgcaggcggtcctaccgggccagggcgagacgccggccgaaggcccgctctcggccgccatcgaggagatctcggccctcatcgccggtgaggagagcgcggcgcggctggccgattatcgcaactatttcgtctacgagatcggcatgcgcgatgccgccggcaaccgcaccaccatgtcgaaccgggctctgcgcggctccggcggcgaggcgcaggcgccgttctacgtcgccatcgcggcctccctggcctcggcctactatcccggcgaccgaccgggcgacgagaatccggggctcggcctctgcctcctcgacgaggcgttctcgaagctcgacgtgcgcaactcccaagccctcgtcgacctctaccaggcgtggggcctgcagctcctcatcgccgcgcccgaggacaagcgcaccacgctcaccgaggtgatggacaccatcgtcaccgtctacaagagcccggacctgaagggcgtccgcatcgaatccgagcaccccctggaagcggccaagcgtgcgctcgccgccatcaacccggaacgccaggggatcgaggggtttcgcctgcccggtgcggctgcgtga

SEQ ID NO: 47807 - DNA, 1377 bp, Methylobacterium sp. Leaf87
atgctgttcacccgcctgtccgacgacctgttccggcccctcgcctccccgagccgggccttcaacgccgccctgctgctgcacctgcacgcgcgggtgttcggcgatacggccgagcccctgcgcaagaccgagctgctcgccgccatcggcgacttctccgccgatttcgcccaaggcgagatcgccgacgacgagaccacgcccgtcgatcccatcgagcggcgctcggccgtctaccggcgcctgctggactccggctggctggtggagcggcgcgagcgctacgtgccggtggtggatttcgaccccgaggcccgcatcctcatcgaggaactcgcccgcctcgaccggggcgagacccgctcctacggcggcgccgtgctcgatgtgctggggagcctggagagcgccatcgccaacccggccgagcgttccgaggccctcgtcaacgccgccaaggcgtcgcgggcgttcctcagccacctgcggacgctcgccggctccatgcgcaagatcgaggcgcgcatcctggcgcaggaggaccagcgcgcggccttccggctctacttcgacgagttcgtggcccgccacatcgtcagcgactaccgcaccctgcacacccgcctgaacccgttccgcttccgctccggtatcgtgcgcgaggcgggccgcgccttgcgcgatcccctcaccctgcgggccctggcggaggccgggatccgcgagggccgtgcgcccgatgtcgaggtggccgagcgggccgtgcgggcggatctcgccgagatcctggcgatcttcgagggcctcgaccgtcacctcgacgcggtggccgacatcgtcgcccgcctggagcggcgaatcgcggcggccctgcgctacatggaccaccgggattccgaccgcatcgaacgcacggccgcggcgctccgcgccgtggcgggcaccgatgcgccgatggagggcatgccaccggccgggatctcgctcctgcgcccgcccatcggcgccgtccacctctacgcgccgcgcctcaagcgcccgcccatcgactgcgagcccctgccggaactcttcctcgatccggccgtggaggccttcatcgcggcgaaggacgcgttccgccaccgcgtggcggtgacgcccgaccggatggtggacttcctcgagggccggctcgggcgcaagggcgccgtgcggggttcgcagatgccgatcgccgacgtcgatgccttcgtggtgttccagcgcctgcgcgagatcgacgtgctgttcgacggaagcctgagcggtcgctaccgcctctcgcgggtcgagggccgggttgccaacggctggctcgactgcccggacttcctgctggaacgcacacgctga

SEQ ID NO: 47808 - DNA, 633 bp, Methylobacterium sp. Leaf87
atgctcgaagccttccgcgccatcgtcgacggcgacgagccgccgccgcccggcgcccgcgcgccctccgacgaggagctgacccgcgccctgcaggtgctgctcaagagccagtgcgtctattccggcacccccggcatcggccggacctacgacctcgcccggcactacgcgccgttcttccagagctacttcgcctgcctcgggtacggtttcgaggtctcgcaccgggaccagatggtgttcctgcgcgtgcccccggagggcgtgcgccacgacggtcaggccgagcgcctgcgcaaggacgagaccctggtgctgctcgccctgcggctcgcctacgaggaagggcttcgcgaccaccgcgtcaccaccgagggggtggtggaatgcaccaccgacgacatcgccgaatcgatccgcaccgccacccgcagcgatccgccggaggagacccgcctgctggagatcctgcggctgttctcccggaaaggcgccctgcgcctgggcgagcgcgacaagaccgaaaagctcacgcccctgatggtgctgcccggcatcggcgtgctctcgcccgacgcctggatggagcacgtccgggcctgggcttcggccggggatgacgccgcctga

SEQ ID NO: 47809 - DNA, 3459 bp, Methylobacterium sp. Leaf87
gtgtatcgcctcaccgacatcgccctctcgaactggtacctgatccggcgcgagcagattcgtatccgcggcgcgacggccctcgtcgggccgacgggggccggcaagtcgacgatcttcgatgccgtcggcacggtgctggccggcaacaacgccagccgtctggcgctcaacgcctcggcgtcgggccgctcggcccgcacggtgcgcgactattgcctcggctggatcagcgacccggccgagggcggccgcccgactcgcgaggcctgcgagaccctcatcgtcctcgtgttcgagaacccggtctcgggccgcgtcgtctccgttgggctggcgctgagcgcccgggccgaggacagccgcgagaccaccctgtcgcgcttcgtctgcacaggccatcgcttcgagatcgccgactacgtccgcgagacgcccgacggctccttcgtcgcgccctgggccgagatcgccaaggatctgcgcatccgctccgagaccttcgaggagttccgcgcgtccggcgagcgcttcaccgcggaggtgctcgggctcctgcgcgagggcgcgccggtgcccgaaccccgccacttcctgcgcaccttctccaatgcggtcgccttcaagccgatcttcgattcctccgccttcgtgcgctccttcgtgctggagcccgagcccctcgacgtcgcccgcatccgccagtcggtggagaactggcgccgtctcctcgagaccatcgaggagttggagcggcgcctgtcgcatctcggccgcatcctcgcccgctacgagacctgggcggaggcgagcctgtcggcggccctcgacgacctacgggccgccggcgcggatctgcgccgccgggtcgtcgaatacacaaccgcccgcaccggcctcgccgatgtcgccgagcgcctgcgcatcgcccgcgagagcgtcgccaccagccagggcttcgtgcgcgacatcgacggcgagatcgcgcagaagaaggccctcatggccgggacccacgcgcaggggcggctcgccgcctcggatgcgggcctcgccgtgctcacccgcgaccgacgcgacctcaccctgcgggtgacgggcctcgtcgggctgatccaggacgtcgcccgcctgacggcggtcatcggcgaggtccgccgggtcgatccgggtgcggcccgcttcgtcgaggcctgcgcccgcgcggggctccgccgcgaggccccgccggaggaaacgcttcgctcggacgggcccctgaataccctggtgacggcgctcgtcgacatgcccgacatcgccggccccctcgatacggcggccgaggacatggccctgcgcgcccgcgccgccgagacggaggcgcagagcctgtcggcgcccttcgccggcggcggggcggccaagggcgcgcgcctgtcctcggatgtggcggcgttccgggacgaactcgcgcggctgggcatcgacgccgtgccggtctgcgaactcgccgagatcgtcgagccgaaatggggcatggccctggagggccttctggggggtgctcgcgaagccctggtggtgcagcccgaccggctgaatcaggcgttcgcccatctcgaagcccggaaagcacagttctaccgctgccttctggtcaagaccacggacacggcccggcgccggggcgggcgctacgacgacggccccttgggcatgatcgagacccgcgatccccacgccgaggcgttcctcgccgcgcgcctcggcggctacgacctcgcccccgacgatgcggccctcgcgcatatgagccgggccgtggcgccgagcgggcgctcgacctccggcatggcctattcggtggtccgtcccgtgcagctcatgatgacgcgcggcagccgtggtccgacggaggagggccgcgaggccatggagcgggctgtggccgaggcgcggcgcctgcgcggcgaggccggcgtgctgcgcgaggccgcccgcatcgccgcgcagctcaaggcacgtctggccgaagcgcccatcgacctgttcggcctgcgggccgagtgcgacgccatcgagggccgccgccgcagtctcgccaccgagcgcgagagcgtcgagaaggccgataccggcgccctcgaagccgaattgaaggagctcgcgaaggagcgttcggcctacctcacggaactcgtgcaggtgctcgaacccaagcgcgatgccctgctgggcgaggaagcgggcctgaaggccaaggtcgcctcctcccgcgaggcggcgcgcacggcgctggccgcccggcgctcggcgcatgcgcgctgggtcggcggcgacacggtccgcatccgcctcgtgcgtccggagggcttcgacccgcgggccgtggccaaggcccgggcggacctcgccggcctcgacgcgaaggaactcgcggctgccgccgccgccgcccgcagcgccgcccgcgaggccctcgagacggcccgtacgcagggccgcaccgccgagcgcgacttggccgagtattgcgtgcagtggcggatcgacaaccctctggggcgcggcgacgctccggcctcgttcggctacggctggacccggcgcgcctacgacgaggtcgcgggccacgagctcaggcgctaccgcgatcaggccgtgcgggcggaaggcgagatgcgccgcctgatgaccgaggacctgctgacgcgtctcgccgacaagttcgagcgcgtccgcgcccgcctcgacgccctcaacgaacgcctgtcgagccagaccttcaccggccagacctacgccttcgaggccgccgtcgaccggcgctacgccgccgtccacgcgctcgccaccgaagtcgcacgctcgcccgatgcggcgcaggcggtcctgccgggccagggcgagacgccggccgaaggcccgctctcggccgccatcgaggagatctcggccctcatcgccggtgaggagagcgcggcgcgtttggccgattatcgcaactacttcgtctacgagatcggcatgcgcgatgccgccggcaaccgcaccaccatgtcgaaccgggctctgcgcggctccggcggcgaggcgcaggcgccgttctacgtcgccatcgcagcctccctggcctcggcctactatcccggcgaccgaccgggcgacgagaatccggggctcggcctctgcctcctcgacgaggcgttctcgaagctcgacgtgcgcaactcccaagccctcgtcgacctctaccaggcgtggggcctgcagctcctcatcgccgcgcccgaggacaagcgcaccacgctcaccgaggtgatggacaccatcgtcaccgtctacaagagcccggacctgaagggcgtccgcatcgaatccgagcaccccctggaagcggccaagcgtgcgctcgccgccatcaacccggaacgccaggggatcgaggggtttcgcctgcccggtgcggctgcgtga

SEQ ID NO: 47810 - DNA, 1389 bp, Methylobacterium sp. Leaf88
atgctgttcacacacctctccgacgacctgttcaagccgctcgcctcgccgagccgggccttcaatgcggcgctcctgctgcacctgcacggtcgggtcttcggggacaccgccgaacccctgcgcaagagcgaacttatgacggcgatcggtgacttcgccgccgatttcgtggaccgggagatcgacgacgacgcctccggcacggtggaaccgagcgagcgccgctcggtcgtctatcgccgccttctcgatgccggctggctggtggagcggcgggagcgctatgttccggtggtcgagttcgaccccgaggcccggatggtcatcgaggaactggcgcggctcgacaggggcgagcggcgctcctacggcggtgccgtcctcgacgtgctgggcagtctggaaagcgcgatcgccaacccagccgagcgatccgaggccctggtcaacgcggccaagtcggcccgtaccttcctcagtcatctgcgcagcctggctggatcgatgcgcaagagcgaggagcgcatcctgcgcgaggcggatcagggcgtcgccctgcgcctctacttcgaggagttcgtcgcgcggcacctcgtcagcgactaccggacgctgcacacccgcttcaatcctttccgcttccggtcgggaatcgtgcgcgaggccggccgtgccctgcgcgatcccctcaccctgcgcgtcctgaccgatgcggggctccgggaggggcgggcgcccgaccgggagacggccgagcgcgccgtccgcggcgatctggccgagatcctggcgatcttcgaggggctcgatcgccacctcgacgtggtcgccgacatcgtcgcccggctcgagcgccggatcgccgccaccctgcgctacctagaccatcgggattccgaccggatcgagcgcacggccgcggccttgcgggcggtggctggtggcgatgacgacctcgccggcctgcccgatccccaggtctcgctgttccgtcccccgatcggcgagccgcattgttacgcaccgcgcctgcgccgggcggcgatcgaatgcgagccgttgcccgagatcgagatcgatcccgtcatcgaagccttcatcgccgccaaggacgcgttccgggagcgcgtcgcggtcacgcccgagcggatcgtggcctttatcgaggcacggctcgggccggagcgcaccatccggggctcccagatccggatcgccgacgtcgacgatttcgtcgtgttccagcgcctgcgggagatcgacgtcctgttcgacgggagcctgcggggccgctatcggctttcgcggatagagggtcgggtgtcgaatggctggctcgattgcccagacttcctgctggagcgggcgccggcgctgcgccgctag

SEQ ID NO: 47811 - DNA, 636 bp, Methylobacterium sp. Leaf88
atgctcgaatcgtttcgcgccatcgtcgacggtgaggacttgccgccgcccggagcccgcgcgccttcggaagaggagttgacccgggcgcttcaggtcctcctgaagagccaatgcgtctatgccggaacaccgggcatcgggcgctcctatgagctcgcacggcactacgcgcccttcttccaagcctacttcgcgtgcctcggctaccagttcgacgtgatgcatcgcgatcagatggtgtgcctgcgggttccgcccgagggcgtccgtcacgatgctcaggccgagcgcctgcgcaaggacgagactctggtcttgctcgccctgcgtctcgcctacgaggaaggcctgcgtgcccaccgggtgaccaccgagggtgtcgtggaatgcacgaccgacgacatcgtcgaatcgatccgcaccgctacgcgtagcgatccgccggaagaggctcgactcaccgagatcctccgtctgttcgcgcgcaagggggccctgcgcctgggcgaacgcgacaaggtcgagaagatcacacccttgatggtgatgcccgggatcgcggtgttgtcgccggacgcctggatggatcaggtccgagcctggggggctgcgcgcggcgacgaggaggcgtga

SEQ ID NO: 47812 - DNA, 3456 bp, Methylobacterium sp. Leaf88
gtgtaccgccttaccgatatcgtcctctcgaactggtacctgatccgccgtgagcagattcggatccggggcgcggctgcgctggtgggacctacgggggccggcaagtcgaccatcttcgatgcggtcggcacggtgctggcgggcaacaatgccagccgcctcgccctcaacgcttcggcctcgggacgcagcgcccggaccgtgcgggattactgcctcggctggatcagcgatccggccgagggcggacgccctacccgtgaagcctgcgagacactgatcgtcctggtcttcgagaacgagaccacggggcgcgtcgtctccgccgggctcgccctggtggcccgggcggaagacagccgcgagacgaccctgtcccgcttcgtccatgtcggccaccgcttcgaggtcgccgactacgtccgtgaagcgccgggcggaagcttcgtcgcgccctgggccgagattgccaaggacctgcgcacccgcgggaccaccttcgacgagtaccgagcgtccggcgagcgcttcaccgccgaactcctcggaaaccttcgcgagggcgcggcggtgccggagccgcgccacttcctgcgcaccttctccaacgccgtggcgttcaagccgatcttcgattcgtccgccttcgtccggtccttcgtgctcgaacccgagcccctggacgtcgcccgcatccggcaatcggtggagacctggcggcgcctcctcgagaccatcgaggagttggaacggcgcctcgcccacctcgcccggatcgtcgggcgctatgagacttgggccgaggcgagcctcgcctcggttctcggggacctgcgcgccgctgatgcggacctgcgtcggcgcatcatcgacaccgtgaccgcccgccagaccctcaaggatgtcgccgagcgcctgcgcatcgcgcgcgagagcgtcgccaccagccagggcttcgtgcgcgaaatcgacggcgagatcgcgggtaagaaggcgctgctcgccggcaccgccgccgaggggcgcctcgccgcctcgaacgccggcctcgccatgctggcccgcgaccgacgggacctggccgcccgggtcgccgaactggtcggaattgtcctcgataccggcaagctcgcggtgatcctcggcgagatccgcaaggtttcgccggaggccgcccgcctggtggaggcctgcgcccgatcgggtctgcgacgcgaggccaatccggaagaaaccctgcggtcggacggaccgctcgccgcgttgctcgccggactagctggaatgcccccgatcgcaacgcccctcgagcgggcggcggaggacgcggcgctgcgcgcccgcgccctcgagaacgaggcgcagtcccgcgcgccggcaccgagcgcggggcggggggcggcgccgcgtctgtcctcggacgtggcggcgttccgcgaagagctgtcccgcctcggcatcgtggcgacaccgatctgcgagctggccgagatcatcgatccaaaatgggggcaggccctcgagggcctcctcggcggcgcccgcgaggcgcttgtcgtgcaaccggaccgcctcaacgaagcgttcgcgcatctcgaagcgcgcaagagccagttctaccgctgtctcctggtaaagacgaccgatacggcccggcggcgcggcgggcgcgacgacgagggtccgctcgccctgatcgagacggccgatccccacgcgcaggccttcctcggggcgcgcctcggcggctacgatctcgccccgaacgacgcggccctcgcgcatatgagccgggccgtggccccgagcgggcgctcgacctcgggcatggcttattcggtggtgcgcccggtccagctcatgatgacccggggccaccggggtccgaccgcagagagccgccaggattgggggcaagcggtctccgaggcgcgccgagcccgggcagaggccgatgtcctgcgggaagcggcccggatcggggccgccctcgcgcgccgcctgtccgaaacgaacctggatctcgctgaattgcgcgccgaggcggacgcgatcgagggccgacgccgcagcctgaccacggagcgggagagcgtcgagcgggccgagaccggcgtcctggaggccgagctcgcggagctcgccaaggagcgttcggcctatctcaccgagctcgtccaggtgctggagccgaagcgagacctgctgctgggcgaggaggccggcctgaatgccaaggttgcggcgagccgcgaggccgcccgtgctgcgctccaggcgcgccggaccgcgtatcagcgctgggcaggcggcgacagcatgcgcatccggctcgtgcgtccggacgccttcgacccgaaggcgctcgcgacgctgcgtgccgagcgtgcggatctcgacgccaaggcgctggcgagccatgccaataccgggcgtgcgcgagcccgtgaagcggcggagacggcgcgaacgcagggcagggcggccgagcgcgacctcgccgagtactgcgtgcagtggcgggtggaaaatccgctgggggcgggcgacgtgccggcctccttcggctacggctgggcgaagcgggcccatgacgaggtggcgagccacgaactgcggcgctaccgggaccaggcgcggcgggcggagagcgagatgcgccgcctgatgatcgaagacctgttgacccggctcgcggacaagttcgagcgcgtacgcgcccggcttgaggccctcaacgagcgcctgtcgagccagaccttcacggggcagacctatgccttcgaggccgaggtggatcggcgctacgccgccgtccatgccctggcgacagaggtcgcccgctcgccggatgcggcccaggcgatcctgccggacgagggcggcgcgattcccgatggtccgctcgcggcggcgatcgacgagatcaccgccctgatcgccggtgaggagagcgccgcgcgcctcgcggactaccggaactacttcgtctacgagatcggtatgcgggatcgggcgggaaaccgcaccacgatgtcgaaccgcgcgctgcgaggttcgggcggcgaagcgcaggcgcccttctacgtcgccatcgcggcgtcgctcgcctcggcgtattatccgggcgaccgacccggcgacgagaaccccggcctcggcctctgccttctcgacgaggcgttctccaagctcgacgtgcgcaacagtcaggccctggtcgatctctatcaggcgtgggggctgcaactgctgatcgcggccccggaagacaagcggacgaccttgaccgaggtgatggacaccatcgttaccgtctacaagagcccggatctctcctccgtgcgaatcgaggccgaacaccccctggaagctgccaagcgcgccctggcggcgatcaatcccgagcgccagggcatcgaaggcttccggatcaccgacgccgccgagtag

SEQ ID NO: 47813 - DNA, 1425 bp, Methylobacterium sp. Leaf91; identical to SEQ ID NO: 47783

SEQ ID NO: 47814 - DNA, 636 bp, Methylobacterium sp. Leaf91; identical to SEQ ID NO: 47784

SEQ ID NO: 47815 - DNA, 3456 bp, Methylobacterium sp. Leaf91; identical to SEQ ID NO: 47785

SEQ ID NO: 47816 - DNA, 1377 bp, Methylobacterium sp. Leaf100
atgctgttcacccgcctgtccgacgacctgttccggcccctcgcctccccgagccgggccttcaacgccgccctgctgctgcacctgcacgcgcgggtgttcggcgacacggccgagcccctgcgcaagaccgagctgctcgccgccatcggcgacttctccgccgattacgcccaaggcgagatcgccgacgacgagaccacgcccgtcgatcccatcgagcggcgctcggccgtctaccggcgcctgctggactccggctggctggtggagcggcgcgagcgctacgtgccggtggtggatttcgaccccgaggcccgcatcctcatcgaggaactcgcccgcctcgaccggggcgagacccgctcctacggcggcgccgtgctcgatgtgctgggcagcctggagagcgccatcgccaacccggccgagcgttccgaggccctggtcaacgccgccaaggcgtcgcgggccttcctcagccacctgcggacgctcgccggctccatgcgcaagatcgaggcgcgcatcctggcgcaggaggaccagcgcgcggccttccggctctacttcgacgagttcgtggcccgccacatcgtcagcgactaccgcaccctgcacacccgcctgaacccgttccgcttccgctccggtatcgtgcgcgaggcgggccgcgccttgcgcgatcccctcaccctgcgggccctggcggaggccgggatccgcgagggccgtgcgcccgatgtcgaggtggccgagcgggccgtgcgggcggatctcgccgagatcctggcgatcttcgagggcctcgaccgtcacctcgacgcggtggccgacatcgtcgcccgcctggagcggcgaatcgcggcggccctgcgctacatggaccaccgggattccgaccgcatcgaacgcacggccgcggcgctccgcgccgtggcgggcaccgatgcgccgatggagggcatgccaccggccgggatctcgctcctgcgcccgcccatcggcgccgtccacctctacgcgccgcgcctcaagcgcccgcccatcgactgcgagcccctgccggaactcttcctcgatccggccgtggaggccttcatcgccgcaaaggacgcgttccgccaccgcgtggcggtgacgcccgaccggatggtggacttcctcgagggccggctcgggcgcaagggcgccgtgcggggttcgcagatgccgatcgccgacgtcgatgccttcgtggtgttccagcgcctgcgcgagatcgacgtgctgttcgacgggagcctgagcggtcgctaccgcctctcgcgggtcgagggccgggttgccaacggctggctcgactgcccggacttcctgctggaacgcacacgctga

SEQ ID NO: 47817 - DNA, 633 bp, Methylobacterium sp. Leaf100
atgctcgaagccttccgcgccatcgttgacggcgacgagccgccgccgcccggcgcccgtgcgccctccgacgaggagctgacccgcgccctgcaggtgctgctcaagagccagtgcgtctattccggcacccccggcatcggccggacctacgacctcgcccggcactacgcgccgttcttccagagctacttcgcctgcctcgggtacggtttcgaggtctcgcaccgggaccagatggtgttcctgcgcgtgcccccggagggcgtgcgccacgacggtcaggccgagcgcctgcgcaaggacgagaccctggtgctgctcgccctgcggctcgcctacgaggaagggcttcgcgaccaccgcgtcaccaccgagggggtggtggaatgcaccaccgacgacatcgccgaatcgatccgcaccgccacccgcagcgacccgccggaggagacccgcctgctggagatcctgcggctgttctcccggaaaggcgccctgcgcctgggcgagcgcgacaagaccgaaaagctcacgcccctgatggtgctgcccggcatcggcgtgctctcgcccgacgcctggatggagcacgtccgggcctgggcttcggccggggatgacgccgcctga

SEQ ID NO: 47818 - DNA, 3459 bp, Methylobacterium sp. Leaf100
gtgtatcgcctcaccgacatcgccctttcgaactggtacctgatccggcgcgagcagattcgtatccgcggcgcgacggccctcgtcgggccgacgggggccggcaagtcgacgatcttcgatgccgtcggcacggtgctggccggcaacaacgccagccgtctggcgctcaacgcctcggcgtcgggccgctcggcccgcacggtgcgcgactattgcctcggctggatcagcgacccggccgagggcggccgcccgactcgcgaggcctgcgagaccctcatcgtcctcgtgttcgagaacccggtctcgggccgcgtcgtctccgttgggctggcgctgagcgcccgggccgaggacagccgcgagaccaccctgtcgcgcttcgtctgcacaggccatcgcttcgagatcgccgactacgtccgcgagacgcccgacggctccttcgtcgcgccctgggccgagatcgccaaggatctgcgcatccgctccgagaccttcgaggagttccgcgcgtccggcgagcgcttcaccgcggaggtgctcgggctcctgcgcgagggcgcgccggtgcccgaaccccgccacttcctgcgcaccttctccaatgcggtcgccttcaagccgatcttcgattcctccgccttcgtgcgctccttcgtgctggagcccgagcccctcgacgtcgcccgcatccgccagtcggtggagaactggcgccgtctcctcgagaccatcgaggagttggagcggcgcctgtcgcatctcggccgcatcctcgcccgctacgagacctgggcggaggcgagcctgtcggcggccctcgacgacctgcgggccgccggcgcggatctgcgccgccgagtcgtcgaatacacaaccgcccgcaccggcctcgccgatgtcgccgagcgcctgcgcatcgcccgcgagagcgtcgccaccagccagggcttcgtgcgcgacatcgacggcgagatcgcgcagaagaaggccctcatggccgggacccacgcgcaggggcggctcgccgcctccgatgcgggcctcgccgtgctcacccgcgaccgacgcgacctcaccctgcgggtgacgggcctcgtcggcctgatccaggacgtcgcccgcctgacggcggtcatcggcgaggtccgccgcgtcgatccgggtgcggcccgcttcgtcgaggcctgcgcccgcgcggggctccgccgcgaggccccgccggaggaaacgcttcgctcggacgggcccctgaatgccctggtgacggcgctcgtcgacatgcccgacatcgccggccccctcgatacggcggccgaggacatggccctgcgcgcccgcgccgccgagacggaggcgcagggcctttcggcgcccttcgccggcggcggggcggccaagggcgcgcgcctgtcctcggacgtggcggcgttccgggacgaactcgcgcggctgggcatcgacgccgtgccggtctgcgaactcgccgagatcgtcgagccgaaatggggcatggccctggagggccttctggggggtgcccgcgaggccctggtggtgcagcccgaccggctgaatcaggcgttcgcccatctcgaagcccggaaagcacagttctaccgctgccttctggtcaagaccacggacacggcccggcgccggggcgggcgctacgacgacggccccttgggcatgatcgagacccgcgatccccacgccgaggcgttcctcgccgcgcggctgggcgggtacgacctcgcccccgacgatgcggccctcgcgcatatgagccgggccgtggcgccgagcgggcgctcgacctccggcatggcctattcggtggtccgtcccgtccagctcatgatgacgcggggcagtcgcggtccgacacaggagggccgcgaggccatggagcgggcggtggccgaggcccgtcgcctgcgcggcgaagccggcgtgctgcgcgaggccgcccgcatcgccgcgcagctcagggcgcgcctggccgaggctcccatcgacctgcccggcctacgggccgagtgcgacgccatcgagggccgccgccgcagtctcgccaccgagcgcgagagcgtcgagaaggccgataccggcgccctcgaagccgaattgaaggagctcgcgaaggagcgttcggcctacctcacggaactcgtgcaggtgctcgaacccaagcgcgatgccctgctgggcgaggaagcgggcctgaaggccaaggtcgcctcctcccgcgaggcggcgcgcgcggcgctggccgcccggcgctcggcgcatgcgcgctgggtcggcggcgacacggtccgcatccgcctcgtgcgtccggagggcttcgacccgcgggccgtggccaaggcccgggcggacctcgccggcctcgacgcgaaggaactcgcggccgccgccgccgccgcccgcagcgccgcccgcgaggccctcgagacggcccgtacgcagggccgcaccgccgagcgcgacttggccgagtattgcgtgcagtggcggatcgacaaccctctggggcgcggcgacgctccggcctcgttcggctacggctggacccggcgcgcctacgacgaggtcgcgggccacgagctcaggcgctaccgcgatcaggccgtgcgggcggaaggcgagatgcgccgcctgatgaccgaggacctgctgacgcgtctcgccgacaagttcgagcgcgtccgcgcccgcctcgacgccctcaacgaacgcctgtcgagccagaccttcaccggccagacctacgccttcgaggccgccgtcgaccggcgctacgccgccgtccacgcgctcgccaccgaagtcgcacgctcgcccgatgcggcgcaggcggtcctgccgggccagggcgagacgccggccgaaggcccgctctcggccgccatcgaggagatctcggccctcatcgccggtgaggagagcgcggcgcgtttggccgattatcgcaactacttcgtctacgagatcggcatgcgcgatgccgccggcaaccgcaccaccatgtcgaaccgggctctgcgcggctccggcggcgaggcgcaggcgccgttctacgtcgccatcgcggcctccctggcctcggcctactatcccggcgaccgaccgggcgacgaaaatccggggctcggcctctgcctcctcgacgaggcgttctcgaagctcgacgtgcgcaactctcaagccctcgtcgacctctaccaggcgtggggcctgcagctcctcatcgccgcgcccgaggacaagcgcaccacgctcaccgaggtgatggacaccatcgtcaccgtctacaagagcccggacctgaagggcgtccgcatcgaatccgagcaccccctggaagcggccaagcgcgcgctcgccgccatcaacccggaacgccaggggatcgaggggtttcgcctgcccggtgcggctgcgtga

SEQ ID NO: 47819 - DNA, 1389 bp, Methylobacterium sp. Leaf104
atgctgttcacgcatctttccgacgacctcttcaagccgctcgcctcgccgagccgggccttcaacgcagctctgctgctacacctgcacggtcgcgtcttcggggataccgccgagcccctgcgcaaaagcgaactcctgaccgcgatcggcgacttcaccgcggattttgtcgaccgggaggtcgacgacgagggcgcggcgccgctcgagcccggcgagcggcgctcggtggtctatcgccgccttctcgacgccggctggctggtcgagcggcgcgagcgctacgtcccggtcgtcgaattcgaccccgaagcgcggatggtgatcgaggaactggcgcgcctcgacaggggtgagcggcgctcttacggcggtgccgtgctcgacgtgctgggcagcctcgaaagcgccattgccaatccgaccgaacgttccgaggcgctggtcaacgccgccaagtcggcgcggaccttcctgagccacctgcgcagtctcgccgggtcgatgcgcaagagcgaggagcgcatcctgtgcgaggcggaccagggggtcgccctacgcctgtacttcgaggagttcgtggcccggcacctcgtcagcgattaccggacgctgcacacccgcttcaatccgtttcgcttccggtccggcatcgtgcgcgaggctggccgggccctgcgcgatcccctgaccttgcgggcgctcaccgatgcgggcctgcgcgaggggcgagcgcccgaccgagagagcgccgagcgggccgtccggggcgaccttgccgagatcctggcgatcttcgaggggctcgaccgtcacatcgacgccgtcgccgacatcgtcgcccggctcgagcgccggatcgccgccaccttgcgctatctcgatcaccgcgattccgaccggatcgagagaaccgccgcggccctgcgcgcggtagccggcgccgacgatgacctcgacgggattcccgacccgcaggtctcactcttccggccgccgatcggggagccgcattgctacgccccgcgcctgcgaagggcggcgatcgaatccgagcccctgccggagatcgccctcgacccggttgtggaagccttcatcgctgccaaggatgccttccgcgagcgtgtcgccgtgactccggagcgcatcgtcaccttcatcgagacccacctcgggcgtgagcgtgccattcgcggatcgcagatccacatcgccgacgtcgacgacttcgtcgtcttccagcgtctgcgcgagatcgacgtcctgttcgatgggaccttgcgtgcccgttatcggctctcccgtgtggagggacgggtctcgaacggctggctcgactgcccggatttcctgcttgaaagggcgcccgcgctccggcggtga

SEQ ID NO: 47820 - DNA, 636 bp, Methylobacterium sp. Leaf104
atgctcgaagcctttcgcgccattctcgacggcgaggagccgcccccgcccggcgcgcgtgcaccttcggaagaagaactcacgcgcgcccttcaggtgatgctgaagagccagtgcatctatggcggaacgccgggcatcgggcgttcctacgagttggcccgacactacgcacccttcttccaggcctatttcgcgtgcctcggctacggcttcgaagtaatgcaccgcgaccagatggtgtgcctgcgggtcccacccgaaggcgtccgccacgatgcccaggcggagcgcctccgcaaggacgagacgctggtgctgctcgccctccgcctcgcttacgaggagggcctgcgcgcccatcgggtcacaaccgacggcgtcgtcgaatgcaccacggacgacatcgtcgagtcgatccgtaccgcaacgcgcagcgatccgccggaggaggcgcgcctcaccgagatcctgcgcctgttctcccgcaagggcggcctgcgcctgggtgaacgcgacaaggtcgagaagatcacgcccctgatggtgctgccggggatcgcggtgttgtcgccggatgcctggatggatcaggtccgggcctggggcgccgcgcgcggcgacgccgaggcctga

SEQ ID NO: 47821 - DNA, 3456 bp, Methylobacterium sp. Leaf104
gtgtaccgcctcaccgacatcgttctctcgaactggtacctgatccgccgcgagcagatccggatccggggcgccgctgcgctggtgggacccacgggcgccggcaagtcgacgatcttcgacgcggtcggcacggtgctcgccggtaacaacgcgagccggctcgccctgaacgcctcggcctccgggcgcagcgcccgcacggtgcgggactattgtctcggctggatcagcgacccggcagagggcgggcgtcccactcgcgaggcctgtgagaccctgatcgtcctggtcttcgagaacgaaaccacgggccgggtcgtctcggccgggctcgccttggcggcccgagcggaggacagccgggagaccacgctgtcgcgcttcgtccatgtcggacaccgcttcgaagtcgccgactacgtccgcgaggcgccgggcggcagcttcgtcgcgccctgggccgagatcgccaaggacctgcggacccgcggcgagaccttcgacgagtaccgggcgtcgggcgagcgcttcaccaccgagctgctcggcatgctgcgcgagggggccgcggtgccggagccgcgccatttcctgcgcaccttctccaatgcggtcgccttcaagccgatcttcgactcctcggccttcgtccgctccttcgtgctcgagcccgagcccctcgatgtcgcgcgcatccgccaatcggtggaaacctggcggcgcctcctcgagaccattgaggagctcgagcggcgcctgtcccagcttgcccgcatcctggggcgctacgaaacctgggcggaggcgagcctcgcctcggccctcggcgagttgcgcgccgcagatgccgacctgcggcgtcgtatcctcgacaacgtcaccgcgcgccaggccctcagggatgtcgccgagcgcctgcggatcgcccgggagagcgtcgccacgagtcagggcttcgtccgtgagatcgacggcgagatcgccggcaagaaggcgctcctggcgggcaccgccgccgagggccggctcgccgcctccaatgccggtctcgccatgctggcccgcgatcgacgcgacctcgccgcccgggtcggcgaactggtcggcatcgtgctcgacgccggcaagcttacggtgaacatcggcgagatccgtaaggtttcgcccgaggccgcccgtctggtggaagcctgcgcccggtccggtctgcggcgggaggccaatccggaagaaaccctgcgctcggacggtcccctcgcggcgctcatcggcggacttgcgggaatgccgcagatcgcgacgcccctcgaacgggcagcggaagatgcggccctgcgcgcccggtctctggagaacgaggcgcaggcgcgcgcgccggcgccgagcgcaggtcggagttcggcgccgcgcctgtccgccgacgtagcggcgtttcgcgaggaactggcgggccgcggcatcgtcgcgacgccgatctgcgaactcgccgagatcaccgatccgaagtgggggcaggcgctggaaggcctcctcggcggggcacgggaggcgctggtggtgcagcccgaccggctcaacgaggccttcgctcacctcgaagcgcgcaagagccagttctatcgctgcctgctcgtgaagacgacggatacggcacggcgccgcggcgggcgcgacgacgagggtcccctcgcgctgatcgcgacggcggatccccatgcccaggcgttcctcggtgcacgcctcggcggctacgacctcgctccgaacgatgcagcgctcgttcatatgagccgcgccgtggccccgagcgggcgctcgacttcggggatggcctattccgtggttcggcccgtccagctgatgatgacgcgcgggcatcgcggacccacggcggagagccgccaggactgggaacaggcggtggccgaggcgcgccgggcgcgggcggaagcggacgtcctgcgcgaagcctcccggatcgccgccgccctgacgcgtcggctctccgagaccagcctcgatctcgcggaactccgcgccgaggcggacgccatcgagggccggcgccgcagcctgaccaccgagcgggagagcgtcgagcgcgccgagaccggcgtcttggaagccgaactcgtcgagctcgccaaggagcgttcggcctacctcaccgaactcgtccaggtgctggagccgaaacgcgacctcctcctgggcgaggaggctggcctgaaggccaaggtggcatcgagccgcgaggcggcccgcgccgcgctgcaggcgcgccggaccgcttaccagcgctggaccggcggcgacagcatgcgcatccgcctcgtccgcccgggcgccttcgacccgcaggcgctggccgggttgcgcgccgagcggtcggacctcgacgcgaaggcgttggcaagtctcgccaacacggcccgcgcgcgggctcgcgaggcggcggagacggcccggacccagggacgtgccgcggagcgggatcttgccgagtactgcgtccagtggcgcatcgagaatccgctcggtaccggcgatgcgccggcctctttcggctacggctgggcacagcgcgcccatgacgaggtggcgggacacgagctgcgccgctatcgcgaccaggcgcggcgggcggagaacgagatgcgccgcctgatgatcgaggacttgttgacccggctcgccgacaagttcgagcgcgtccgcgcgcgcctcgatgccttgaacgagcgcttgtcgagccagaccttcaccgggcagacctacgccttcgaggcggaggtcgaccgtcgctacgctgccgtccacgccctggcgaccgaggtcgcgcgctcgccggacgccgcccaggcgatcctgccggacgagggcggcgcgatccccgacggcccgctctccgcggccatcgacgagatcacggccctgatcgccggggaggagagcgcggcgcggctcgccgattaccgcaactacttcgtctacgagatcggcatgcgcgaccgggcgggcaaccgcaccacgatgtcgaaccgcgccctgcgcgggtccgggggcgaggcacaggcgccgttctacgtcgccatcgccgcctcgctcgcctcggcctactatccgggcgatcggaccggagacgagaacccgggtctcggcctctgcctactggatgaggcgttctcgaagctcgacgtgcgcaacagccaggccctggtggacctctaccaggcctggggcctgcaactcctcatcgcggcgccggaggacaagcgcacgacgctgacggaggtgatggacaccatcgtcaccgtctacaagagtcccgacctgacctccgtgaggatcgaggcggagcacccgctggaggccgccaagcgggcgctggcggcgatcaatccggagcgccagggcatcgagggcttccggatcatcgacgccgcggaatag

SEQ ID NO: 47822 - DNA, 1413 bp, Methylobacterium sp. Leaf106
atgctgttcacccgcctccccgacgatctgttcaagccgcttgcctcgccgagccgggccttcaacgcggcgctgctgctgcatctgcatgccagggtgttcgccgagaccaccgaacccctgcgcaagagcgagctgctcgcctccatcggtgatttctccgccgactggtcccagggcgagatcgccgacgacgaggccacgccggtcgatccggtggagcgacgctcggcggtctaccggcggcttctcgacgccggctggctggtggaacggcgcgagcgctacgtgccggtggtcgatttcgatccggatgcccgcctcgtcatcgaggaactcgcccgtctcgaccggggcgagacccgctcctatggcggcgcggtactggaggtactgggtagcctggagagcgcggtggccaacccggccgaacgttcggaggccctggtcaatgcggccaaggcctcgcgcgccttcctcggacatctgcgcagcctcgccggctcgatgcgcaagatcgaggagcggatcctgcgcgaggaagaccagggcgtcgcgttccgcctctatttcgaggagttcgtcgcgcgccatctcgtcagcgactaccgcaccctgcacacgcgcctgaacccgttccgcttccgctccggcatcgtccgcgaggcgggccgcgccctgcgcgacgacctcaccctgcgggctctcgccgaagcggggctgcgcgaagggagggcacaggacctgtccctggccgagcgggcggtgcgggcggatctcgccgaaatcctctcgatcttcgaggggctcgaccggcatctcgacgccgtggccgacatcgtggcacgcctggagcgccggatcgcggcggccctgcgctacaccgaccatcgcgattccgaccggatcgagcgtaccgccgcggcgttgcgggcggtgggcgccgccgaatggtcggagaccggtcccttcgccgaggtctcgctcctgcgtccgcccatcggcgagccgcatctctacaccccccgcatgcggcgcgcggcgatcctgtccgagccgctgccggagatccatctcgaccctgccatcgaggccttcatcctggccaaggacgccttccgccagcgggtgatggtgacgccggagcgcgtcatcgccttcgtcgagcgcaagctcggggcgagccccgccgtccggggttccgagatcgtggtggcggatgtggacgagttcgtggtgttccagcgcctgcgcgagatcgacgtgctgttcgacggcatcctgaccacgcgctaccgcctctcgcgggtcgcgggccgcgtctccaacggctggctcgactgcccggacttcctggtggagcgccgaaacccggcagtccgcccggcatcggttcgcccacgcggcgcctga

SEQ ID NO: 47823 - DNA, 636 bp, Methylobacterium sp. Leaf106
atgatcgaggccttccgcgccatcgtcgacggcgacgagcctccgcctccggggacgcgcgcgccctccggggaggatctgacgcgggcgctccaggtgctgctcaagagccagtgcatctattccgatacccccggcatcgggcgctcctacgagcttgcccggcactacgctcccttcttcaagagctacttcgcctgcctcggatacgggttcgaggtttcgccccgcgaccagatggtgttcctgcgcgtgcccccggacggggtgcgccacgacggccaggccgaacgcctacgcaaggacgagaccctcgtccttctcgccctgcgtctcgcctacgaggaggggctgcgcgcgcaccgcgtcaccaccgacggcgtggtcgaatgcaccaccgacgacattgccgaatcgatccgcaccgccgcccggagcgaggcgccggaggaggcgcgcctcaccgaaatcctccgcctcttcgcccgcaagggtgccctgcgcttgggcgaacgcgacaaggccgagaagatcacgccgctgatgctgctaccgggcatcgccgtgctctcgcccgatgcctggatggaacaggtccgcgcctgggccgcggcgcgcctcgacgacgacggctga

SEQ ID NO: 47824 - DNA, 3456 bp, Methylobacterium sp. Leaf106
gtgtaccgcctcaccgacatcgtcctctccaactggtacctgatccggcgcgagcagatccgcatccggggggcggctgccctggtggggccgacgggcgccggcaaatcgacgatcttcgatgccgttggaacggtgctggccggaaacaatgccagccgcctcgccctcaacgcctccgcctcggggcgcagcgcccgcacggtccgcgattattgcctcggctggatcagcgacccggccgagggcggacgcccgacccgcgaggcctgcgagacactgatcgttctggtcttcgagaacgagaccaccggccgcgtcgtctcggtgggcctcgctttggcggcccgtgccgaggacagccgcgagaccacgctgtcgcgcttcatcgcggtcggccatcgcttcgagatcgccgattacgtccgcgagaccgcggagggcagcttcgtcgcgccctggccggagatcgccaaggacctgcgcatccaggccgaccggttcgaggaattccgctcgtcgggcgagcgcttcaccgccgaattgctggcgctgatgcgcgagggggcgtcgagtccggagccacggcatttcctgcgcaccttctccaacgccgtggcgttcaagccgatcttcgattcctccgccttcgtgcgctccttcgtgctcgaaccggagcccctggacgtcgcccgcatccgccagtcggtggagaactggcgccgcctgctggagacgatcgaggagttggagcgccgactcacgcatctcgggcgcatcctgaagcgctacgagacctgggccgaggccagcctctcggccaccctcgacgatctgcgcgccgctggcgccgatctgcgccggcgcatcctcgattacgcgaccgcccgctccaggctcggcgaggtagccgagcgcctgcgcatcgcccgcgagagtgtggccaccagccaggggttcgtgcgcgagatcgacggggagatcgccggcaagaaggcgatgctcgccgggagccagggcgaggggcggctcgccgcctccaatgccggcctcgccatgctggcgcgcgacaagcgcgacctctccgcccgcgtcgccgacctcgtggggatggtgcaggaggcgggcaagctcaacaccctgttctccgagattcagcggatcgatcccgacgccgccaggatcgtggccgcgtgctcgcgctccggcctgcgccgcgaggcgcccccggaggaatccctgcgcatcgacggccccctcggcgggttgatcgagatgctcgcggccctgcccgacatcgccacccccctcgacaccgccgccgaggatatggccctgcgcgcccgggcccaggagaaggaggcgcaggccctctcggccgagatcggcaccgggcgaacgggcggcgcccgcctctcctccgacacggcgggctttcgcgacgagctggcccggctggggatcgaggccacgccgatctgcgagctcgccgagatcaccgatccgaaatgggggccggccctggagggtctgctcggcggcgcccgtgaggccctggtggtggagccggacaggctcaacgaagccttcgcccatctcgaggcccgcaagagccagttctaccgctgcctgctggtcaagaccactgacaccgcgcggcgccggggcgggcgcgacgacgaggggccgatctcgctgatcgagacccgcgatcctcacgcccaggccttcctcgccgcgcgtctcgggggctacgatctcgcccccaacgacgcggccctcgcccatatgagccgcgccgtggcgccgagcggccgctccacctcgggcatggcctattccgtggtgcggccggtccagttgatgatgacgcggggcagccgcggccccacggccgagggacggcagaacctggagcgcgcggtggccgaggcgcggcgcctgcgcggtgaggcgggcgtgctgcgcgaggccgcccgcatcgccgccatgctgcgggtccgcctcgcggaagcgaatctcgacatcgtctctctgcgccaggaggccgacgccatggaagggcgccggcgcagcctcaccaccgagcgcgaggcggtggagaaggccgataccggcgcgctggaggccgagctcaaggagcttgccaaggagcgctcggcctatctcacggagctggtccaagttctggagcccaagcgcgacgcgctgctcggcgaggaagcggggctgaaggcgaaggtcgccaccgcgcgggaggcgatacgcggcgcgctccaggcaaggcgcagcgcccatgcacgctggatcgccggtgattccgtccgcatccgactcgtccggccgggcgggttcgatccgctggcggtggcgaaggcccgggccgacgccgcaggcctcgaatccaaggaactggcggctttggccaatgcggcgcgcggcgccgcccgcgaggcgatggagacggcgcgcacgcaaggccgtgccgccgagcgcgatctcgccgaatattgcgtgcaatggcggatcgagaacccgctcggcaacggcgacgccccggcctccttcggtttctcttgggtcgcccgcgcccatgacgaggtcgcgggccacgagttgcggcgctatcgcgaccaggcggtgcgggcagagggcgagatgcgccgcctcatgaccgaggacctgctgacgcgcctcgccgacaagttcgagcgggtccgcacccgcctcgacgccctgaacgaacgcctctccacccagaccttcaccggccagacctacgcgttcgaggcgaccgtcgaccgccgctacgccgccgtgcatgccctcgccacagaggtggctcgctcggccgacgcggcgcaggcgattctgccgggggaaggcgaggaagcgccttcggggccgctcgccgccgccatcgaggagatcaccgccctgatcgccggggacgagagcgcggcgcggctcgccgattaccgcaactatttcgtctacgagatcggcatgcgcgacaaggcgggcaaccgcaccaccatgtcgaaccgggccctgcgcggctcgggcggcgaggcgcaggcgccgttctacgtggccatcgccgcctcgctcgcctcagcctattaccccggcgaccggcccggcgacgagaatcccggtctgggcctctgtctcctcgacgaggccttctccaaactcgacgtgcgcaactcgcaggccctggtggacctctatcaagcctgggggctgcaactcctcatcgccgccccggaggacaagcgcaccacgctcaccgaggtgatggacaccatcgtcaccgtctataagagcccggacctgacctcggtgcggatcgaagccgagcatccgctggagacggccaagcgcgcgctggcggccatcaacccggagcggcagggaatcgagacgttccgggtctccgacgcggcggagtga

SEQ ID NO: 47825 - DNA, 1473 bp, Microbacterium sp. Leaf288
atggggaacactcgtgccgaagcggcatatctgcgggctctcgcggcgttccgaacccccaccctcgaccttctccacggtcgctacgcgcccttcgtggtcgcggccctctcgatcgtgttcacggtcgatcgcccgtcggtcgagatctccgatgcgcacgccgaggtcgccgagatcctcgacgaactccgtgccgcaggctacgacgagggcgatcgcacgctcccggtcggcaccgcccgcgagatctgccgctactgggtgcgggtcggatggctcgtgccgcagatcgacggtgacgccgaggtgtaccgcctcaccgcgcacgcggtgggcgcgctcgagatcacgggccgcacggccggcggccggacgcgcgtgtcgaactcgcgcgtgcgcactctgctcgaggcggtcgagcgcctctccgatcatgccgagacggatcccgccgtccggatggcccgcctcatccaggagcgcgatgcgctcgacgccgagatcgcccgcctcgagctcggccagtccgagccgatcgacgacgagcagctcctcgaagaggccgagaacgtcctgcacctggcccgcgagctcccggcggacttcacacgcgtcgcggaatccatcaaggccatgcagcgcgacgtcgtcgccgacctgcgtcgtgacgtccgtccgaccggcgaggtgctgcgcgagtacctccagcgcggccagcacgtcatgcagtcgaccgccgagggtcgcgccttcgccggcgcgttgcgcctgatcggcgatccggaacgcatcgacagcctcaccgagcagctgcacacgctgctcgcgcagccgttcacgcgtctcatggacggcgagcagcgcaaggagttggacgccatcggccgccgggtcgagctcggcgtcgaggaggtcctcaccgcacagcgccgcgcctcccgcgtcatcaccggtcaggtccgcacccacgacccgatccgcgaccgccaggtcgacgatctgctccgcgacgtcatgtcgggtctgcagacgtggacccgcagctcgtcctccgatgccccggtcgagccgctccgcagcctcccgatggcagacctcggccacctgcggcagtcggtgagcgacatccgtcctcccggcgcgcccgctccgctcaccgccgcagacgaggacgcccagttcgcggatgctgacacccgcgcgtggggaggaccccggtacgccgagctcgaggcctacgtcgccggcctcggcgacgagttcgatctgggcgacgcgttccagggggccgatgacgaggcccggcgaccggtggacctcgtgggccttctcgagatcgctcaccgcaacggcatgagcgaaggcggcgaagtgtccgtcgtcgaagccctgcgccccgacgggacgacgcgacggttcgcgttcggatccgtgaccgcccgcaccgcgaaggagcacgaccatgactga

SEQ ID NO: 47826 - DNA, 795 bp, Microbacterium sp. Leaf288
atgactgagaccgccacacaggccgatctcgaggccggcgatctcgatgccaccgacatcgccgtcgaggacgctgccgcgagcgatgcgttcatcgcgcccgcggcgatggaggacgacctcgacgagctcttccccggcgaccgcggcgtgctcgaccctgcggtgcggcgcgtgttcgtgcacgtcctgcagcggcggttcctcctggcggaccgcaaccgcgaggagtggacggtgctgctcgacaaccagcagctcctcgaatcgcgcctcaacgacctcttcgtccgcctggtggtcgaccacgaccgcggcgtcgcgtacaagcagcaggtgcgctccgacgagctcgagatgcccatcctgctcagggatgccccgtacacgcgctccgagacgctcgtcctcgtgcacctgcgcacggtctaccagcgcgagtcggcggcgggggagccggcggcccgcgtcgacatcgaagacgtcgagcagacggtcatgagctacttcgtcgatgccgacggcgacaccgcccgccggcagcgctcgatccgcaaggcgatggaccggctggcgcgcgacggcatcgtcgatgaggagaccaccggccggttccgcatcagcccgctcgtcgagatcgtgctgagcgccgagaagctgcgcgagctgcgcgactggctgcgcacgcagtctgatccggcgggcgcgcagggcgcagcatccgtcgccgccgtcgatgtgttcgacgagaccgacgaagacgacgaagacgacctcgaggagacctcgctgtga

SEQ ID NO: 47827 - DNA, 3351 bp, Microbacterium sp. Leaf288
gtgacgatgctcgacacgctgttcgggctgatcccggcggcatcgcgcgggcagcagtggctcgccgaggacctgcagctcgtcaactggggtggctacgacggcgcgcaccgcgtgcggttctcacccgaggcgaccctgctgtgcggcgggtcgggctcgggcaagtcgacgctcatggacgcgtacatcgcgctcatgatgcctcacacgacgccgttcaacggcgcgtccaacgggggagtgacggggcgtccgcgcggcgacgagcagcgcaacatcctctcctacggacgcggcaagctcgacgagtcgcgcaccgacgagggtacgaagatgcgcgtgctccgcggcgacggcgaagacacgtggaccgccgtcgcgatgacgtggatcgaccacgacgggtcccgcttcactgccgtgcgcgcgtggtacatcccggccggcgcgcgtgtgctcgaagacaccgtgcgcgtccgcgcgacgacggaccgggcgttcgatctcagctcgctccaggaagccgccgcgctgcgcctctccgacctctccctccgcaacgcagggctcgacccggtgggcaccgatcgcgagttctcggcacgactgcacgccgtgctcgggatcggcgctgcgggcgcggggggcaaggcgatgagcctgctcgcccgcatccaggccggccagcagatcacgacggtggacgacctgtacaagcgtctcgtgctcgaagagcccgagacgatgaccactgccgacgccgtcgtcgcgcacttcgacggcctcgagagcacgcgcacgcgcatgctgacggcgcgccagcaggtgagcgcgctcgagcctctccgtgagctgcgcgagaagatcgcggtggcgctcgagcgcgtgcggctgatcgacgaggtcggcgagttctccgacccggcatcgctggcgacgctctggcgcgccgatcgacgactgggcatgctgcgcgaggtcgagaccgagctgcgcgaccgcaagaatgcggccgacaccgcgcttcgtgaaaagcgggcgctggccgacgccgccgaggcggagcgcgacggtctggtcgaggtgctgcgactctcgggcggcgatcgcctcgagaccgcccagcgggagctgcgcgaggtcgagcggcggctgaccgcgacacagagtcgccgcgcgggcttcgacgcagacctgcgggcgatcggcgaggacgcggccacgcaggccgagttcgccgagctgatcgaccgcgcccgtgagagcctcgccgaccgcgatgcgaagggcggcgtgcgggccgagtacgccgaggcgatctcggcggagaagtctgcagcacgcgagatcgccgagctggaggcagaggtgcggcggacgacagggctgcagggcaacatcccgcgggcgctgcacgaatcgcgcgagctcgtggcgcgcgcggccggcatcgaggtcgaggacctgccgttcgtcggcgagctcgtcgaggtgcgcacggagttcgagccgtggcgcgaggccttcaacctcgcactgggcggtttcgcgacgacgctcctcatcgacgtggatcaccttgggcgattccgcacggcgatcgactccgtgcgcacgccggtgcggctgcgctacgagggggtccacgccggactcgacgaggcggacctgcgcgacacgaccacgctgcccggccgcctggactaccagagcacgccgttcacggggtggctgcgggagcgtctcgccgaccgcttcggcttcgtgtgcgtcgattccgccgccggcctgtcgcagcaccgcatggcgctcacgatcaccggccagatgtcgcagggcagtcgtggtgcgcacggcggccacggccgtgagaacgtgctcgggttctccaacgaccggcgtctcgccgacctcgcgcggcagctcgacgacgcccgtgcgcggctcgagcgcgcgacggaggaccgcacgcgggcggatgccgcgctggacgccgtcgacgctcgcttcgcggtgtacgccaaggtccgcgatctcacctgggaacaggtcgacgtcgccgccgtcacggccgagcgggaccgttggctcgccgtgcaggacgacgtgacgtcatccaatcccgagatcgcccgcgtgcaggggcagatcgccgcggccaagggcaaggcggcgcgcctgcgcgaagagatcgcgcgcaccgtggtcgagcgcgagcagatcgagtcgcagtggagcgacgtcatcgatgacgtcgacgcggaccagacggtgatcgatgccgcagaagacgcgggacggatgctgcgccccgagcagatcgcgttcctcgacgaccgtttccgcctgaccgagacgtcgcggccggcgagcgcatcggacgcgctggccggtttcgtcgccgcgctcacgaccgccgcgcagcggctcaccgaagaccgccgcgctgccgccgactcgctcgagcagcagcgcgacggcgtgcggcggatcatggtgagcttcctcgagcgctggccgaacccgaacctgctgcccgacccggatgagtccgtcggggacttcgagcgcatcctcgaggcgctccgaacgagcgggctgcacgagctcgaggccgagtggcgcgacagccttctgaagctgtcgggcaacgacctcaccaacctcgactcgacgctgagccgctccatccgcgagatccgcgaccgcatcgcgccgatcaacgagatcatgcaggacctgccgttctacgacgacgatcaccgcctgcagatcacgacgcgcgagaaccagtcggaggcgcggcgccgcttccgccgcgaactgcgcgaggtgcgggcgctcatcgaggcggcgtcgaccgacgaggagcgcgagcaggtgtaccggcggatgtcgaagctgatcggtcacatgcgccgctcggcccccgacttcggcgacctgatcgacgtgcgcaaccacgtccgcgtgagcgcggagcgggtcgacgccgtcacgaagcagcacgtcgccctgtacgaccacatcggcgagaagtccggcggcgagtcgcaggagctgatcgccttcatcgtcggtgccgccctgcgctatcagctcggcgatgccggtgcggtgcgtccgcgctatgccccggtgttcatggacgaggcgctgatcaaggccgacgcgcacttcaccaagcgcgcgatcggcgcgtggcgcggcctcggcttccagctcgtgatcggtgcgccgaacgacaagtacagcgccatcgagccgcacgtcgacgtcgagtacgacatcctcaaggacacccgcggccgctcgtgggcgaagcccaaggtcggcctgcggggctga

SEQ ID NO: 47828 - DNA, 1473 bp, Microbacterium sp. Leaf288
gtgttccttcagaatggacgcgtgcccgccgtcgcccaggtcctcgagctcgcccagcttgcggagcgcgatgcggcgtggaagctgcttcgagccgacagcgcacccgtggtcgccggtcttctcggcacccacctgggcggagacgagcgccaagtcgacgctgaggagctgtacgagcggatcgatgccgacctcgagcggctccgcgcacaggggctgatcctgccgttgactgcgaaggggtactgcggagagtggcgctcggccggcttcctggtgcgtcggccgtcatcggaagcgcggggtgagacgctcgagctttccccggacgcgatcgccgggatccgcttcctgcagggtcgcgccgccccgcgttctagtgtgaccgagtctcggcttgcgagccttgcggcgcaggtccgtcgcctcgcgatcgacactgatcctgacgtgtcagcacgcatcgcgctgctccaagaagagatcgagtcaatcgagcggcggatcgagagcctgcgttcgggtgacgagaccgcgatagacgaggaccgggcgctcgaacgcgttcgcgatgtgttggcgcaggcggcggacgtgccggacgatttctctcgggtgcgtgctgagttcgaggcgctgaatgcgtcgctgagggcgaagatcgtcgagtccgatgtttctcaggcgtcggtcgtagacgaagtcttccgcggaatcgaccacatctccgactcggatgcaggccgcagtttcgctgccttctcacagctcgtgctcgaccctgcactcggtgccgcgttcgaggccgacattcgccgcatcctcgaccgcggattcgctcgtgacctcacctcggatgaacgccgggcattgcgctccttcctcaccacgctcaagggacgaagcgcggagatccacgacgtcatcacattgttcgcccgggcgctgcgccgctacgtgcagtcgcaggactaccagcgcgaccgggtactgaggactcttctgcgagaggctcagcacgcgggtgtggaagcatccgcgcatacgcgtccatggcatccgacgtcgctcactctggatctctcggccgtggccatgtcaagcgtcggggcgatcgacctccacgatcccgccgaattcgccgccaccgacgagatcgtcacgcagacggcatccctcgcgagcctcgaggagatgcgggctatcgctcgcgagaccgagatcgacttcgacgaactcacccggaacatcaacgacctgctcgccgaggtgcaatcgtgcaccgtcgcagatgtcctcgctcgataccccgcgacgcagggggtaggaagtgtgatcggacttctctcgatcgcggcggagcagggcaccgttgacgacgagcccgaggtgctcgcgtggcagggcgccgacggagtaccgcgcgcggcaatcgtcgcggcgcaccgattcacaggagcggtgacatga

SEQ ID NO: 47829 - DNA, 660 bp, Microbacterium sp. Leaf288
atgaccgaagcgattccaacggatgtcgcccccggggagcacaccggcctctggcgcggtgactcgggggagcttccggaccggaccaggcgggtcctgctccgtctggtgcgcgggccgtacctctcaggcgcacgagaggcgcaattgtgggcagtactgctcaccgacgagaccatgatccgctcacgtctcgccgagctgttcctcgaactggtcatcgaccgtgacaacgagttcgcgttcgtccgcaacgctccctccgacgatgcgccgaaggcggtgcggtccgaggccttgacgttcctcgacacggcgatgctgctcgtcctacgccagacattgctgagcgaggagggtcgcgggcgtgtgatcgtcgggcaggcggaggtcttcgagcaacttgctgtgttccgcacccccgatcgtgacgagaaggacttcgcgagtcgagtcaactcgtcgtggaacaagatgcagaacaagctccgtgtgctgcacgccgtgggcgatgaccgcgccgagatctctccggtgctgcggctgctcgtcgacgccgaccagatccgcgcgatcaccgccgagtatcagcggatcgcccgcgagtgcgaaggtgactttgccgccctgtcgacggatgacgaggaccaggacgcatga

SEQ ID NO: 47830 - DNA, 3354 bp, Microbacterium sp. Leaf288
atgacgatgctgaccttccccactgacgagccggagatcgatccgaccaggcccggtcagtggcgcctcgcccagatcgaaatcgtcaactggggcacgttcgcgggccacgtcgccgtggacgtcgcgcgcgacggtcacctgttcaccggggcatccggatcgggcaagtcatccctcttggacgcgatcgccgcggttctcacccccgataggtggctgcgactcaacgcggcagctcaggacggcgcatctcggcacagcgatcggacgctgatgagctacgtgcgcggggcctggagcaaggaagcggacgaggccgctgatcgggccaccacgacttaccttcgctcgaaagccacctggagcggcatcctgctgcgctacgagaaccttcgcgacgaaccggtcgtcctgctgcgggtgttccacgcacccggcacgcgcaccgaggcgacagcgttgaaggacgcgcggatcttcgcgcgcggccatgtggagcttctcgaagtgaagccgcatgtcgaaggcgggatcgacgcgcgccgaatgtcgaaggccttccccgatgcgctcctcacaaccggtgggcggcacggacgctttcatgagcgtgtcatccgccagttcggcttccgcggcgacgcgacgcttcagcttctccacaagactcagtcggcgaagaacctcggcacgctcgacgcgctattccgcgggttcatgctcgatcagccgggaacctttgcgcgcgcggagactgcggtcgagcagttcacggagctcgatgcggctcacaaacacgtggtcgacctgcgcaagcaggctgatgcgcttcgcaaggtcgacgaggcgatcgcggcgttcgacctggccggtgccgagatggcggcgatctctgatctgcacgatgcagtcgagcccttcacttcggcactcaagcttcggctcgcgaaggatgccgccggcccagcacgcgccgcgctggcgcgcgccgagagcgagctgagcgacgccgcgcgcgagcagcggttggcggccgatgctctcgagaccgcgaaggctcgcgttcgcgacgagggaggcgctcgcgtcgagcttctgcaggagcggatcgatagtgcgcagagcgccgaggacgtcatcggtcagtaccggtcccagctgggcgccgagctgacgcgcatcggcgcgcccatgcctgaggactccgaacagtttgcggaactcctcgcggtcgccgtcgccgaagctgcgcgcgatatccccgctgtgtcgtatgaggtgcgtgacgccgcgagtcaggcccgtaaggtgctggacgaaatcacgaatcagattcagtcgctgagagaccaccggagcaacctcgacgagaagctcctgagagcccggcgatacctcgccgacgctgtcggcgttccggcgtcgacgttccccttcgccggtgagctgatctcggtcgccgaacagcactccacatggcgcggcgcggcagagcgagtgatggcgccgttcgcgtcgacactcctcgtgcgggacgagcatcttgcgggagcccgccgtgcggccgactcgcgcacgctcggtgtacggctcgtcatcgaagcggtgccgcactcggtcgatgagccgcgtcgccccaaggacccccgctcgctcgttcatcgcctcgcggtgagtgacgggcccttcgcgtcttatgtccgaaggcgcatcgccaccgagttcgactacgcctgcgtttcgcacccggacgagctcgacgacgtcgaacgcggcgtcacgatcggcggtctcgtcaagcgcaactcacgcaggtacgagaaggacgaccgtcacgacgtcggtgatgcgacccgctgggtgctgggcggcgacactgcggcgcggctcgaggcgttgctggagcgtcgtcgtgaggcgatggtggcgatggaggagacgtccgcaagggatgcgcatgcggactcggcccgccaggatgctgtgacccggcgtgatgtcttcacgcgggtttcgaggttcacgtgggagcgagtggacctcgctgccgcggcggcggtgaccgcggctcggcgcgatgaactccgggtgctcaccagcgagtcgggcaccctccgcgaagctcaggaggccgccgagcgagctggccaacggctcgctgataccggcgaagcacacgagcgagcgcttggccaccacgccgtcgcccgcaacaagatggagagtgtcggagcgcagatcgccgaactcgaggccgcgccccacacgccggtcgacgaacccatcgccgattcgctggaagaacgattccgcgccgagcgacgctccgtcagcctggaaacggtcgacgaggtcgcacgcaaggttcagtcggcgctctcgaaggagaaggacgtcgcagccggccgtgcagccgacgctgaagccagcttcgcgggacgtgcggcggagttccgactcgggtggccggcagcatccgccgagctcgccgccgacatccgcgaccgttacgggtatcgcgaacttcgggaggggatcctcgcccgcggcctgcccgagaaggagaccgagttccgcaagctgttgcgggagcgctcgcaggatgtcgtcgcccacttgctcagcgacctccgcgacgccccggggttcatccgggagcggatccttcccgtgaacgcatccctcggacggtccccgttcgaggggacggatcgcttcctcgagatcgatgtgaagacgacccggacgccggaggtcgacgagttcctcaccgacctgcgccgtatcgtcgaaggcaactgggccgacgagtccgccgccggcgcggagcagcgcttcggcgtcctgcagcgcgttatcggtcgactcggctccaaggaccgcatcgacatcgactggcgcaatcgtgtgctcgacacaaggcttcacgtgagcttccttgcgcgggagaaggacctcaccggccgggtcgtgcgagtgtacgactccgccgaggggttgtcgggcggtcagaggcagaagcttgtcatcttctgcctcgccgcggccttgcgctatcagctcactgaggaagaggacgaggtcccgaggttcgggtcgatcgtgctcgacgaggcattcgacaaggccgacagtcgatacacgcgcaacgcgatggaggtgttccgggaattcgggttccacatgatcctcgcgacacctcagaagctgctgcagacactcgagccgtacgtgggcgcgattacgtcggtatcgaaccccgaccgcaacacgtcacgactggcgaacgtggtgttcgcggtcggtgacccggaggccacctctacgccgcatgcggagtcgcgcgcgtga

SEQ ID NO: 47831 - DNA, 1122 bp, Microbacterium sp. Leaf288
gtgacgacgcccgtcacgccgtcggatgtgcgtgcgcgcgcgaagaagctcttcgaccgcgatgcgcgcacgtgggcggccgagcagcagaccggtgtcgtgctcgatgttcccctgcggccgccgacagagcgggaggcgctgagcgacctgaatcgtgttcgagagtgggtcaagtcctggcgcggcgtgagtgaagcctcgggaatcgagctcgagtgggccgtccgaaactggtcacgcgtcggatctcaggaggtccccgtgcgcgccatcgtgcgtagcccagaggtgatcgctggagtcgcaggtgaggcagcggtatggcggcgtctggtggaacgcctcgacgagctgagggctcttgttgggcccgacgcgcaggtagtgctccgcacctacgcccactcgattgccgacctcgatgacgctgattttcacaggctcgtcgacgtgctgacctggctgcgtgacaacccggcgtctgaccgcctcatccgggagcttccgattcgcggcatcgactccaaatggatcgagtcccgccgaggggtcgtagaggcgttgcatcgagctggaaccggtgcatccggactggggcttcgcgagccgtcgccgctggtgcggatccgtgtactcgatccatctctctccttccaatggctcaccgatgtgtcagcgcccgtcgacgaagttgcatcgatccctttacggcctcaacgagtcttcgtcttcgagaaccttgccacggtgctcgccatgccgaacgtgccggacgcggtcgctgtgcacggcggcggtcaccgagtcgacctcgtcgctcgcctgccatgggcgcagaccgtcacctactggggcgatctcgactcacatggattcgccatcctcaaccgactacgagccaggggagtcgaggcgacatcggcgttgatggattccgggactcttttcgaccaccgggatctgtgggggaccgatccagaaccgaatgtcggcgtgctcgagctgctcacgcccggtgagcgcgcgactcttcagtcgctgagcgcggaggggaacattcgcctcgagcaggagcgcatcccgtggagctacgcgctcgcgcgactcggagtgtcttga

SEQ ID NO: 47832 - DNA, 1389 bp, Methylobacterium sp. Leaf117
atgctgttcacgcacctctccgacgacctgttcaagccgcttgcctcgccgagccgggccttcaacgcggccctgctactgcacctgcacgcccgcgtcttcggcgacaccgccgagcccctgcgcaagagcgaactcctgggcgcgatcggcgacttcgcggcggatttcatcgaccgggagatcgacgacgaggccgtgacgccggtcgagccgaatgaacgccgctccgtggtctaccggcggctcctcgatgccggatggctggtcgagcggcgcgagcgctacgttccggtggtcgaattcgaccccgaggcccggatggtgatcgaggaactcgcgcgcctcgaccggggtgagcggcgctcctacggcggcgccgtgctcgacgttctggggagcttggaaagcgccatcgccaacccggccgagcgttccgaggctctggtcaacgcggcgaaatcggctcgcacgttcctcagccacctgcgcagcctcgccgggtcgatgcgcaagagcgaggaacgcatcctgcgcgaggcggaccagggcaccgccctgcggctctacttcgaggagttcgtggcacggcacctcgtcagcgattaccggacgctgcacacccgtttcaatccgttccgcttccgatccggaatcgtgcgcgaggcgggccgcgccctgcgcgatccactgaccctgcgggcgctgacggatgcgggcctgcgcgaggggcgggcacccgaccgggacagcgccgagcgggcggtccgcagcgacctcgccgaaatcctggcgatcttcgaagggctcgatcggcatctcgatgccgtcggcgatatcgtggcccggctcgaacgccgcatcgccgcgaccctgcgctacctcgatcatcgcgattccgaccgcatcgagcggaccgccgccgccctgcgggcggtcgccgggagcgacgacgtcctcaccggactgcccgacccgcaggtctcgctctttcgtccgccgatcggggagccgcattgctacgccccacgcctgcgccgggcacccatcgaatccgagcccctgccggagatcgagatcgaccccgtcgtcgaagccttcatcgccgccaaagacgcctttcgcgagcgcgtcgcagtcaccccggaacgggtggtggcgttcatcgagggacggctcggccccgaacgcgccattcggggctcgcagatccggatcgcggacgtggacgatttcgtggtgttccagcgcctgcgcgagatcgacgtcctgttcgacggcacgctgcggggccgctaccggttgtcccgcgtcgagggccgcgtctcgaatggctggctcgactgcccggatttcctgctcgaacgcgcgccggcgttgcgacggtga

SEQ ID NO: 47833 - DNA, 651 bp, Methylobacterium sp. Leaf117
atgctcgaaccctttcgtgccatcctggatggcgaggaccctccgccgcccggcgcccgtgcgccctccgatgaggagctgacgcgcgcgctgcaggtgctgctgaagagccagtgcgtctatgccggcacgcccggcatcggccgctcctacgaactggcccgccactacgcgcccttcttccaagcctatttcgcctgcctcggctacggcttcgaggtgatgcatcgcgaccagatggtttgcctgcgggtgccgcccgagggcatccgccacgatgcgcaggccgagcgcctgcgcaaggacgagaccctcgtgctgctcgccctgcgcctcgcttacgaggagggcctgcgcgcccaccgggtcaccaccgacggggtggtcgagtgcaccaccgacgacatcgtcgaatcgatccgcaccgccacgcgcagcgacccgcccgaggaggctcgcctcaccgagatcctgcgcctgttcgcgcgcaagggtgcgctgcggctgggcgagcgcgacaagatcgagaagatcacccccctgatggtcctgcccggcattgccgttctgtcacccgacgcctggatggaccaggttcgcgcctggggtgccgcgcggggcgacgacgagggcggaccggcgcaggactga

SEQ ID NO: 47834 - DNA, 3456 bp, Methylobacterium sp. Leaf117
gtgtatcgcctcaccgacatcgtcctctcgaactggtacctgatccgccgcgagcagatccggatccggggcgcggctgcgctggtgggtccgacgggcgccggcaagtcgacgatcttcgatgcggtcggcacggtgctggccggcaacaacgccagccgcctcgccctcaacgcctcggcctccgggcgcagtgcgcggacggtgcgggactattgcctgggctggatcagcgatccggccgagggcggccgcccgacgcgggaagcctgcgagacgctgatcgtcctggtgttcgagaacgagaccacgggccgggtcgtctcggccggtctcgccctggcggcacgggccgaggacagccgcgaaaccacgctgtcgcgcttcgtccatgtgggccaccgcttcgagatcgcggattacgtgcgcgaggcgcccggcggcagcttcgtggcgccctgggccgagatcgccaaggatctgcgcacgcgcggcgagaccttcgacgagtaccgggcctccggcgagcgcttcaccgccgaactgctcgggatgctgcgcgagggcgcggcggtgcccgagccgcgccatttcctgcgcaccttctccaacgccgtcgcgttcaagccgatcttcgattcctcggccttcgtgcgctcgttcgtgctcgaacccgagcccctggacgtcgcgcgcatccggcaatcggtcgagacctggcgccgcctcctcgagacgatcgaggaactggaacgccggctgtcgcacctcgcccgcatcctcgggcgctacgagacctgggccgaggcgagccttgcggcgtccctcggcgagttgcgggctgccgatgccgatctgcgccgccgcatcctcgatcacggcacggcgcgttcggccctgaaggatatcgccgaacgcctgcgcatcgcccgcgaaagcgtcgccaccagccagggcttcgtgcgcgagatcgatggcgagatcgcgggcaagaaggcgctgctggccgggaccgccgccgagggacggctggccgcttcgaatgccgggctcgccatgctggcgcgcgaccggcgcgacctcgccgcccgtgtcggcgagttggtcgggatcgtcctcgatgccggcaagctcacggtgatcatcggcgagatccggaaggtctcgccggaggccgcgcgcctggtggaggcctgcgcccggtccggcctgcgccgggaggcgaacccggaggagacgctgcgctcggacgggccgctggccgccctcatcggcggcctcgccgggatgccggagatcacggcgccgcttgaacggtccgcggaggacgcggcgctgcgcgcccgcgccctggagaacgaggcgcagacccgcgcgccggcgccgagcacgggtgggcgaggcgcggcacctcggctgtcatcggacgtcgccgccttccgcgaagagctcggccggctcggcatcgtggcgacgccggtctgcgagttggccgagatcaccgatccgaaatgggggcaagccctcgaaggcctcctgggcggcgcccgcgaggccctggtggtgcagccggaccgcctcaacgaggcgttcggccttctcgaagcgcgcaagagccagttctatcgctgcctcctggtgaagaccacggataccgcccgccgccggggcgggcgcgacgacgagggaccgctggcgctgatcgcgacggcggacccgcacgcgcaggccttcctcggagcgcgactcgggggctacgacctcgccccgaacgatgcggccctcgtacatatgagccgcgctgtcgcgccaagcgggcgatcgacctccggcatggcctactcggtggtgcgcccggtccagctgatgatgacccggggccatcgcgggccgaccgccgaaagccgccaggattgggagcaggcggttgccgaggcccgccgggcccgggcggaggccgacgtcctgcgcgaagccgcgcggattgccgccgctctgacgcgtcgcctgtccgaaacgaatctcgacctcgccgaactgcgcgccgaggcggacgcgctcgagggccgccgccggagcctaacgacggagcgagacagcgtcgagcgggccgagaccggcgtgctggaggcggaattggcggaactcgccaaggaacgttcggcctatctcaccgaactggtccaggtgctggagccgaaacgcgatctgctcctcggcgaagaggccggcctgaaggccaaggtggcgacgagccgcgaagcggcccgcgccgcgctccaggcccgccggaccgcgtatcagcgctggaccgggggcgattcgatgcgcatccggctagtccggcccgagggcttcgacccggccgcgctggccaccctccgggccgagcgggccgaactcgattcgaaggccctcgggagccttgccaatgccgcccgcgcgcgcgcccgggacgcggcggagaccgcgcggacgcaggggcgcgccgccgagcgcgatctcgccgagtattgcgtgcagtggcgggtcgagaaccccctcggcaccggcgatgcccccgcctccttcggctatggctgggccaagcgcgcccacgacgaggtcgcgggccacgagctgcggcgctaccgcgaccaggcgcggcgggcggagagcgagatgcgccgcctgatgatcgaggatctgctgacccgcctcgccgacaagttcgagcgggtgcgcgcccgcctcgacgccctgaacgagcgcctgtcgagccagaccttcacgggccagacctacgccttcgaggcggaggtggaccggcgctacgccgccgtccacgcccttgcgaccgaggtggcgcgctcgccggatgccgcgcaggcgatcctgcccaacgaggacggcaccatcccggaaggcccgctctccaccgccatcgacgagatcacggccctgatcgccggggacgaaagcgcgacgcggctggccgattaccgcaactacttcgtctatgagatcggcatgcgcgaccgggcgggcaaccgcaccaccatgtcgaatcgggcgctgcgcggctcgggcggcgaggcccaggcgccgttctacgtggccatcgcggcctcgctcgcctccgcctattatcccggcgaccggcctggcgacgagaatcccggcctcggcctttgcctgctcgacgaggccttctccaagctcgacgtgcgcaacagccaggcgctggtcgatctctatcaggcctggggcctgcaactcctgatcgccgcgcccgaggacaagcgcacgaccctgaccgaggtgatggacaccatcgtcacggtctacaagagccccgacctcacatccgtgcggatcgaggccgagcacccgctggaagcggccaaacgcgcgctggcggcgatcaaccccgagcgccagggtatcgaggggttccgggtcgacgctgccgagtag

SEQ ID NO: 47835 - DNA, 1389 bp, Methylobacterium sp. Leaf125
atgctgttcacgcacctctccgacgatctcttcaagccgctcgcctcgccgagtcgggccttcaatgcggcgctcctgctgcatctgcacgcccgtgtgttcggagacaccgccgaacccctgcgcaagagcgaactgctgtcagcaatcggcgatttcgccgccgatttcgtcgaccgagagatcgacgacgaaacttccgggaccgtcgagccgagcgagcgccgctcggtcgtctatcgccgccttctcgatgccggatggctggtggagcggcgggagcgctacgttccggtggtcgagttcgaccccgaggcccggatggtcatcgaggaacttgcacgcctcgaccgaggggagcggcgctcctacggcggtgccgtcctcgatgtgctgggcagcctggaaagcgcgatcgccaatcccgccgagcgttccgaggcgctggtcaatgccgccaagtcggcccgcaccttcctgagtcatctgcgcagcctcgccggatcgatgcgcaagagcgaggagcgcatcctgcgcgaggcggaccagggtgtcgccctgcgcctgtacttcgaagagttcgtcgcgcgccatctcgtcagcgactaccgaacgctgcacacccgcttcaatcccttccgcttccggtcgggaatcgtgcgcgaggccggccgcgcgctgcgcgatcccctcaccctgcgcgctttgaccgatgcgggcctccgggaggggcgggcgcccgaccgggagacggctgagcgcgcggtccgcagcgatctggcggagatcctggcgatcttcgagggcctcgatcgtcacctcgacgcggtcgccgacatcgttgccaggctcgagcgccggatcgccgccaccctgcgctacctagaccatcgggattcggaccggatcgaacgcacggccgcagctctgcgcgcggtggcgggtggcgatgacgacctcggcggcctgcccgatccgcaggtctcactgttccgtccgccgatcggcgagccgcactgctacgccccacgcctgcgccgggcggcgatcgagtccgagccgctgcccgagatcgagatcgatcccgtcatcgaggctttcatcgccgccaaggacgcgttccgggagcgcgtcgcagtcacgccggagcggatcgtggccttcgtcgaggcgcggctcgggccggaacgcgccatccggggctctcagatccagatcgccgacgtcgacgatttcgtcgtcttccagcggctgcgtgagatcgatgtgctgttcgacgggagcctgcgtgcccgctaccggctctcgcgcacggagggacgggtctcgaatggctggctcgattgtcccgacttcgtgctggaacgggctccggcgctgcgccgctga

SEQ ID NO: 47836 - DNA, 636 bp, Methylobacterium sp. Leaf125
atgctcgaaccctttcgcgccatcgtcgacggcgaggacttgccgccgcccggagcccgcgcgccttcggaagaggagttgacccgggcactccaggtcctcctgaagagccagtgcgtctatgccggcacaccgggtatcgggcgctcctacgagctcgcccggcattacgcgccgttcttccaggcctatttcgcgtgcctcggctaccagttcgaggtgatgcaccgcgatcagatggtgtgcctgcgggtcccgcccgaaggtgtccggcacgatgcccaggccgagcgcctgcgcaaggacgagacgctggtgctgctcgccctgcgacttgcttacgaggaaggcctgcgcgcccatcgcgtgaccactgagggggtcgtggaatgcacgaccgacgacatcgtcgagtcgatccgcaccgccacccgaagcgacccgccggaggaagcacgtctcacagatatcctccgactgttcgcgcgcaagggggggctgcgcctgggcgagcgtgacaaggtcgagaaaatcacgcccctgatggtcatgcccggaatcgcggtgttgtcgccggacgcctggatggatcaggttcgggcgtggggggccgcacgcggcgacgaggaagcctga

SEQ ID NO: 47837 - DNA, 3456 bp, Methylobacterium sp. Leaf125
gtgtaccgccttaccgatatcgtcctctcgaactggtacctgatccgccgcgagcagattcggatccggggcgcggctgcgctggtgggaccgacgggggccggcaagtccaccatcttcgacgcggtcggcacggtgctggcgggcaacaatgccagccggctcgccctcaacgcctcggcttcgggacgcagcgctcggacggtgcgcgattactgcctcggttggatcagcgatccggcggagggcgggcgccccacccgtgaagcctgcgagaccctgatcgtcctggtcttcgagaacgagaccacgggccgcgtcgtgtctgccgggctggcgcttgcggcccgggcggaggatagtcgagagaccaccctgtcccggttcgtccatgtcggccaccgcttcgaggtggccgattacgtccgggaagcgccgggcggtagcttcgtcgcgccctggacggaaatcgccaaggatcttcgcacccgcggaaccaccttcgacgagtatcgcgcgtccggcgagcgcttcaccgccgaactcctcggcatcctgcgtgagggggccgcggtcccggagccgcgccacttcctgcgcaccttctccaacgccgtggcgttcaagccgatcttcgattcatcggccttcgtccggtccttcgtgctcgaacctgagcccctggacgtcgcacgcatccggcaatccgtggagacctggcggcgcctcctcgagactatcgaggagttggagcgtcgcctggcgcatctggcccggatcgtcgggcgctacgagacctgggccgaggcgagcctcgcctcggcgctcggagaactgcgtgccgccgatgcggatctgcgtcgacgcatccttgacaccgtcaccgctcgccaagccctcaaggatgtcgccgagcgacttcgcatcgcgcgcgagagcgtcgcgaccagccagggtttcgtgcgcgagatcgacggcgagatcgccggcaagaaggcgcttctcgccggcacggccgccgaagggcgtctcgccgcctcgaacgccggcctcgccatgctggcccgcgaccggcgggatctggccgcccgggtcgccgaccttgtcgggatcgtcctcgataccggcaagctctcggtgatcatcggcgagatccgcaaggtctcgccggaggctgcccgcctggtggaggcctgtgcccgatcgggcctgcgacgcgaggccaatccggaagagaccctgcggtccgacggcccgctcgccgcgctgctcgctggactggccggaatgcccccgatcgcaacgccgctcgagcgggccgcggaggacgcggcgctgcgcgcccgtgccttggagaacgaggcgcagtcccgcgccccggcacccagcgcggggcggggggcggcgccgcgcctgtcctccgacgtcgcggcgttccgcgaggaactgtcccgcctcagcatcgtggcgacgccgatctgcgaactcgccgagatcatcgatccgaaatggggccaggccctcgaaggcctcctcggcggcgctcgcgaagctctggtggtgcagccggaccgcctcaacgaagccttcgcgcatctcgaggcgcgcaagagccagttctaccgctgcctcctcgtcaagacgacggataccgccaggcgtcgcggcgggcgcgacgacgaggggccgctggcgctgatcgagacggccgatccgcacgcgcaggccttcctcggcgcgcgcctcgggggctacgatctcgccccgaacgatgcggccctcgcccatatgagccgggccgtggcgccgagcgggcgctcgacctctggcatggcctactctgtggtacgcccggtccagctcatgatgacccggggccatcggggtccgaccgtcgagagccgccaggattgggagcaggcggtcgccgaggcacgccgcgctcgggccgaagccgatgtcctgcgcgaagcggcccggatcggtgccgccctcgcgcggcgcctgtccgagacaaacctcgacctcgccgcgttgcgggcggaggcggatgcgatcgagggccgtcggcgcagcctgaccacggagcgggagagcgtcgagcgtgccgagaccggcgtgctggaagcagaactcgcggaactcgccaaggagcgctcggcctatcttaccgagctcgtccaggtgctggagccgaagcgggacctcctgctgggcgaggaggctggcttgaaggccaaggttgcggcgagccgcgaggcggcccgtgccgcgctccaagcgcgtcgggccgcgtatcagcgctggacaggcggcgacagcatgcgcatccggctcgtgcgtccggacgcctacgacccgggggcgctgaccgcgctgcgggccgagcgggcggatctcgacgccaaggcgctggcgagcctggccagtgccgggcgcgcccgcgcccgggaggcggcggagacggcgcgaacgcagggccgggcggccgagcgcgaccttgccgagtactgcgtgcagtggcgcgtcgagaatccgctgggagcaggcgatgcgccggcctccttcggctacggctgggcgaagcgggcccatgacgaggtggcgagccacgaacttcgacgctaccgggaccaggcgcggcgggcggagagcgagatgcgccgcctgatgatcgaagaccttctgacccggctcgcggacaagttcgagcgcgtgcgcgcccggctcgatgccctgaacgagcgcctgtcgagccagaccttcacgggacagacctacgcgttcgaggccgaggtggatcggcgctacgccgccgtccacgccctagcgacagaggtcgcgcgctcgccggatgcggcccaggcgatcctgcccgacgagggcggcgcgatcccggacggtccgctcgcggcggcgatcgacgagatcacggccctgatcgccggcgaggagagcgccgcgcgcctcgcggattaccgcaattacttcgtctacgagatcgggatgcgggatcgggccgggaaccgcacgacgatgtcgaaccgggcgctccgcgggtcggggggcgaagcgcaggccccgttctacgtcgccatcgcggcgtccctcgcctcggcgtattacccgggtgatcggcccggcgacgagaaccccggcctcggcctctgccttctcgacgaggcgttctcgaagctcgacgtacgcaacagccaggccctggtcgacctctatcaggcgtggggattgcagctcctgatcgcggcgccggaggacaagcggacgacgttgacggaggtgatggataccatcgtcaccgtctataagagcccggacctgtcctccgtgcgaatcgaggccgaacacccgctggaagcggccaagcgtgcgctggcggcgatcaatcccgagcgccagggcatcgaaggttttcggatcaccgacgccgccgaatag

SEQ ID NO: 47838 - DNA, 1548 bp, Plantibacter sp. Leaf314
gtgggagagatcgacggcgagttcgaccgtgtccggaacgctctggaacggccggccatccggttgctgagtcgtccaacggcgccggccgtcgtcgcgatcttccgcaccaccttcgggcgggacgtccagttcgtcgcggccgatcgcttccacctgcaggtggaggagtatctcgcggagctcggagcccgtggcgcccggatcccggcgggcggcgacgagcgcggtggcgggcggaccctctgccgggagtgggtgcacgatcagtggctcgtccggaccagcaccgacgacggcgaggagcagtattcgctcacgtcccacgcgctggaggcggtgtcgctcgtcgacggactggcgcacgaccgggcgttgatcagcgaatcgcggctgacgatgatcctcgactccgtccgtcgctgggcgctgcaggccgaccccgatcgggaggagcacctgcggcgcatcgacgcgcaactcgccgaactccaggcggagcgggagcgtgtcgcggccggcgggacggtcgtcgcagcgagtgacgaccgcatgcacgacggctacgcgaacatcgccgacctcatccgccagctgccgagcgacttccgccgggtcgaggagtccgtgatcgcgatgcaccggcgcatcgtcgaggacttccggaacgacacgcggccgatcggtgagatcctcgacgactacctccggcgcaccgacgaactaatgacggccaccgccgagggccgtgcgttcgagggcgcgttcgagctgctgcggaacgacgagctgctgcaggacctcaaacgcgacctctcgacgatcctcgaccaccccttctcctcccgcctcggcccggcggagctccggggcttccgcggcgccgtcggcatcatccgtcagggcatcgacgacgtcctcgcgcagcggcgtcggctcaccgcgacgctccgcgaccacatcgtccatcacgacgtcgtccaggaccgcgagctcgacacgacgctgcgcgcgctcaaccagcgactcggcatctggatgcggaccgctggtccccgcgcgacggtggacgtgccgttgctccccgaggcgatcgacgtcgaacacctgcgtgagcgcttctacgaccccgacgtcgaggccgctcccccgccgatcaccacggcgccggaacggacggacgtcgcgtccatgtcactcgacatcttgcgttcgcagggcggccccctgctggacgagctccgagccgggttgctcgcggcggcgacgtccggagcctcggacgcccacacggcgttcaccgggctcgaccccgagctgcggcgccccgtcgaactgttcggtctggtccacctgatgacgcagctcggcgcgtacgacgaggcgggtccccgacgccgctatgagacggtccgccccgacgggacgacggcggccttcgaccttccggctttccccctcggcgagaccggcatcaccggcttgacccgggccacgacgacctcgaccacggcggcccgcgatcgcgcgtcgcgcggaacggaatga

SEQ ID NO: 47839 - DNA, 849 bp, Plantibacter sp. Leaf314
atgagcatcgaaccggaacccacccaccgcgaatcgaccgaggcgccgaccgacggcgccctcagcgctgccccggtcgcgacgccggaccgtccctcggacgccgagtcgttcgcgctcttcgagggcgacgagggtcgactcgacgccgctcagcgccgcgcgctggtcgccctgctgaagcaccggtacgtcagcccggcactgcaaccggccgaatggcggaccatcctcgagtcggaggccctgctcggctctcggctgaacgagctgttcctggaactccaggtcgatcgatccgccgaggtcgccttcaaacgccaggccggctccgagagcgggcggcggccgttcccgacgctgctccacgacacgagctacagccgtgaggagacgatcctgctcgtctacctgcgcacccggttgcgcaccgaattggcgaacggcgcccgcgccgccatcgtcgagcacgacgaactcctcggcttcgtcgcgagcttccgacccgagcacgccaccgaccgggcccgcgacgacggccgggtggagcgcgcgatcgagaagctgctgaccgcccgggtgttgctccgcaccaaggacgcccgtcgtcatcgcatcgcctccgtcgtcgagacgctccttccgctcgaacgccttcaggagctgctcgagtggttggagacgcagacgcccacggccgatgcactgcaacccgagcaggagccggacacgccgtccggtccgggggcagcagccaccgatggagacgacgacgccgaacccgacgacaccgagccggacgacgtggcatcggacaccgcatcacgaccaggagaggacggacgatga

SEQ ID NO: 47840 - DNA, 3387 bp, Plantibacter sp. Leaf314
atgagccgccccaccgacaccgacaccctgctcgacctcgtcgagcagtggcgcatcgagcgcatgcagctcatcaactggggtgggttcgacgggtaccgctcggtcgacttcgcctcgcgggcgacgctcatctccggcgcgtccggcaccggcaagagctcactcatggacgcctacctcgcggtcatgatgccctcggacgtcccgttcaacggggcgtcgaacgatgcggccgtgggacgagcgcgcaacccggatcagcggaacctgctgacctacctgcgcggcaaggtcgactcggccagagacccccagaccggcgccatgcgcgacatcaacctccgcggatcggagcaactcacctggggcgccgtggcggtcaccttcgtcaacgacgacgaccgccggttcaccgtcgtccgcgcgtacctcgtccctcgacgcgcgctccgcaccggcgacctgtcgatgacgatggcgaccgtcgacggacccttcgacctcaccgagctcgaggccttcgtccccaagcggttcgacgccggtgagctccagggtcggatccccgggttcgtcgtccgcgacacgtacgcggagctgtcatacacgctgcacacccgtctcggcatcggagccggcggtgacggcggccgcgcgatgcggttgttggcgcgcatccaggccgggcagcacctgccgacggtcgacggactgtacaagtcgatggtgctggagcgaccgagcacctatgaggcggccgatcgcgcgctctcccacttcgaggcgctcgacgaggcatacctcgccatggagaccgagagccgcaaggcgcgggtcctggaacggctcggcgaactccgacgggactacgaggacggacaccgggccgcagccgaactcgagcggctcggcttcgctgaagacggcgaaacgcccttcgccgtgtggcgcagtcgcgcgcacgaggcattgctcgacgaggccgtctctcggaaccgccgtgagaaactcgccgccggtgcgaccctcgaggcggctcgagcccgggcgaccgccgccggggtccgggtgcgggaactcgaacgccaggtgtccgagcagggcggcagtgcgctgcgccgggcggaggaacgtcgcgaggcggcggaagcggcccacgccgaggccgtccggacacgagccctgttcgacgagcggaccgaacccctcgacgaaccactccacgatgaggcctcgttcgtggcggcgctcagccgcagcgaggagttcctcgacgacgacgacgcggcactcgaggccatcgaggccgaacgcgccgagctccaccgcgaggcgttcccgctcgaggagcggaacaccgaactccggctcgagctgcagtccctccgtggtcgcgacggcgcggtccccgatcggctccaccgggcgagactcgcgctggccgaagccgccgggctcgatccggagcagctgccgttcgtcgcggagctcatcgacgtggcgccgacgcacgccgcctggcgtccggcgatcgaggtcaccctgcacggactcgccaggacggtactggttgacgaggagcacctcgacgcgttcgggcgggcgatcgacgcggtgcggatcccggtccgcctgcagttcgagggggtgccgctcggcgcgaccacggctccggcgccgggtgatcccgccttcgtctcgggccgcatcacgtacaaggcctccccgttcagtgcctgggtcgagcagcgggtgacgtcggaccgcatcgatgcccgatgcgtcgactcgccgtcccagctctcgggaggtggccgacgcgtcacggccaacggccagctgcgcgacggacgtcgtggctcacacggggatcccggtggggcccccatcctcggcttcacgaacgaggcacggatcgcgtccatcgagtccgagatggccgagctccgcgggcgactcgaactcatcgccggtcgccaggccgcggtccagcggcgcctggcgggcagggaggccgagcgtgcggcccaccgctaccgcctcgacagcgagtggtcgcggatcgatgtcgacggagccgcagcgcgtcgggatgccgccgcggcggacctcgaacgcctgctggacgccagcgacgtcctgcaggagctgcagggttcggtgacggccgcccagcgcgaactcgacgccgcgaacgccgagcggttccccgccgaggaccgcgtccgacgcctggatgaggaacacggttcgctcgtcgaccagcaggacgcggcgacgactgtgatcgaccgcttcgagcgttccggcgtcgacgaggtctccaccgacgacgtcgaacgcatcgaggccgccctcgccgccgtgggaggcgtcccgtccctgggcggcttcgcggacgcgatgaaacggctccgcacccgtctcggtgacgagctgagcgccgccgtccgcctggcggaacaggccgccatcgcccaggtccacgtgttcgagcactaccagtcgatctggcacgaccccaacctcggcacgacgctcgagtcctacggggactaccgcgcgatcctcgacggcatcctcggcaccggcctgcccgagcgccgccaggagtggcgccgccggttgtcccagtggagcggcgaggacctggtccccctcagcagcgcgttcgacagcgcggtcgaggagatcgaggaccggctcgtcccggtcaacgacatcctgcgcgacctcccgttcgggcccgcccacgaccggctgaagatcgtcctccgccgggtgcaccgcgaggaggtcgccgccttccgacgggagctccgagcgctctcgggcgaggtgaccgccgaactcgacgacgacgccctggagggccggttccagcgcttgcgccgcttcatggagtcgatgcgggacaccgctgccacgtcgacttcggcgtccacccgcgaccaggtgctcgacgtccgtcgacacgtcgagatcaccgccgtgcggtacgacacctccggtcgcgatgtgagcgtctactcctcgctcggcgacaagagtggtggcgagacccaggagctcgtcgcgttcatcgtcggagccgccctccgctaccagctcggtgacgaggaccggcctcggccgaggttcgcgcccgtcctgctcgacgaaggcttcatcaaggcggactcggagttcgccggccgggccgtggtggcctggctccgcctcgggttccagctcgtgatcggtgccccgctcgacaaggtgacggcgctcgagccgtacatggaccgactcctgtccatccggaaggacccggagacacgacacgcctgggtggcggagatcgagcgtgccgagcccgtcgagccgctcgaacggatcgggtga

SEQ ID NO: 47841 - DNA, 1389 bp, Methylobacterium sp. Leaf111
atgctattcacacacctctccgacgacctgttcaagccgctcgcctcgccgagccgggccttcaatgcggcgctcctgctgcacctgcacggtcgggtcttcggggacaccgccgaacccctgcgcaagagcgaacttctgacggcgatcggtgacttcgccgccgaattcgtggaccgggagatcgacgacgacgcctccggcacggtggaaccgagcgagcgccgctcggtcgtctatcgtcgccttctcgatgccggctggctggtggagcggcgggagcgctatgttccggtggtcgagttcgaccccgaggcccggatggtcatcgaggaactggcgcggctcgacaggggcgagcggcgctcctacggcggtgccgtcctcgacgtgctgggcagcctggaaagcgcgatcgccaaccccgccgagaggtccgaggccctggtcaacgcggccaagtcggcccgtaccttcctcagtcatctgcgcagccttgctggatcgatgcgcaagagcgaggagcgcatcctgcgcgaggcggatcagggcgtcgccctgcgcctctacttcgaggagttcgtcgcgcggcacctcgtcagcgactaccggacgctgcacacccgcttcaatcctttccgcttccggtcgggaatcgtgcgcgaggccggccgtgccctgcgcgatcccctcaccctgcgcgccctgaccgatgcgggtctccgggaggggcgggcgcccgaccgggagacggccgagcgcgccgtccgcggcgatctggccgagatcctggcgatcttcgagggtctcgatcgccacctcgacgtggtcgccgacatcgtcgcccggctcgagcgccggatcgccgccacgctgcgctacctggaccatcgggattccgaccggatcgagcgcacggccgcggccctgcgcgcggtggctggtggcgatgacgacctcgccggcctgcccgatccccaggtctcgctgttccgtcccccgatcggcgagccgcattgttacgcaccgcgcctgcgccgggcggcgatcgaatccgagccgttgcccgagatcgagatcgatcccgtcatcgaagccttcatcgccgccaaggacgcgttccgggagcgcgtcgcggtcacgcccgagcggatcgtggcctttatcgaggcacggctcgggccggagcgcaccatccggggctcccagatccggatcgccgacgtcgacgatttcgtcgtgttccagcgcctgcgggagatcgacgtcctgttcgacgggagcctgcgcggccgctatcggctttcgcggatggagggtcgggtgtcgaatggctggctcgattgcccggacttcctgctggagcgggcgccgacgctgcgccgctag

SEQ ID NO: 47842 - DNA, 636 bp, Methylobacterium sp. Leaf111
atgctcgaatcgtttcgcgccatcgtcgacggtgaggacttgccgccgcccggagcccgcgcgccttcggaagaggagttgacccgggcgcttcaggtcctcctgaagagccaatgcgtctatgccggaacaccgggcatcgggcgctcctatgagctcgcacggcactacgcgcccttcttccaagcctacttcgcgtgcctcggctaccagttcgacgtgatgcatcgcgatcagatggtgtgcctgcgggttccgcccgagggcgtccgtcacgatgcccaggccgagcgcctgcgcaaggacgagactctggtcttgctcgccctgcgtctcgcctacgaggaaggcctgcgtgcccaccgggtgaccaccgagggtgtcgtggaatgcacgaccgacgacatcgtcgaatcgatccgcaccgctacgcgtagcgatccgccggaagaggctcgactcaccgagatcctccgtctgttcgcgcgcaagggggccctgcgcctcggcgaacgcgacaaggtcgagaagatcacacccttgatggtgatgcccgggatcgcggtgttgtcgccggacgcctggatggatcaggtccgagcctggggggctgcgcgcggcgacgaggaggcgtga

SEQ ID NO: 47843 - DNA, 3456 bp, Methylobacterium sp. Leaf111
gtgtaccgccttaccgatattgtcctctcgaactggtacctgatccgccgcgagcagattcggatccggggcgcggctgcgctggtgggacctacgggggccggcaagtcgaccatcttcgatgcggtcggcacggtgctggcgggcaacaatgccagccgcctcgccctcaacgcttcggcctcgggacgcagcgcccggaccgtgcgggattactgcctcggctggatcagcgatccggccgagggcggacgccctacccgtgaagcctgcgagacactgatcgtcctggtcttcgagaacgagaccacggggcgcgtcgtctccgccgggctcgccctggcggcccgggcagaagacagccgcgagacgaccctgtcccgcttcgtccatgtcggccaccgcttcgaggtcgccgactacgtccgtgaggcgccgggcggaagcttcgtcgcgccctgggccgagatcgccaaggacctgcgcacccgcgggactaccttcgacgagtaccgagcgtccggcgagcgcttcaccgccgaactcctcggaaaccttcgcgagggcgcggcggtgccggagccgcgccacttcctgcgcaccttctccaacgccgtggcgttcaagccgatcttcgattcgtccgccttcgtccggtccttcgtgctcgaacccgaacccctggacgttgcccgcatccggcaatcggtggagacctggcggcgcctcctcgagaccatcgaggagttggaacggcgcctcgcccacctcgcccggatcgtcgggcgctatgagacctgggccgaggcgagcctcgcctcggttctcggagacctgcgcgccgctgatgcggacctgcgtcggcgcatcatcgacactgtgaccgcccgccagaccctcaaggacgtcgccgagcgcctgcgcatcgcgcgcgagagcgtcgccaccagccagggcttcgtgcgtgaaatcgacggcgagatcgcgggtaagaaggcgctgctcgccggaaccgccgccgaggggcgcctcgccgcctcgaacgccggcctcgccatgctggcccgcgaccgacgcgacctggccgcccgggtcgccgaactggtcggaatcgtcctcgataccggcaagctcgcggtgatcctcggcgaaatccgcaaggtttcgccggaggccgcccgcctggtggaggcctgcgcccgatcgggtctgcgacgcgaggccaatccggaagaaaccctgcggtcggacggtccgctcgccgcgctgatcgccggactggctggaatgcccccgatcgccgcgcccctcgagcgggcggcggaggacgcggccctgcgggcccgcgccctcgagaacgaggcgcagtcccgcgcgccggcaccgagcgcggggcggggggcggcgccgcgtctgtcctcggacgtggcggcgttccgcgaagagctgtcccgcctcggcatcgtggcgacaccgatctgcgagctggccgagatcatcgatccaaaatgggggcaggccctcgagggcctccttggcggcgcccgcgaggcgctggtcgtgcaaccggaccgcctcaacgaagcgttcgcgcatctcgaagcgcgcaagagccagttctaccgctgtctcctcgtaaagacgagcgatacggcccggcggcgcggcgggcgcgacgacgagggtccgctcgccctgatcgagacggccgatccccacgcgcaggccttcctcggggcgcgcctcggcggctacgatctcgccccgaacgacgcggccctcgcgcatatgagccgggccgtggccccgagcgggcgctcgacctcgggcatggcttattcggtggtgcgcccggtccagctcatgatgacccggggccaccggggtccgaccgcagagagccgccaggattgggagcaagcggtctccgaggcgcgccgagcccgggcagaggccgatgtcctgcgggaagcggcccggatcggggccgccctcgcgcgccgcctgtccgaaacgaacctggatctcgctgaattgcgcgccgaggcggacgcgatcgagggccgacgccgcagcctgaccacggagcgggagagcgtcgagcgggccgagaccggcgtcctggaggccgagctcgcggagctcgccaaggagcgttcggcctatctcaccgagctcgtccaggtgctggagccgaagcgagacctgctgctgggcgaggaggccggcctgaaggccaaggttgcggcgagccgcgaggccgcccgtgctgcgctccaggcgcgccggaccgcgtatcagcgctgggcaggcggcgacagcatgcgcatccggctcgtgcgtccggacgccttcgacccgaaggcgctcgcgacgctgcgtgccgagcgtgcggatctcgacgccaaggcgctggcgagccatgccaataccgggcgtgcgcgagcccgtgaagcggcggagacggcgcgaacgcagggcagggcggccgagcgcgacctcgccgagtactgcgtgcagtggcgggtggaaaatccgctgggggcgggcgacgtgccggcctccttcggctacggctgggcgaagcgggcccatgacgaggtggcgagccacgaactgcggcgctaccgggaccaggcgcggcgggcggagagcgagatgcgccgcctgatgatcgaagacctgttgacccggctcgcggacaagttcgagcgcgtacgcgcccggctcgaggcccttaacgagcgcctgtcgagccagaccttcacggggcagacctatgccttcgaggccgaggtggatcggcgctacgccgccgtccatgccctggcgacagaggtcgcccgctcgccggatgcggcccaggcgatcctgccggacgagggcggcgcgattcccgatggtccgctcgcggcggcgatcgacgagatcaccgccctgatcgccggtgaggagagcgccgcgcgcctcgcggactaccggaactacttcgtctacgagatcggtatgcgggatcgggcgggaaaccgcaccacgatgtcgaaccgcgcgctgcgaggttcgggcggcgaagcgcaggcgcccttctacgtcgccatcgcggcgtcgctcgcctcggcgtattatccgggcgaccgacccggcgacgagaaccccggcctcggcctctgccttctcgacgaggcgttctccaagctcgacgtgcgcaacagtcaggccctggtcgatctctatcaggcgtgggggctgcaactgctgatcgcggccccggaagacaagcggacgaccttgaccgaggtgatggacaccatcgttaccgtctacaagagcccggatctctcctccgtgcgaatcgaggccgaacaccccctggaagctgccaagcgcgccctggcggcgatcaatcccgagcgccagggcatcgaaggcttccggatcaccgacgccgccgagtag

SEQ ID NO: 47844 - DNA, 1377 bp, Methylobacterium sp. Leaf112
atgctgttcacccgcctgtccgacgacctgttccggcccctcgcctccccgagccgggccttcaacgccgccctgctgctgcacctgcacgcgcgggtgttcggcgatacggccgagcccctgcgcaagaccgagctgctcgccgccatcggcgacttctccgccgatttcgcccaaggcgagatcgccgacgacgagaccacgcccgtcgatcccatcgagcggcgctcggccgtctaccggcgcctgctggactccggctggctggtggagcggcgcgagcgctacgtgccggtggtggatttcgaccccgaggcccgcatcctcatcgaggaactcgcccgcctcgaccggggcgagacccgctcctacggcggcgccgtgctcgatgtgctgggcagcctggagagcgccatcgccaacccggccgagcgttccgaggccctggtcaacgccgccaaggcatcgcgggccttcctcagccacctgcggacgctcgccggctccatgcgcaagatcgaggcgcgcatcctggcgcaggaggaccagcgcgcggccttccggctctacttcgacgagttcgtggcccgccacatcgtcagcgactaccgcaccctgcacacccgcctgaacccgttccgcttccgctccggtatcgtgcgggaggcgggccgcgccttgcgcgatcccctcaccctgcgggccctggcggaggccgggatccgcgagggccgtgcgcccgatgtcgaggtggccgagcgggccgtgcgggcggatctcgcagagatcctggcgatcttcgagggcctcgaccgtcacctcgacgcggtggccgacatcgtcgcccgcctggagcggcgaatcgcggcggccctgcgctacatggaccaccgggattccgaccgcatcgaacgcacggccgcggcgctccgcgccgtggcgggcaccgatgcgccgatggagggcatgccaccggccgggatctcgctcctgcgcccgcccatcggcgccgtccacctctacgcgccgcgcctcaagcgcccgcccatcgactgcgagcccctgccggaactcttcctcgatccggccgtggaggccttcatcgcggcgaaggacgcgttccgccaccgcgtggcggtgacgcccgaccggatggtggacttcctcgagggccggctcgggcgcaagggcgccgtgcggggttcgcagatgccgatcgccgacgtcgatgccttcgtggtgttccagcgcctgcgcgagatcgacgtgctgttcgacgggagcctgagcggtcgctaccgcctctcgcgggtcgagggccgggttgccaacggctggctcgactgcccggacttcctgctggaacgcacacgctga

SEQ ID NO: 47845 - DNA, 633 bp, Methylobacterium sp. Leaf112
atgctcgaagccttccgcgccatcgtcgacggcgacgagccgccgccgcccggcgcccgtgcgccctccgacgaggagctgacccgcgccctgcaggtgctgctcaagagccagtgcgtctattccggcacccccggcatcgggcggacctacgacctcgcccggcactacgcgccgttcttccagagctacttcgcctgccttgggtacggtttcgaggtctcgcaccgggaccagatggtgttcctgcgcgtgcccccggagggcgtgcgccacgacggtcaggccgagcgcctgcgcaaggacgagaccctggtgctgctcgccctgcggctcgcctacgaggaagggcttcgcgaccaccgcgtcaccaccgagggggtggtggaatgcaccaccgacgacatcgccgaatcgatccgcaccgccacccgcagcgacccgccggaggagacccgcttgctggagatcctgcggctgttctcccggaaaggcgccctgcgcctgggcgagcgcgatagaaccgaaaagctcacgcccctgatggtgctgcccggcatcggcgtgctctcgcccgacgcctggatggagcacgtccgggcctgggcttcggccggggatgacgccgcctga

SEQ ID NO: 47846 - DNA, 3459 bp, Methylobacterium sp. Leaf112
gtgtatcgcctcaccgacatcgccctctcgaactggtacctgatccggcgcgagcagattcgcatccgcggcgcgacggccctcgtcgggccgacgggggccggcaagtcgacgatcttcgatgccgtcggcacggtgctggccggcaacaacgccagccgtctggcgctcaacgcctcggcgtcgggccgctcggcccgcacggtgcgcgactattgcctcggctggatcagcgacccggccgagggcggccgcccgacccgcgaggcctgcgagaccctcatcgtcctcgtgttcgagaacccggtctcgggccgcgtcgtctccgttgggctggcgctgagcgcccgggccgaggacagccgcgagaccaccctgtcgcgcttcgtctgcacaggccatcgcttcgagatcgccgactacgtccgcgagacgcccgacggctccttcgtcgcgccctgggccgagatcgccaaggatctgcgcatccgctccgagaccttcgaggagttccgcgcgtccggcgagcgcttcaccgcggaggtgctcgggctcctgcgcgagggcgcgccggtgcccgaaccccgccacttcctgcgcaccttctccaatgcggtcgccttcaagccgatcttcgattcctccgccttcgtgcgctccttcgtgctggagcccgagcccctcgacgtcgcccgcatccgccagtcggtggagaactggcgccgtctcctcgagaccatcgaggagttggagcggcgcctgtcgcatctcggccgcatcctcgcccgctacgagacctgggcggaggcgagcctgtcggcggccctcgacgacctgcgggccgccggcgcggatctgcgccgccgagtcgtcgactacacaaccgcccgcaccggcctcgccgatgtcgccgagcgcttgcgcatcgcccgcgagagcgtcgccaccagccagggcttcgtgcgcgacatcgacggcgagatcgcgcagaagaaggccctcatggccgggacccacgcgcaggggcggctcgccgcctcggatgcgggcctcgccgtgctcacccgcgaccgacgcgacctcaccctgcgggtgacgggcctcgtcgggctgatccaggacgtcgcccgcctgacggcggtcatcggcgaggtccgccgggtcgctccgggtgcggcccgcttcgtcgaggcctgcgcccgcgcagggctccgccgcgaggccccgccggaggaaacgcttcgctcggacgggcccctgaataccctggtgacggcgctcgtcgacatgcccgacatcgccggccccctcgatacggcggccgaggacatggccctgcgcgcccgcgccgccgagacggaggcgcagggcctgtcggcgcccttcgccggtggcggggcggccaagggcgcgcgcctgtcctcggatgtggcggcgttccgggacgaactcgcgcggctgggcatcgacgccgtgccggtctgcgaactcgccgagatcgtcgagccgaaatggggcatggccctggagggccttctggggggtgctcgcgaagccctggtggtgcagcccgaccggctgaatcaggcgttcgcccatctcgaagcccggaaagcacagttctaccgctgccttctggtcaagaccacggacacggcccggcgccggggcgggcgctacgacgacggccccttgggcatgatcgagacccgcgatccccacgccgaggcgttcctcgccgcgcgcctcggcggctacgacctcgcccccgacgatgcggccctcgcgcatatgagccgggccgtggcgccgagcgggcgctcgacctccggcatggcctattcggtggtccgtcccgtgcagctcatgatgacgcgcggcagccgtggtccgacggaggagggccgcgaggccatggagcgggctgtggccgaggcgcggcgcctgcgcggcgaggccggcgtgctgcgcgaggccgcccgcatcgccgcgcagctcaaggcacgtctggccgaagcgcccatcgacctgttcggcctgcgggccgagtgcgacgccatcgagggccgccgccgcagtctcgccaccgagcgcgagagcgtcgagaaggccgataccggcgccctcgaagccgaattgaaggagctcgcgaaggagcgttcggcctacctcacggaactcgtgcaggtgctcgaacccaagcgcgatgccctgctgggcgaggaagcgggcctgaaggccaaggtcgcctcctcccgcgaggcggcgcgcgcggcgctggccgcccggcgctcggcgcatgcgcgctgggtcggcggcgacacggtccgcatccgcctcgtgcgtccggagggcttcgacccgcgggccgtggccaaggcccgggcggacctcgccggcctcgacgcgaaggaactcgcggccgccgccgccgccgcccgcagcgccgcccgcgaggccctcgagacggcccgtacgcagggccgcaccgccgagcgcgacttggccgagtattgcgtgcagtggcggatcgacaaccctctggggcgcggcgacgctccggcctcgttcggctacggctggacccggcgcgcctacgacgaggtcgcgggccacgagctcaggcgctaccgcgatcaggccgtgcgggcggaaggcgagatgcgccgcctgatgaccgaggacctgctgacgcgtctcgccgacaagttcgagcgcgtccgcgcccgcctcgacgccctcaacgaacgcctgtcgagccagaccttcaccggccagacctacgccttcgaggccgccgtcgaccggcgctacgccgccgtccacgcgctcgccaccgaagtcgcacgctcgcccgatgcggcgcaggcggtcctgccgggccagggcgagacgccggccgaaggcccgctctcggccgccatcgaggagatctcggccctcatcgccggtgaggagagcgcggcgcgtttggccgattatcgcaactacttcgtctacgagatcggcatgcgcgatgccgccggcaaccgcaccaccatgtcgaaccgggctctgcgcggctccggcggcgaggcgcaggcgccgttctacgtcgccatcgcggcctccctggcctcggcctactatcccggcgaccgaccgggcgacgagaatccggggctcggcctctgcctcctcgacgaggcgttctcgaagctcgacgtgcgcaactcccaagccctcgtcgacctctaccaggcgtggggcctgcagctcctcatcgccgcgcccgaggacaagcgcacgacgctcaccgaggtgatggacaccatcgtcaccgtctacaagagcccggacctgaagggcgtccgcatcgaatccgagcaccccctggaagcggccaagcgtgcgctcgccgccatcaacccggaacgccaggggatcgaggggtttcgcctgcccggtgcggctgcgtga

SEQ ID NO: 47847 - DNA, 1389 bp, Methylobacterium sp. Leaf113
atgctgttcacgcacctctccgacgacctgttcaagccgcttgcctcgccgagccgggccttcaacgcggccctgctgctgcacctgcacgcccgcgtcttcggcgacaccgccgagcccctgcgcaagagcgaactcctgggcgcgatcggcgacttcgcggcggatttcgtcgaccgggagatcgacgacgaggccgtgacgccggtcgagccgaatgaacgccgctccgtggtctaccggcggctcctcgatgccggatggctggtcgagcggcgcgagcgctacgttccggtggtcgaattcgaccctgaggcccggatggtgatcgaggaactcgcgcgcctcgaccggggcgagcggcgctcctacggcggcgccgtgctcgacgttctggggagcttggaaagcgccattgccaacccggccgagcgttccgaggccctggtcaacgcggcgaaatcggctcgcacgttcctcagccacctgcgcagcctcgccgggtcgatgcgcaagagcgaggaacgcatcctgcgcgaggcggaccagggcaccgccctgcggctctacttcgaggagttcgtggcacgccacctcgtcagcgattaccggacgctgcacacccgtttcaatccgttccgcttccggtccggaatcgtgcgcgaggcgggccgcgccctgcgcgatccactgaccctgcgggcgctgacggatgcgggcctgcgtgaggggagggcgcccgaccgggacagcgccgagcgggcggtccgcagcgacctcgccgaaatcctggcgatcttcgaagggctcgaccgccatctcgatgccgtcggcgatatcgtggcccggctcgaacgccgcatcgccgcgaccctgcgctacctcgatcatcgcgattccgaccgcatcgagcggaccgccgccgccctgcgggcggtcgccgggagcgacgacgtcctcaccggactgcccgacccgcaggtctcgctctttcgtccgccgatcggggagccgcattgctacaccccacgcctgcgccgggcacccatcgaatccgagcccctgccggagatcgagatcgaccccgtggtcgaagccttcatcgccgccaaagacgcctttcgcgagcgcgtcgcagtcaccccggaacgggtggtggcgttcatcgagggacggctcggccccgaacgcgccattcggggttcgcagatccggatcgcggacgtggacgatttcgtggtgttccagcgcctgcgcgagatcgacgtcctgttcgacggcacgctgcggggccgctaccggttgtcccgcgtcgagggccgcgtctcgaatggctggctcgactgcccggatttcctgctcgaacgcgcgccggcgttgcgacggtga

SEQ ID NO: 47848 - DNA, 651 bp, Methylobacterium sp. Leaf113
atgctcgaaccctttcgcgccatcctggatggcgaggaccctccgccgcccggcgcccgtgcgccctccgaggaggagctgacgcgcgcgctgcaggtgctgctgaagagccagtgcgtctatgccggcacgcccggcatcggccgctcctacgagctcgcacgccactacgcgcccttcttccaagcctatttcgcctgcctcggctacggcttcgaggtgatgcatcgcgaccagatggtatgtctgcgggtgccgcccgagggcatccgccacgatgcgcaggccgagcgcctgcgcaaggacgagaccctcgtgctgctcgccctgcgcctcgcttacgaggagggccttcgcgcgcaccgggtcacgaccgacggggtggtcgagtgcaccaccgacgacatcgtcgaatcgatccgcaccgccacgcgcagcgacccgcccgaggaggctcgcctgaccgagatcctgcgcctgttcgcgcgcaagggtgcgctgcggctgggcgagcgcgacaagatcgagaagatcacccccctgatggtcctgcccggcattgccgttctgtcacccgacgcctggatggaccaggttcgcgcctggggtgccgcgcggggcgacgacgagggcggaccggcgcaagactga

SEQ ID NO: 47849 - DNA, 3456 bp, Methylobacterium sp. Leaf113
gtgtatcgcctcaccgacatcgttctctcgaactggtacctgatccgccgcgagcagatccggatccggggcgcggctgcgctggtgggtccgacgggcgccggcaagtcgacgatcttcgatgcggtcggcacggtgctggccggcaacaacgccagccgcctcgccctcaacgcctcggcctccgggcgcagtgcgcggacggtgcgggactattgcctgggctggatcagcgatccggccgagggcggccgcccgacgcgggaagcctgcgagacgctgatcgtcctggtgttcgagaacgagaccacgggccgggtcgtctcggccggtctcgccctggcggcacgagccgaggacagccgcgaaaccacgctgtcgcgcttcgtccatgtgggccaccgcttcgagatcgcggattacgtgcgcgaggcgcccggcggcagcttcgtggcgccctgggccgagatcgccaaggatctgcgcacgcgcggcgagaccttcgacgagtaccgggcctccggcgagcgcttcaccgccgaactgctcgggatgctgcgcgagggcgcggcggtgcccgagccgcgccatttcctgcgcaccttctccaacgccgtcgcgttcaagccgatcttcgattcctcggccttcgtgcgctccttcgtgctcgaacccgagcccctggacgtcgcgcgcatccggcaatcggtcgagacctggcgccgcctcctcgagacgatcgaggaactggaacgccggctgtcgcacctcgcccgcatcctcgggcgctacgagacctgggccgaggcgagccttgcggcgtccctcggcgagttgcgggccgccgatgccgatctgcgccgccgcatcctcgatcacggcacggcgcgttcggttctgaaggatgtcgccgaacgcctgcgcatcgcccgcgaaagcgtcgccaccagccagggcttcgtgcgcgagatcgatggcgagatcgcgggcaagaaggcgctgctggccgggaccgccgccgagggacggctggccgcttcgaatgccgggctcgccatgctggcgcgcgaccggcgcgacctcgctgcccgtgtcggcgagctggtcgggatcgtcctcgatgccggcaagctcacggtgatcatcggcgagatccggaaggtctcgccggaggccgcgcgcctggtggaggcctgcgcccggtccggcctgcgccgggaggcgaacccggaggagacgctgcgctcggacgggccgctggccgccctcatcggcggcctcgccgggatgccggagatcacggcgccgctggaacggtccgcggaggatgcggcgctgcgcgcccgcgccctggagaacgaggcgcagacccgcgcgccggcgccgagcacgggtgggcgaggcgcggcaccgcggctgtcgtcggacgtcgccgccttccgcgaagagctcggccggctcggcatcgtggcgacgccggtctgcgagttggccgagatcaccgatccaaaatgggggcaagccctcgaaggcctcctgggcggcgcccgcgaggccctggtggtgcagccggaccgcctcaacgaggcgttcggccttctcgaagcgcgcaagagccagttctatcgctgcctcctggtgaagaccacggataccgcccgccgccggggcgggcgcgacgacgagggaccgctggcgctgatcgcgacggcggacccgcacgcgcaggccttcctcggagcgcgactcgggggctacgacctcgccccgaacgatgcggccctcgtacatatgagccgcgctgtcgcgccaagcgggcgatcgacctccggcatggcctactcggtggtgcgcccggtccagctgatgatgacccggggccatcgcgggccgaccgccgaaagccgccaggattgggagcaggcggttgccgaggcccgccgggcccgggcggaggccgacgtcctgcgcgaagccgcgcggattgccgccgctctgacgcgtcgcctgtccgaaacgaatctcgacctcgccgaactgcgcgccgaggcggacgcgctcgagggccgccgccggagcctgacgacggagcgggacagcgtcgagcgggccgagaccggcgtgctggaggcggaattggcggaactcgccaaggaacgttcggcctatctcaccgaactggtccaggtgctggagccgaaacgcgatctgctcctcggcgaggaggccggcctgaaggccaaggtggcgacgagccgcgaagcggcccgcgccgcgctccaggcccgtcggaccgcgtatcagcgctggaccgggggcgattcgatgcgcatccggctggtccggcccgagggcttcgacccggccgcgctggccaccctccgggccgagcgggccgaactcgattcgaaggcccttgggagccttgccaatgccgcccgcgcccgctctcgggacgcggcggagaccgcacggacgcaggtgcgcgccgccgagcgcgatctcgccgaatattgcgtgcagtggcgggtcgagaaccccctcggcaccggcgatgcccccgcctccttcggctatggctgggccaagcgcgcgcatgacgaggtcgcgggccacgagctgcggcgctaccgcgaccaggcgcggcgggcggagagcgagatgcgccgcctgatgatcgaggatctgctgacccgcctcgccgacaagttcgagcgggtgcgcgcccgcctcgacgccctgaacgagcgcctgtcgagccagaccttcacgggccagacctacgccttcgaggcggaggtggaccggcgctacgccgccgtccacgccctggcgaccgaggtggcgcgctcgccggatgccgcgcaggcgatcctgcccaacgaggacggcaccatcccggaaggcccgctctccaccgccatcgacgagatcacggccctgatcgccggggacgaaagcgcgacgcggctggccgattaccgcaactacttcgtctatgagatcggcatgcgcgaccgggcgggcaaccgcaccaccatgtcgaatcgggcgctgcgcggctcgggcggcgaggcccaggcgccgttctacgtggccatcgcggcctcgctcgcctccgcctattatcccggcgaccggcctggcgacgagaatcccggcctcggcctttgcctgctcgacgaggccttctccaagctcgacgtgcgcaacagccaggcgctggtcgatctctatcaggcctggggcctgcaactcctgatcgccgcgcccgaggacaagcgcacgaccctgaccgaggtgatggacaccatcgtcacggtgtacaagagccccgacctcacatccgtgcggatcgaggccgagcacccgctggaagcggccaaacgcgcgctggcggcgatcaaccccgagcgccagggtatcgaggggttccgggtcgacgctgccgagtag

SEQ ID NO: 47850 - DNA, 1464 bp, Microbacterium sp. Leaf320
gtgactggatccagggctgaggccgcgttcgcgcgtgccgtcaccgcattcagcacaccgaccctcgatctcctgcacggacggttcgccccgttcgtggtggcatcgctcacccttctgttcaacgcagaccgcgcctcggtcgcggtcgctgatgcccacgccgaactggccgaggtgctcgacgagctccgcgcagcggggtacgacgaggacgacaggaagctgccctcggggagcggacgtgacgtgtgccgcaactgggtgcgtctcggctggctgatccagcagatcgacgacgacgtcgaggtctatcgcctgtcggcccacgccgtcgccgcgctcgagatctcgggccgcaccggcggtgggcgcactcgagtgtcgaactcccgcgtccgcaccctgctggatgccgtggatcatctctcggtcagcgccgaggtcgacccggttcgtcgcctgtcacgactgcgcgcggagcgcgatctgctcgacgccgagatcgctcgcatccaggaaaccggacacgcggaccccacggacgacgaggagctcctcgaggaagcggagaacgtgctgcacctggcgcgcgagctccccgccgacttcactcgggtggccgagtcgctcagagcgatgcagcgcgacgtcgtcgcccacctccggagggacgagaggccgacgagcgaggtgctgcgcgagtacctccagcgtgcgcaggacgtgatgcagtcgaccccggagggacgcgccttcgcgggagccctgcgcctgatcggcgaccccgaccgcatcgacgccctcaccgagcagctccgcggcctgctcgaccagcccttcgcgcgcatgctcgacggcgcgcagcgtgccgagctcgatgcgatcgcgcgacgcgtggagctgggggtcgaggaggtgctggccgcgcagcgtcgcgcctcgcacgtgatcacgggtcaggtgaagacccacgatccgctgcgcgatcgtcagatcgacgacctcctccgtgacgtcatcgcagggctccacgggtggtccggtccgaccacagtcgtcgacccggtacgcagcatgccgctgatcgatctggggcatctccgtcagaccaccagcgacatccgtcctccgcgtgctccggcgcccctcgccgacgcggacgacgtcgacttcctcgatcacgacacgcgggcgtggggcgggccgcgctatgcggagctcgaggcgtacgtcgccgggctcgaggcagacttcgatctcgcagaggcgttcggggcggtgcctgacgcggccagacgccctgtcgacctcctcggtcttctcgagatcgcgcaccggaacggtctcaccgatggcgatgggatctcgacggtcgaagccctgagacccgacgggacgactcgccggttcgccttcggcaccgtgaccgcccgcagcacgaaagaagatgcagatgagtga

SEQ ID NO: 47851 - DNA, 660 bp, Microbacterium sp. Leaf320
atgagtgacgacgacctcaccacagccgtcgtggacgagggcttcatcgcccccacggcgatggaggacgacctcgaggcgcacttccccggtgaccgcggcacgctcgatccggagatcaggcgggtgctcgtgcacctgctccagcgccgcttcctctcgatggagcgcaaccgtcgcgagtggacgctgctgctcgagcaccagcaggtgatcgagtcgcgactcaatgacatctacctgcggctgatcatcgatcacgcacgaggattcgcgtacaagcagcagttgcgctccgatgaagtcgagatgcccgtgctgctgaaggattctccgtattcgcgagcggagacgctcgtgctcgtgcatctgcgaaccgtctaccagcgcgagtccgcatccggcgagggctccgtgcggatcgacatcgaagatgtcgagcagacggtcctcagctacttcgccgatgtcgacggcggaaccgcgaagcagcagcgggcgatccgcagcgcgctggaccggttggaccgagagggaatcgtgcaggaggagaccagcgggcggtatcggatcaccgctctcgtcgaggtggtgctcagcgccgagacgctcaaagagctgcgggagtggctgcgagcccaggcggtggtggcacgatga

SEQ ID NO: 47852 - DNA, 3360 bp, Microbacterium sp. Leaf320
atgaccatgatggacacgctcttcgggatgatccccgcgagctcccgcggccagcagtgggtcgccgaagagctgcagctcatcaactggggcggctacgacggtgggccgcaccgggtgcggttctcgcccgatgcgaccctgctgtgcggcggttcggggtctggcaagtccacgctcatggacggctacatcgccctcatgatgccgcacacgacgcccttcaacggtgcctcgaacggcggggtcacggggcgcccgcgcggcgaggagcagcggaacatcctgtcgtacggccggggcaagatcgacgagtcccgcaccgacgagggcaccaagctccgcgtgctgcgcggtgacggcgaggacacatggagcgccgtctcgatgacctggctggatcacgacgggtcgcgcttcacggcggtgcgcggctggtacatccccgcggatgcccggacgctcgaggacaccacgaggcttcgcgccacgatcgacggagccttcgatctcacgctcctcgagcgggccgtggctcagcgtctcaatgacgcgtcggtgcgcgccgtcggcctcgatccggtcgcgaccgatcgcgagttctccgcgcgcctgcacgcggtgctcggaatcggtgccgcaggatccggcgccaaggcgatcagcctcctcgcccggatccaggccggccagcagatcaccacggtcgacgacctgtacaagaagctcgtgctcgaggaacccgagacgatggcgaccgcggacgcggtggtcgctcacttcgacgagctcgagagcacgcgtacgaggatgctggtcgcgaagcagcaggtggcggccctcgagccgatccgggggatctccgagcgcatcgaggcggcttcgcagcggatgcgggtcgtggacgaggtcggggtcttctcggagccgacctcgctcgcggcgctgtggagcgctgaacgtcgtctcgacctcctgcgcgaggtggagaccgacctgcgcgaccggactcaggccctccagctggcggtgcgagagaagagtgccctcatcgccgctgccgaggtcgagcgtgaagggcttctggacgtgctgcgacagtcgggaggcgatcgcctggagactgctcagcgtgagctgcgcggcgttgagcgccggctcgaggacatccagcgcgagcggtcccgtttcgacgccgtcgcagccgagctcggcgcggaggtgcatgacgcggccggattcgaggacctgctcgcccgtctcggtcgagacctcccgcaggccggtctccgtgctgcgcgcgccgcattcgccgatgccgagtctgcgcgcagagctgctgcgagcgagctcgcccgggtgcaggccgaacgggagcgcgcgcgagaactccgcgggagcattcctgcgcatctggacgagtcgagagccctcctcgctcgggccgccgggctcgctccgacggatctgccgttcgtcggcgagctgatcgaggtgcgcaccgagttcgagccctggcgggaagcgttcaacctcgcgctcggcggattcgcacggacgctgctgatcgacgtcgcgaacctcggacgcttccgcgccgccatcgactccgtccgcaccgcagagcggatcagctacgaaggtgtgcacaccggtctcgtcgaatcgcggacggctgacccgcgaacgcttcccggtcgtctcgaccatcggtccaccccgttcacagggtggctccagcagcgcctccgtgagcggttcgagtacgtgtgcgtcgactcctcggccgagctcgccgagcatcctcgtgcgctcacgctcgcggggcaggtgtctcagggcgaccgagggtcgcatggcggtcacggacgcgcgaacctactcggattctcgaatgcgcgccgtctgcgcgagctcgacgaacagatcagcgagctggagagcagacgggatgctgcggcttccgcggctgccgaggcggaggccggtctcgaccggatcgaggccacagccaaggcgcacgcgaagatcgaggacctcacctgggatcagctcgatgtcgaggccgtgtctgcggaacgcgcgcgctggctcgcggtcgaggcggaggtcaccgacgagaacccgaagatcgccgagctgcgttctcaggccgaggagctccggaagcgggcaggccgtctgcgggatgagaactcccgtctcggcggcgacctcacggtcgcccaggatcgctgggtcgaggtgacggaccaggtcgacgcgtgccagcgcatcgtggatgcggcggaagcgtcggagatcgctctcgaggagcggcaccgttccttcctcgacgcgcgcttcctcggtgcggactcggccgtcagcgtcaccgcgtcggagcgactcgcccacctcgactccgcgttgcgcaccgcggcgaccaggctgctcgaggatcgcacgtcggctgctgcggcgcatgccgaccagcgcgagcagatgcgacgcctgatgacggggttcctcgagcgttgggacaccctgacgatcctggccgaccccgacgagtcggtcgccgagttcgagggcattctcgacgcgctcgagaccaacggcctgcacgagctggagtccgagtggcgagacagcctgctcaagctctccggcaacgatctgacgagtctcgattcgacgctcggtcgctcgctgcgcgagatcaagaaccgcatcgacccgatcaacaggatcatggaagaactgccgttctacgacgacgagcatcgcctgcagatcacgccgcgcgagaatcagtccgaggcgcgcaggcgattccgtcgggagctgcgcgaggtgcgcggcctcatcgacgcagccgcgacggatgcggatcgcgagagcgtctatcggaggatgagtcgcctgatcggccggatgcggcggaccgcgccggacttcgccgagctcatcgatgtgcgcaaccacgtcagggtgagtgccgaacggatccacgccaccacacgggagcacgtggccctctacgaccacatcggcgagaagtccgggggagagtcgcaggagctcgtcgcgttcatcgtcggggccgctctgcgatatcagctcggcgacgcgggggctgagcgtccgcgatacgcgccggtgttcatggacgaggcactcatcaaggcggacgcgcacttcacgaagcgtgcgatcggtgcgtggcggggtctcggcttccagctcgtgatcggcgcgccgaacgacaagtacagtgcgatcgaaccccatgtcgacgtggagtacgacatcctgaaggacactcgcgggcgctcgtgggcccggcccaaggtcggtctgcccgccgggaccgagtga

SEQ ID NO: 47853 - DNA, 1470 bp, Xanthomonas sp. Leaf131
atgaaggtccgcgcccgtatcgcacgctaccgcagcctgcgcgaagacccgttgtggaaattgctggccgccgaccatgcaccggaagtgatcggtctgctgcaggccttgctgctggacggagagcgtttgttgccggcagcggtgctgcacgagcgcctgcagcgcctgctcgacgacatcaacgccgagcagctggcgcgcgatttgccgcgcaccgcgcaggcgtacgtcgcccactggctggcgcagggctggctggagcgtcgcctgcccgagggcgcgcagcaggaagagtacgagctgtccacgcaggccgcgcaggcgatccgctttgtcgatggcctggagcatagtcgcggtgcagccaccgaaagccggctggcgctggtgatgcaacagcttgcccaactcgcggcattgaccgagaccaacccggatgcgcggttgtcggcactgcgcgacgagcgcgatcgcatcgatgccgaaatcgcgcgcgtgtcggccggcaaggtcgcctcgctggacggcaagcgcgcgctggagcgcacccggcaggtgatcgcgctggccgacgaattgaccgaagacttccgccgcgtgcgcgacgacttcgaacaactcaaccggcaatttcgcgaacgcatcatcgatgacgaaggcgagcgcggcgaggtcctgacccggctgttcgaaggcgtggatgtcatcggcgacagcgaagccgggcgcagctttcaggcattttgggcgctgctcaacgatgccgaacaaagcgcgcaactggatgcggcgctggagacggtgctggcacgcgcgttcgcacgcaagctcgatcgccgtgaacgcagcttcctgcgcgggctcaccggcaccatgctcgaacgcggtggccaggtgcacgatgtgatgcagcatttcgcgcgcagcctgcgcggtttcgtgcagagccgtggctatctggaacagcgccggctcaaccgcttgctcaaacaggcgcaggccgaagcgctgaccctgcgcgaacatatcccggcccagcgcctgatcggccgcagcttgatgttgaccaccagccggctgcgttcgctctcgcaatggcgcctgcacgacccgcgccagcaacaggtcgatggcagcatccagcgcaacgaggccgctgccatctcgctggacagcgtgggcgatctggtcgcgcaatcggagatcgatttccgcagcctgcggcgcgatctgttcgagctgctggacacccagccgcagctgtccatcgcccaggtgctgacccagcgccaggccacccagggcctgggcagtgtcatcggctatctatcgctgggcacgcgtcacggcgtcgtcagcggcgaccaattcgaagtggcgcaatggcgcggcagcgacggccaggtgcgtcgcgcgcgcattccgctgatctggttcacccaggagaaacgccatgaactggcatga

SEQ ID NO: 47854 - DNA, 705 bp, Xanthomonas sp. Leaf131
atgaactggcatgagcacgatcccgacgccgagtccgaactcgcccacgacgctgccgagggtcagaggcctgacgccgccagcaccggcctgttcgccggcgatactgggcaattgccggtggaggcgcgtcgcgcgctgtgtcagttgctcagcggtcccagcgtagacgcgcagcggcatagccgcctgtggccggccctgctgcgcagcgaagccggcatccgcagagccttggccgaagtgtttctggagctggtgctcgatcgcgaagccggcatcgccttcacccgccaggccgagaccggcgagctggaagcgccggtactgctgcgctcttcgccgctgaccttcatcgactcggtgctgctgctgcacctgcgccagcaactggccgaagccgatgcgcgcggcgtgcgtgcggtggtggaagaagcggcacttggcgaggcgctggccgtttacgaaaaaaacctgtccaccgatcgtgccggcttcctgcgccgggtagccacggcggtgcagaagatgaaggacaaccatgtcctgacccgtctgcgcggcgaagacgcacgctatgaaatctccccagcgctcaaactactgttctcggccgaagatgtcgccgccctggggcaggtctatcgtcagttgcgcgacggcccggccggcgacgaggacgaggccgaccccgcacacgcctag

SEQ ID NO: 47855 - DNA, 3393 bp, Xanthomonas sp. Leaf131
atgacctcctctgccgcgccttccagcctgttcgccaacgatctgcccgacgcgcgcctgcagcagttccgcatgcgccgcctgcaggtgcacaactggggcacgttctccggattgaccgaggtgccgatcgccgaacgcggctttctgttcgtcggccgctccggctcgggcaaatcgacgctgctcgatgcgatgtcggcactgctcactccgcccagcatcgtcgacttcaacgccgccgcgcgcgaggcagaacgcagtggccgcgaccgcaacctggtgtcgtatgtgcgcggcgcctgggccgaccagcaggacagcgcctctggcgaaatcgccacgcaatatctgcgcaaaggcgccacctggaccgcactggtgctggaataccgcaacggcgaggaccgcgtggtcagcctggtgcggctgttctggatcgccggcaacagcgcggccaccggcgacgtgcgcaagcactatatggtggccgagcgcgccttcgatgtggcgcaggacctggcaggcttcgatctggatctgcgcaagctcaagcagcggctgcacgatgtgcatcacttcgacagctttgccggctatgccgagcgttttcgccaccagttgggcatcggcaacgagatggcgttgcgcctgctgcacaagacccaatcggccaagaatctgggcgatctcaacgccttcctgcgcggcttcatgctggaagaacccaagaccttcgatgcggccgagcgcctggtcggcgacttcgccgaactcgacggcgcccaccatgccgtggtgacggcgcggcgccaggtggagaccttgctgcctgcgcgcgcgcaccacgccgagctgatgcaactgcgccgccagcgcaatgagctggaagaactcaagctcggcatcgacccctaccgcgagcagcgccggctagctctgctggacgcgcgcctgcaggaactggacgtgcaggaccgcggccttgccggcgaagaaggtcagcgccgcgccgccttggacaaccacacccgccatctggacgatctggaagcgcagcggcgcgcacaaggtggcgagcgcatcgatgcgctggagcgcgaacagggccagctgcagaccgagcgtgatcgccgcgcggccaagcgggcccaggccgagcaggcctgccgtgcactggagcaggccctggccgatagcgcgcacggatttgccgaacaggtcgcgcaagcgcgcgccgccctcgaagatagccagcgcgccgccgccgagctcgacgaagcgatcagcgagcgcatcgccggcaagcacgaggacagcaaacgctttgccgaagtgcgcgccgaaattgaggcgttgacgcgcaacccctccaatattcctgcgccgatgcagagcctgcgcgcacgcatgagcgccgacaccggcgtgccggaagcggcgctgcccttcgttggcgagttgatccaggtgcgcgaggaagcatctgcctggcgcggcgccatcgagcgcgtgctgcacggctttgcgcaatcgctgctggtggacgagcggcattacgccgaggtcgccgactgggtcaaccgcacccagctcggcacacgcctggtctattaccgggtacgtcacaacgagcaggcactgagcgggcgcgaacccggcagcgcctcgctgctgcacaagctggagctgcgcgatcacccgtttgccggctggctgcggcgcgagctgggcaagcgtttcgattacgactgcgtggactcagccaaggccctgcgccatgccgaacgcgcgatcacccgcgaaggccaggtcaagcatccgggcgagcgttacgaaaaagacgaccgccacgcggtgggcgaccgtcgccgctggctgctgggcttcaacaaccgcgacaagctggccttgtacgagcgcgaaggccaggagctggcacaacgcatcgccgcctgcgacgccgaggtcgccgacctgcgcgcgcgccgcgaacgcgatgggcagcggcgccttgcccgcaacaccctggccaacctgggctgggacgaaatcgatgtggccgccgcgctgcagcgcctgagccagatcgccgagaccctgcaacagctgcgcgaaggcgacgccaacctgcgcgcgctgggcgaggcgatcgaccgcacgcgcgccgacatcgctcaggccacgcgtacctacgagggcgtgcgcaccgagcggatcacgctgggcgccgaacgtacccgtctggaaaaacagcatctggaatgcgccgatgcgcatgcgcgcctggtcacgccgttgcagcagcagggcctggccgagcgcttgctcagcctgggtgagttgagcctggataacctgcaggaccgcttccgcacgctagagcgtggcctggacgcgcagcttggcgtcagcaaggacgaactgacccgcctgcagcaggccttgatcggatgtttccgccgctacttccagcaatggccggaagacagcggcgatctgagtccgacgttggaaggggctgacgattttctcgcccgcctgcagcggctggaacgcgatggcctgccgcagcacgaggcgcgctttttcgatctgctgcaaagccagagcaagaacaatctgctcgcgctgcagcggcataccgccgaggcgcgcaaatccatcgcccaacgcctggacgaggtcaatgccagcctggaacaggtgccgttcaatcacggcaccttgctgaccatcgagctcagtgatcgtcgtttgccggaagtgatcgagtttcatcaacgcctgcgcgatgtgctcggccatcatcagaccgaacagcgcgaggtggccgaacaacaatttgcggtgctgcgcgaactggtgcgcaagctgggctcggccgaaggcgaggacaagcgctggcgcgagctggtgctggacgtgcgcctgcatgtggagttcgttggcgtcgaattggacgcagccacgcgccaacaggtcgagatttaccgcagcggcgccggcaaatccggcggtcagcgtcagaaactggcaaccacctgtctggctgccgccttgcgctaccagctcggcggcgaagacggcgaactgccgcgctattgcgcggtggtgctggacgaagccttcgacaaggccgacaacgaattcactgcgctggcgatgaacatcttcgaaaacttcggcttccagatggtggtggccacgccgttgaaatcggtgatgacgctggagccgttcatcggtggcgcgtgctttgtcgagatcagcgggcggcacgattcgggcgtgttgctgatcgaatacgacgaacagtcgcgccggctcaagctgcccgagcgcacccgcagtgcagcggccaacaccactgcggtggccgagcaggagtga

SEQ ID NO: 47856 - DNA, 1182 bp, Xanthomonas sp. Leaf131
atggcgcgcgccgattgcatgctgttgccagctgccgcactgcaggcattgcgcgggcaatggcaacgccagcgtggcgactggttgatcggcgcatcggcgcccaggcccatcgtcctgcagccacccacccaggcgcaggccggcgcccgcttcgatgccttcggcgattggctgcgcagctggcagcgcgtcgacttgccggggcgggtggagtaccgcgatgtgctgtggtcgcagctggggccgcaacggctgccgcagacctgggtgctcgagacgccggccgatgcggcggcagcactgcaggagcacgaccgttggcaacgcgccagcgcgcgctgcgccagtttgcaggcgcattggccggaagctgcgggattggccgcgcgcttgcggcgccagttcgacttgctcgccgacagcgcgcaggccgatatcgaccggctggtcgccgtggtcgactggctgcatcgtcaccgcgacagcggcctgttcctgcgccagcttcccattgccggcatcgacagcaaatgggtgcacacgcgtcgcggcatcatcgccgactggctgggcgggctgcgtggcatcgccgagccgcgcagcttcgacagccttgccggcctgcgcagcgcacccgatcgggtgcgcctgcgactgctggatccggcgctgcgccggcagctcggcggcctggacgatctgagcgtgccgatcgaacagctggctgcgctgcggttgccgatcgaacgcgtactgattgtcgaaaatcttgaaaccggcctggcctgcgaaccgctggcgggcacggcgctgctgatggcgcgcggatatgccgtcgactacgtgcgcaacatcgaatggctgcgcacgctgccgttgttctattggggcgacatcgatacgcacgggctggcgatcctgcaccgactgcgcacgcatgcaccgcagaccgtggcgctgctgatggaccaggccacgctgctcgccacgccgcgcgccatgtggggccacgaaccccgacaacatcgcgcacatcggctcgccgcgctgacgccggacgagcagctgttttatgcgcgattgcgcagtggacacttcggcgccgcaccgcggctcgaacaggagcgcatcgcctggagtcaggcatggccgcagatccaggcggcgttgcgcggctag

SEQ ID NO: 47857 - DNA, 1458 bp, Arthrobacter sp. Leaf145
ttgtcccgttcagccatgtcctccgccgacgcaatcggcgcgaggctccgcgacctcgaacagctgaccaagggtcccgcgtgggccctgacgcgctcggcgccgtgggtcatcgccgtcctccaggcctcctttacccgcaccaggccgcagcttccgctcgaagagttccacgccgacgtcgacgctttccttgagcagctccggcgccaggatcctgcgcttggcggccagcagaacggcaagttgttcggtgacgaatggacgcgcaagcagttcctgacgcgacgcaaccagtcgggccggatcgtgtacgaggtcaccgagcccgcagcgcgtgtgctcgctttcctcgacagcctctccagcgaacgttccacactgaacggttcgaggctcggcacgctgctcggcgacgtggagaagctggccaacgaaacaaacccggaccagagcgcgcgcctggaggccctggaagaggaaatccacgagcgccagcagctggtggaggacatcagttccggcgaattcgacggcctccttgacgacgaagaagccgttgaagctgcaggtaacatccttgacctcgccgcaagcctgcccgcggactacaagaaaatgcgtgaccgtatcgaggaactggtgggggagctccgcaaccagatcatcgaagagtcgttgagcaagggcgcaaccatggcccaggttctggaggccgacaaacggctgcggcaaagccccgaaggacgtactttccgctccttcaccgccttccttgaggatccgcaacagcagctgcgtttccgctcggccatcggcgaggtgctgagcaggcagtttgcggacgatctctcccacgaggaccgcgaaacgctgaaaaacctcgtcgcggaactgcggtaccagcacagccagatccagcggatttacggaaagctctcggaaagtctcaacacctatatccagagcgacgacgtccggcagtcggttagtctccgcaaagtgctggccgaagccgaacaggccatccgttccctgccctacgaacgcgaccggcccggcctggtgcctggacctgtgctcttcaacgccgggttcgagtccttggccatggtcaagctgttcgacccggacgagttcgccacgcccccgcgcctggccgaccccatagcgttcagcgactcggacagggtccgttcggcccgcaccggcaaagcgcgccccgatgttgtgcgggcggccatggcaggctcggccacgttgggtgaggcctgggaaaacctgcccgcggaagaacggcacatcaacagcgtccggaccctcctgtccatggcattgcagaccggcgcggctttcgaccgcgccgcctgggaacacatcgacttcgaacaaatcgacggcagcatccgcaccgcgtacctgcctgtcgtcacgctgaatgaggattccaatgactga

SEQ ID NO: 47858 - DNA, 882 bp, Arthrobacter sp. Leaf145
atgactgaggacatcacgacgacggacattaccgaagctgagcaggacaccgttgcggaggacatcaccgaagcggagcaggacaccgttgaggtgcccgatgagaccgcccagcacccggacccgttccggatcacgccgcgggacactttcgtggacggtgccgcgctcttccccggcgacaccggcgtgctcccgatgaaagtccgccatgccctggtgaagctccttaaaggtccctacgttgacggtgcccgcgacgagaagctgtggacgaccctcctggacaaccagctgattctccggagccgcctctctgaactcttcctgacgctccagttggaccacgaccgcaagatcgctgtcctgcgacccgttgatccggaaatcatcggggcgagctcccggtccagcatcctccgccaacaacgtgctttgagccgcgttgaaaccatcgtgctgctccggctgcgcctcctcctggaccgccacgtcacagcccagaccgaccccacgatcacccgcgaagagatctccgacctcgtagcgaactacacccccgccggccaacaggatgccctgcgcgactccgacgtggtcacccgcaccatcaccaaactcctcgcccggcaacttctcctccccaccccgctggatgacacgtacaccatcagcaacgccctgccattggccctcccgttcgaaaacatcggcgacatcccggcccacatagaagccctcgtggcagtagcagcggacgaatccggcacggagcctttgctggatatagaagctgactccagccccacttccgaagacggggacgacgacgccggtaccgccgcggacagtgacccagcagcagaggaggcagccaagtga

SEQ ID NO: 47859 - DNA, 3474 bp, Arthrobacter sp. Leaf145
gtgaccatcgcaagcatgctcccgctcggcgagctcacgaatccgggccagatgcgtttggccctcgtccaggtggtcaactggggcaccttccatggcgcccacaccatgcacgtggaccgcaagggcacgctgctgaccggcaattccggtgtcggcaagtccacactctttgatgccatgctccgcgttttcgatgcccgcccgcggtcgaacgaggctgctgcccagcggtccggcggggctgtggaggacaagaggaccacgttcacctacatgcgcggcaaggtcggtgacaaggcggtcggggacagctcggccagtgccttccagcgccccggtgccacctggtccgccgtcgcgctgacgtttgataacgcagccggcacgaaagtgacggtgtcggcgctgttcgacctgccgaaaaacggcacggagtcgagcgttgggcgtttctatgtgatcgacagcaagcccctggacctcgaagcgatcgaggggatcgcgcagaagcggtttaccaggagtgccttggagtcgatcttcccggacggtcaggtgttcgacgtccacaaggcgttcgccgagcggttccggcggctcctgggtatcaactcggaccaggcgcttccgctgctgcgcgttatccaggccggcaagggcttgggcggcagcgtcaacacattcttccgggaccaggtgctggatgccccggccacgctggctgcggcggacgacgtcgtggaggaattcagcaacctgatgtcgatccggcagcggctggaggatgtccggctgcagcgcgaccagttggctccggtgccgggcctgaacaaggaatacgcccaggccttgttggacgccaaccgcctccgtgagttggccggcgaagagtttgaagcttacaagcagcagctcgctgtcacggtgcacgccaagacgttggcccgtttcaaggagttggcacagtccaaggcgcaggaactcgccgccgagcgtgtggtccgcgatgccctggccaaggagttgcgcgaccttgagctggactacaacaaccgcggtggcaacgccatttcggccattgagcagtcgttggagaacgccaaggttggcctgaagctgcgccagcaggttgaggactcggccaggaaggcgctggccgacgccgggctgaacctggaatggtccgccgagggctgggaccaggcgcacgagcaggccgccgcccgttcgattgagttgaaagacgattcggaggccttgaaagaactccgttttgaggcgttcgatggccacgcgaccaagaagcgtgagctggctgcggcccagcaggaactgttgtcgctgcggtcgcgcaagtccctgctgccgccgtcgagcattgaaaaccgggccgccatcgctgccgcgacaggcgtaccggaagaacggatgccgtttggcggcgagctgatcgacctcgcggaggggcaggaccagtggcggcccgcggcggagcgggccctgcgcaacctggccaccaccttgctggttccgggggagcactttgctgccgtcacgcgatacctgaacgacaacactgttcggggcgcgctgcgcgcggtggacgtctccaagccgcttgccggtggggcgctggctgtggaggacgtgtccgacggcgacctcttgacgaagttgagcatcctcacctcgggcgcaaacgccgacgccggggaatggatccgtgagcggatcgccttggactttgcgtatccgtgtgtcgaggacccggacgagcttgcctcgatggacaagggcctgagcctgggcggcgttgtgaagcggaaccggcacaccgttgagaaggacgaccggttcaccagccggcaggattacgtcctcggcttcgataacgcttccaagcttgaactcgtcgctgcccgcgtgggcgagctggagaatgagctggccaaggctgccgaactggcccaaagccgtgaggattcgcaccaaggcatggcccgccaactggaagccctgcggcgcgtggctgaagacgagcggccgtgggaacaggtttcggctgccgttgccgcggacgagctggcacggatagagcaacggctggtggatgctttggccgcccaggcggacctcgagccgttgcgtgccagcatcgaagccgtccgggaaaagcaccagtcctccacaggggtggcggctgtgctgcagagcgaatacaaagcgctcgaccacaagatgaccacggctgacgggctgttggatgcggcgaggctcaagcttgagcagtcaccgccgtcggcctctaccgtcaccgcgctggaaccgtacttcgacggcgtcgcggacgtctccgaactgtatgagctggacaacctggccaacagcgtccggaacaaactcctggacgagttgcacgcggccgaatcccggagccaggcgactgccgaacgcctgacgcgcatgttcgaagcgttcgtccgcgactgggggagcgccatcagcgccgaccacggcacctcaatcggtgccgcaggcgacttcgaagcccgctaccacgcgatcatgagcgatggcctgcccgcacaggaggccgagttcaggctgttcttcaaccaacgtacgcacgagtcgttcagtacgctcctgcaccttctcgatgaggaacggcgcagcatcaccagccgcatcctccccctcaacggcatcttgtccgaggtcaatttccacgagggaagcttcctggaactggacatcaagcagacgctgccggcaacggccaaggtcttcaaggacgccatccagaacgctttgaaaaccaaacacacacggccctcgcgcggcgcttcggccgctggttccgccgaaacggacgacgacgccgagctcaccgcccggtataaatcgctggaaacgctggtgaagcggctcggatcgcaaacgccggaggatcgacgttggcgtgccgaagtgctggacgtccgtggacacgtcttcatccagtgcaaggaacaccgcgaggtggcaaagcaagggaaggccggcgcatccaaaaccggcaagaagaaaaccgaagtcttcatgcacgccgacaccggctccatgtcaggcggtgagcgccaacggttcacggccttcatcatggctgctgcattgagctaccagttgggcatcgccgagcagggcttcaccacctacggcaccgtgatgatggacgaagcgttcgtgctggcctcggaggagttcgcgggtgcgggcatcaaggcactccacgaattcggcttccagctgttgctggccgcgcccgaaaacgtcattgacctgtcacggcacctcggctccgtcacggagatcctgcgggacaagcggaccaaccgctcgggcgtcctcacggctcccgttatcgcagggccgggcgaacccggcgcatggcgatccgaagccaacccggtggacatcgtcctgcgctag

SEQ ID NO: 47860 - DNA, 1470 bp, Xanthomonas sp. Leaf148
atgaagcaccaggcacggattgccggctaccgccagttgcgcgaccagccggcgtggaaattgctcgccgccgatcacgccccggagctgatcggcctgctgcagaccctgttgctggacggcgagcgccggctgccgtcggcggtgctgcatgcgcgcctgcagcatcagctggatgcattgcgcggcgatgaactctcgcgcgagttgccgcgcaccgcgcaggcgtatctggcgcattggctctcgcagggttggctggaacggcgcctgcccgaaggcgcggccgaagaggactacgaactctcgcgtgcggccacccaggccattcgcttcatcgcgagcctgcgcgagagcggcagcagcgccaccgaaagccggttgtcgctggtgatcgagcaactggtacaactggccggccagaccgaggccgacccggcaacgcgcctggctgcgctgcgcgaagaacgcgaccgcatcgatgccgagatcgagcgcgtagcggccggccgggttgcggcactggacggtaagcgcgcgctggagcgcacccgcgacctgatccatctggccgacgaactggccgaagacttccaccgcgtgcgcgatgacttcgagcagctcaaccgccagttccgcgagcgcatcatcgatgacgaaggtgcgcgcggcgatgtgctggagcagttgttcagcggcgtggacgtgattgccgacagcgaggccgggcgcaccttcgaggcgttctggagcctgctcaacgacacccagcagagcagccagctggacaacgcgctggacgcgctgctcgcacgcggcttcgcacgcaagctggaccgccgcgaacgcgctttcctgcgtgggctcaccggcacgctgctggagcgcggcggcgaggtgcacacggtgatgcagcacttcgcgcgtagcctgcgcgggtttgtgcagagtcgcggctatctggaacagcgccgcctcaatcaattgctcaagcaggcgcagggcgaagccctgcagctgcgcgacagcctgcacgccaccgccgccaccggctacacgcaggcgctgagcgccagccgcctgcgctcgctgtcgcagtggcggctgcacgatccacggctcacccaggtcgatggccgcgtgtatgccgcagacgcggcagagatctcgctggacagcgtgggcgacctggtcgcgcaatcggagatcgatctgcgcaccctgcgcaacgatctgtacgtgctgcttgggcaacagccgcggctcaccattggcgatgccttgcagcaacgcccggccgcgcaggggcttggcagcgtgatcggctatctgtcgctgggcacgcgccatggcgtggtgatcgacggccacatggaaatggtgcaatgggaaggcggcgacggcatcttgcggcgcgcgcgcattcccttggtgtggtttacccgggagaaacgcaatgaactggtctga

SEQ ID NO: 47861 - DNA, 705 bp, Xanthomonas sp. Leaf148
atgaactggtctgagcaggccccgctggatgcggacgacgacaacgacgacgcccgcgatgccgcattgacgctgccggcgagcgatgccgccaacgccgcgtcgggtggcgcactgttcctgggcgacaccggcacgctgccgttcgatgcacgccgtgcgctgtgtcagctgttggccggtcccagcatcgacgcgcaacggcacggcagcttgtggccggcgctgctgcgcaacgaagcggcagtgcgccaggtgttgtgcgagctctttctgcaactggtgctggaccgcgaaggcggggtggcgttcacccgtcaggccgacaccgccgaactggaatcgcccagcttgctgcgcagcgcgccgctgaccttcatcgagtcggtgctgctgctgttcctgcgccagcaactggccgaggccgatacgcgcggcgaacgcgcggtggtggacgagacgcagctggtggaggcgttgtcggtgtacgaaaagaacgtgtccaccgacaaggccgggttcacgcggcgggtgatgacggcgatcggcaagatgcgcgacaaccagttgctgtcgcggttgcgcggcagcgaggagcgttacgaggtgtcgccggtgttgaagttgttgttctcggcggaggatgtgcaggcgttggtggtggcgtatcgggagttgcgagagggggaggttgcgttggagtga

SEQ ID NO: 47862 - DNA, 4005 bp, Xanthomonas sp. Leaf148
atgaattcccagtccaacctgtcgccggcgtcgccgggtgcttccttgtttgccgagacgctggccgagcagcgtgcgcagcagttccgcatgcggcgcttgcaggtgcataactggggcacgttcaacgggttgaccgaggtgccgatcgccgagaagggttttctgttcgtcgggcgctcgggttcgggcaaatccaccttgctggatgcgatgtcggcattgctgacgccaccgagcatcgtggatttcaacgcggccgcgcgtgaagccgagcgcagtgggcgcgaccgcagcctggtgtcgtacgtgcgcggtgcgtgggccgatcagcaggacagcgcctccggcgagatcgccacccagtacctgcgcaagggcgcgacctggacggcgctggtgctggaataccgcaacgcgcagggcgaggcggtgagcctgattcggctgttctggatcgccggtagcggcaatgccgcggccgatgtgcgccgccactacatggtggccccgcgcagcttcgatgtggccagcgaactggatggcttcgacctggacctgcgcaagctcaaggcgcgccttggcgaggacgtggcgcatttcgacggctttgccggctatgccgaacgcttccggcatgcgctgggtatcagcaacgagatggcgctgcgtctgctgcacaagacccagtcggccaagaatctgggcgatctcaatgccttcctgcgcgggttcatgctggatgagccgcgcaccttcgaagccgccgaccgactggtggaggacttcgccgagctcgatggcgcgcaccacgccgtggtcaccgcgcggcgccaggtggaaacgctcagcccggcacgcgcgcaccatgccgcgctgatggacctgcgccgcagcgtcggtgagctgcgtgagctgcagctgggcgtggacagttaccgcgagcagcaacgcgtcgccttgctgcaggcgcgcctgctggaactggacagccaggaccgcggcctggccggcgaagaaggccagcgccgcgaatcgctggacaaccacgagcagaaactggccgggctggaacgcgagcaacgcgccgccggtggcgagcagatcgaagaactcgaacgcgagcgtgtgcgggtggagcgcgagcgcgacgagcgcctgcgccgccgcgcgcagatcgaacaggcctgccgccagctcggtactgcgctggcagccggcgccagcggctttgccgcgcaggtggcgcacgcccagagcgtgctcgatggcggcaaacagcacgccagcgcgctggacgaggccattgccgagcgcatgggcgagcgccgcgacgacgagcgtcgctttgcggacatccgtagcgaactcgatgcgctgaagaaggcgccgtccagcctgcccgcaccgatgcaggcactgcgcgcgcgcttgtgcgaagacaccggcatcgccgaatccgcgctgcccttcgtcggcgagctgctgcaggtgcgcgccgaccaggtggcctggcgcggcgcgatcgaacgcgtgctgcacgggtttgcgcagtcgttgctggtggacgagcggcattacgcgcaggtcagcgaatgggtcaaccgcacccacatcggcacgcgcctggtgtacttccgcgtgcgtcgcaacgacgaactgcattcgcggcgggtcgatcctgatgcgctgcctggcaagctgcaactgcgcgagcacgctttcaccgactggctgcgcaacgagctgactcgccgcttcgattacgcctgtgtggacaacgccgccgcgctgcgcaatgccgaccgcgccatcacccgcgaagggcaggtcaagcatcccggcgatcgctatgaaaaggacgaccgccacgccgtcaacgaccgcaagcgctggctgctggggcacgacaaccgcgacaagctcaaggtgttcgaacgcgaagcgcaggcgctcgcgcagcgcatcgccagctgcgaagccgacgtggccgcgctgcgcaagcaacgcgagcaggaccaggaaaaacagctggccgcgcacacgctggtggagcgcgactgggacgagatcgacgtcggccccaagctgcaacgcctgaccgatatcgacgaacaactgcagcaactgcgcgaaggcgacagcggcctgcgtgccttgggccaggccatcgagactgcgcgtaccctgcgcgatcaggccaagcgcaccttcgaggacgtgcgcctggaacgcgcacagctggcgcgcgagcgcgtccgcctggagcagcagcaggccggcggcgcaggccgtgccggcaccgccgcgctcactcccactcagttgcagggcctgcacgaacgcctggccgcgctggcaccgctgtcgctggacaatctggaagcgcactttcgcgtggtcgaacgcggcctggccgagcagctggccgaaagccagggccgcgacagccggctcagcgcgcaattgctcgaatgcttccgccgctactgccagcagtggcccgaagacagcggcgacttcaccgtgagcctgtccagcgccgacgatttccttgcgcgcctggaccggttggaaagcgacggcctgccgcgtcacgagcaccgcttcttcgatttgctgcagacccagagcaagaacaacctgctcgccctgcagcgccacaccgccgaagcccacaagggcatcaagcagcgcatggacgaagtcaacgccagcctggagcaggtgccgttcaaccgcgacaccatcctgaccatcgaggtcagcgaccgccgcctggccgaggtgcaggaatttcagcagcagctgcgcgccgtgctatcgcatcagcagaccgaagaccgtgcgctggccgaggcgcagttcgccaccttgcgcaccttggtggcgcgtctgggcgcgcaggagccggaggcgcgacgctggcgcgaacaggtgctggatgtgcgcctgcatgtggaattcatcggcgtggagctggacgcgcagagccgtgcgcaggtggagatctatcgcagcggcgccggcaagtccggcggccagcggcagaaactggcgactacctgcctggcggcagcgttgcgctatcaactcggtggcgaagatggcgaactgccgcgctattgcgcggtggtgctggacgaagccttcgacaaggccgacaacgaattcaccgcgctggcgatgaacatcttcgaaaacttcggcttccagatggtggtggccacgccgttgaaatcggtgatgacgctggagccgtttatcggtggcgcatgctttgtggaaatcagtggccgccacaactccggcgtgttgctgatcgagtacgacgaacaggcgcagcggctgaaattgcccgagcgctcgcgtggcgaggaacccgcggcctcgcaggccgagccgccagccacggcggcgcagcaacgccacgtagcggcggtgagcgatgcaccgtcagaccgcgaggcagacgagcaggcgacagcgggcgcggcgatcgctgcaccaactgaagccgtagtcgcggcagcgacgcgtcgtggcaagggcaagccggccactgcagcgacttcttccgcgccggtgtctgcaccccgcagcacgcgtgcggcaggcccaacgcgcacggcagccacggcagacggcgctgcatcagccaagcgcacatcggcggtgtcgggcgcacgccgcacccaggctgcaacgccgggcaagttgcccaaggccgctgcaaaacccgctgccaagccggcgctcaagcgcccagctgccgctgccaagcctgccgccaagtcgacatctgctgctgcagctacagctcgcaccgtcaaaccgacgtccagccccacgcgtgccgccaaggcgccagcaggcgcagccaaggtcgcctcatcgcggcgcacgtcaggcaagcaggccgcaacgccagcgtcagcggcatccaccaaggcgcggcccgcaccggcgcgtggtgcggcatcgaaggcacgcagcaaacgctga

SEQ ID NO: 47863 - DNA, 1464 bp, Microbacterium sp. Leaf159
gtgactggatccagggctgaggccgcgtatacgcgtgccgtcaccgcattcagcaccccgaccctcgatctcctgcacggccggttcgccccgttcgtcgtggcgtcgctcacccttctgttcaacgcggaccgggcctcggtcgcggtcgcggatgcgcacgccgaactggccgaggtgctcgacgagctccgcgcggcggggtacgacgaggacgaccggaagctgccctcggggagcggacgcgacgtgtgccggaactgggtgcgtctcggctggttgatccagcagatcgacgatgacgtcgaggtgtatcgcctgtcggcccatgcggtcgccgcactcgagatctcgggccgcaccggcggagggcgcactcgcgtgtcgaactcgcgcgtccgcaccctgctggatgccgtggaccatctctcggtcagcgccgaggtcgacccggttcgtcgcctgtcgcgactgcacgccgagcgcgagctgctcgatgccgagatcgctcgaatccaggagtccggtcacgcggaccctgcggacgacgaggagctcctcgaagaggcggagaacgtgctgcacctggcacgggaactccctgcggacttcacgcgagtcgccgagtcgctcagagcgatgcagcgcgacgtcgtcgcgcacctccggagggacgagaggccgacgagcgaggtgctgcgcgagtacctccagcgcgcgcaggacgtgatgcagtcgactccggagggacgcgccttcgcgggagccctgcgcctgatcggtgaccccgaccgcatcgacgccctcaccgagcagctccgcggccttctcggcctgcccttcgcccgcatgctcgacggcacgcagcgtgccgagctcgacgcgatcgcgcgacgagtggagctgggggtcgaggaggtgctggccgcacagcgccgcgcctcgcacgtcatcaccggacaggtgaagacccacgatccgctgcgcgatcgtcagatcgacgacctcctccgagacgtcatcgcaggactccacgggtggtccggccccgcaaccgtcgtcgacccggtgcgcagcatgccgctgatcgacctcgggcatctgcgtcagaccaccagcgacatccgtcctccgcgtgctccggcacccctcaccgacgcggatgacgtcgatttcctcgatcacgacacccgcgcgtggggcggtccgcgatatgcggagctcgaggcgtacgtcgcaggcctcggcgcggacttcgatctcgccgatgcgttccgcgcggtgcctgacgcggctcgacgccccgtcgatctgctcggtcttctcgagatcgcgcaccggaacggtctcaccgacggagacgggatctcgacggtcgaagcgctgcgacccgacgggacgactcgtcgattcgccttcggcaccgtgaccgcccgcagcacgaaagaggatgcagatgagtga

SEQ ID NO: 47864 - DNA, 660 bp, Microbacterium sp. Leaf159
atgagtgacgacgacctcaccacagccgccgtggacgaggggttcatcgcccccacggcgatggaggacgacctcgaggcgcatttcccgggcgaccgcggaacgctcgaccccgagatcaggcgagtgctcgtacacctcctccagcgccgcttcctctcgatggagcgcaaccgacgcgagtggacgctgctgctcgagcaccagcaggtgatcgagtcgcgactcaacgacatctacctgcgtctgatcatcgatcacgcccgcggattcgcgtacaagcagcagttgcgctccgatgaggtcgagatgcccgtgctgctgaaggactctccgtattcacgtgccgagacgctcgtcctggtacacctgcggaccgtctaccagcgcgaatcggcgtccggcgagggctccgtgcggatcgacgtcgaggacgtggagcagacggtcctcagctacttcgccgacgtcgacggcggcaccgcgaagcagcagcgggcgatccgcagtgcgctggaccggttggaccgagagggcatcgtgcaggaggagaccagcggacggtatcggatcaccgctctcgtcgaggtggtgctcagcgccgagacgctcaaggagctgcgggagtggctgcgagcccaggcggtggtggcgcgatga

SEQ ID NO: 47865 - DNA, 3360 bp, Microbacterium sp. Leaf159
atgacgatgatggacacgctcttcgggatgattcccgcgagctcccgcggccagcaatgggtcgcagaagaactgcagctcatcaactggggtggctacgacggcgggccgcaccgggtgcggttctcttcggatgcgaccctgctgtgcggtggttcgggatcgggcaagtccacgctcatggacggctacatcgcgctgatgatgccgcacacgacgcccttcaacggcgcctcgaacggcggggtcacgggacgcccgcgcggtgaggagcagcggaacatcctctcgtacggtcgggggaagatcgacgagtcccgcaccgacgagggcacgaagctccgcgtgctgcgcggtgacggcgaggacacgtggagcgccgtctcgatgacctggttggaccacgacggctcgcgcttcacggcggtgcgcgggtggtacatccccgccgacgcccgaacgctcgaggacaccacgaggctgcgcgccacgatcgagggggccttcgacctcacgcatctcgagcgcgccgctgggcagcgactgagtgacgcatcggtgcgcgccgtcgggctcgatcccgtcgcgaccgatcgcgagttctcggcgcgcctgcacgcggtgctcggcatcggcgccgcaggctccggggcgaaggcgatcagccttctcgcccggatccaggccggccagcagatcaccaccgtcgacgacctgtacaagaagctcgtgctcgaggaacccgagacgatggcgaccgcggacgcggtggtcgctcacttcgacgagctggagagcacgcgcacgcggatgctggtcgccaagcagcaggtggcggctctcgagccgatccgagggatcgcgcagcgcatcgaagcggcttccgagcggatgcaggtcgtcgacgaggtgggggtcttctccgagtcgacctcgctcgcggctctgtggagcgccgagcgtcgtctcgacctgctgcgcgaggtggagacggacctgcgcgaccggacccaggcgctccagctggcggtcagagagaagaacgccctcatctccgctgcagaggtcgagcgcgaggggcttctcgatgtgctgcgacagtcgggaggcgatcgcctggagaccgctcagcgtgagctgcgcggcgtcgagcgccgcctcgaggacatccagcgcgagcgggcccgtttcgacgccgcggcggccgagctcggcgccgaggtgcacgacgccgccgggttcgaggacctgctcgcccgactaggtcgcgaactcccgcagacgggtgtccggggtgcgcgcgcggccttcgcggacgctgagaccgcgcgccgatcggccgcgacggagcttgcccgagtgcaggccgagcgggaccgcacgcgggagctgcggggaagcatacctgcgcatctgcacgagtcgcgggccctgctcgctcaggccgccgggctcgctccgacggatctgcccttcgtcggcgagctgatcgaggtgcgcaccgagttcgagccgtggcgcgaggcgttcaacctcgcgctcggcggattcgcacgcacgctgctgatcgatgtcgagaacctcggacgcttccgcgccgccatcgacaccgtccgcactgccgagcgcatcagctacgaaggcgtgcacaccggtctcgccgagtcgacgacgtcggacccgcggacgcttcccggtcgtctcgatcaccggtcgaccccgttcaccgggtggctccagcagcgactccgcgagcggttcgactacgtgtgcgtcgactcgtcggccgagctcgccgagcaccctcgtgcgctgacactcgcgggacaggtgtcgcagggcgaccgcggctcgcatggtgggcacggccgcgcgaacatgctcgggttctccaacgcacgccgtctgcgcgagctcgacgagcagatcagcgaactggagaaccggcgggatgcggcggcctcggcggccgtcgaggcggagggcggcctcgacaggatcgaggccgcagcgaaggcgcacgcgaagatcgaggacttcacctgggatcagctcgacgtcgaagccgtcaccgccgagcgcgcgcgctggctggcggtcgaggccgaggtcaccgacgagaacccgaagatcgccgagctgcgtgcgcaggccgaagagctccggaagcgtgcgggccgtctgcgtgatgagaactcccgtctgggcggcgatctcacgctcgcccaggaccggtgggtcgaggtgacagaccaggtcgacgcctgtcagcggatcgtcgatgcggcggaagcgtcggagatcgcggtggaggagcggcaccgttccttcctcgacgcgcgcttcctcggtgcggactcggccgtcagcgtcaccgcgtcggagcgactcgcccacctcgactccgcgttgcgcaccgcggcgaccaggctgctcgaggatcgcacgtcggcagctgccgcgcacgccgaccagcgggagcagatgcgacgcctgatgacggggttcctggaacgctgggacacgctgacgatcctgcccgacccggacgagtccgtcgccgagttcgaaggcattctcgaggcgctcgagaccaacggcctgcacgagttggaatccgagtggcgagacagcctgctcaagctctccggtaacgatctgacgagtctcgattcgactctcggccgctcgctgcgtgagatcaagaaccgcatcgacccgatcaacaggatcatggaggagctgccgttctacgacgacgagcaccgcctgcagatcacgccgcgcgagaaccagtccgaggcgcgcagacggttccgccgggagctgcgcgaggtgcggggcctcatcgaggcggcgacgacggatgccgatcgcgagagcgtctaccggaggatgagtcgcctgatcggccggatgcggcggaccgcaccggacttcgccgagctcatcgatgtgcgcaaccacgtcagggtgagtgcggagcggatccacgccacgaccagggagcacgtggcgctctacgaccacatcggagagaagtcgggcggagagtcgcaggagctcgtcgcgttcatcgtcggcgccgcgctgcgatatcagctcggcgacgcgggggccgcgcgtcctcggtacgcgccggtgttcatggacgaggccctcatcaaggctgacgcccacttcacgaagcgtgcgatcggcgcttggcggggtctcggcttccagctcgtgatcggcgcgccgaacgacaaatacagcgcgatcgagccgcacgtcgacgtcgagtacgacatcctgaaggacacccgcggtcgctcctgggcccgtcccaaggtggggttgccggcagcgggcgagtga

SEQ ID NO: 47866 - DNA, 1464 bp, Microbacterium sp. Leaf161
gtgactggatccagggctgaggccgcctacgcgcgtgccatcaccgcattcagcaccccgacgctcgatcttctgcacggtcgattcgccccgttcgtcgtggcgtcgctcacccttctgttcaacgccgaccgggcgtcggtggcggtggcggatgcgcatgccgaaatggccgaggtgctggatgagctccgcgcggcggggtacgacgaggacgacagaaggctgccttccggcagcggacgcgacgtgtgccgcaactgggtgcgcctcggctggctgatccagcagatcgatgacgacgtcgaggtctatcggctgtcggcgcacgccgtcgccgcgctcgagatctcgggccgcacgggcggagggcgcacgagagtgtcgaattcccgtgtgcgcaccctgctcgatgccgtggagcacctctcggtgagcgccgaggtcgacccggttcgtcgtctgtcccggctgcaggcggagcgcgacctgctcgacgccgagatcgcccgcatccaggaatccggccacgcggagcctgtggatgacgaggaactcctcgaggaggcggagaacgtccttcatctggcgcgcgagctccccgccgacttcacgagggtcgcggagtcgctccgagcgatgcagcgcgacgtcgtcgcccatctccggagggatgagcggccgacgagcgaggtgctgcgcgagtatctccagcgcgcccaggacgtgatgcagtcgaccccggaggggcgtgccttcgcaggtgccctgcgcctgatcggcgaccccgagcgcatcgatgccctcaccgagcagcttcgcggactcctcgaccagcccttcgcgcgcatgctcgacggcacgcagcgtgccgaactcgacgcgatcgcgcgacgcgtggagctgggggtggaggaggtgctggccgcacagcgccgcgcctcgcacgtcatcaccgggcaggtgaagacccacgacccgttgcgtgaccgtcagatcgacgacctcctccgtgacgtcatcgcaggactccacgggtggtctggtccggccgcggtcgtcgatcctgtgcgcagcatgccgcttgccgacctcgggcatctccgtcagacgaccagcgacatccgcccgccgcgagctcccgcaccgctcacggatgcagacgacgtcgacttcgtcgatcacgacacccgtgcctggggtggtccgaggtatgccgagctcgaggaatacgtcgccggtctcggcgcgcagttcgatctcgccgaggcgttcggggcggtgcccgacgcggctcggcgtccggtcgatctcctcggcctgctcgagatcgcgcaccgcaacggcctcgcggacggcgacgggatctcgacggtggaagcgctgaggcctgacgggacgactcgccgcttcgccttcggcgccgtgatcgcccgcagcacgaaagaggatgcagatgagtga

SEQ ID NO: 47867 - DNA, 660 bp, Microbacterium sp. Leaf161
atgagtgacaacgacctcaccacggccgtcgccgatgagggattcatagcccccacggcgatggaggacgacctcgaggcgcacttcccgggtgaccgcggcacgctcgaccccgagatcaggcgtgtgctcgtgcatcttctgcagcgccgcttcatctcgatggagcgcaaccggcgtgagtggacgctgctgatcgaacaccagcacgtcatcgagtcgcggctcaacgacatctacctgcggctgatcatcgatcatgcccgcggattcgcgtacaagcagcagctgcgctccgatgaggtcgagatgccggtcctgctgaaggattcgccgtactcgcgggccgagacgctggtgctggtgcacctgcgaaccgtctaccagcgcgagtccgcatcaggcgaggggtccgtgcggatcgacatcgaggacgtcgagcagaccgtcctcagctacttcgccgacaccgacggcggaaccgcgaagcagcagagggcgatccgcagcgcactggaccgactggaccgagagggcatcgtgcaggaggagaccagcgggcggtatcggatcaccgcgctcgtcgaggtggtgctgagcgccgagactctcaaagagctgcgggagtggctgcgggcccaggcggtggtggcgcgatga

SEQ ID NO: 47868 - DNA, 3360 bp, Microbacterium sp. Leaf161
atgacgatgatggatacgctcttcggaatgatccccgcgagctcccgcggccagcagtgggtggccgaggagctgcagctcatcaactggggcgggtacgacgggggggcgcaccgggtgcggttctcgccggatgcgaccctgctgtgcggtgggtcggggtctggaaaatccacgctcatggacggctacatcgccctgatgatgccgcacacgacgccgttcaacggcgcctcgaacggcggtgtcacggggcgtccgcggggcgatgagcagcgcaacatcctgtcgtacgggcgcggcaagatcgacgagtcccgaacggacgagggcacgaagctccgagtgctgcgcggtgacggcgaggacacctggagcgccgtctcgatgacctggttggatcacgacggctcgcgcttcacggcggtgcgcgcgtggtacatccctgcggacgcgcgaacgctcgaggacaccacgagagtgcgagccacggtcgacggcgcattcgacctcgcgcagctggagcgcgccgcgactcaccggctcaccgacacgtcggtgcgagcggtcggactggatcccgtcgccaccgaccgcgagttctcagcccggctgcacgccgtgctcggcatcggcgcggccggctccggggcgaaggcgatcagtcttctcgcccgcatccaggcggggcagcagatcaccacggtggacgatctgtacaagaagctcgtgctcgaggaacccgagacgatggcgaccgcggacgcggtggtcgctcacttcgacgagctggagagcactcgcacgcggatgctggtcgccaagcagcaggtggcggctctcgagccgatccgcgggatttcccatcgcatcgaggaggcatcggagcggatgcgggtcgtggacgaggtcggggtcttctccgagtcgacctcgctcgcggctctctggagcgccgagcgtcgtctcgacctgcttcgcgaagtggaggcggatctccgcgacagaacccacgcgctccagctggccgtgcgtgagaagaacgccctcatcgccgccgcggacagcgagcgcgagggtcttctggacgtcctgcggcagtccggaggcgatcgcctcgagaccgcccagcgcgaactgcgcggcgtcgagcgccgcctcgaagacgtccagcgcgagcggtcccgtttcgacgccgtcgccggcgagctcggcatcgaggtgcacgacgcggccgcgttcgagagcctgctgacccgtatcggacgggagctcccgcaggcagggatccgaggcgcccgcgccgcgttcgccgacgccgaatccgctcgcagagcggtggagactgagctcgcgcaggtgcgtgccgagcgagaccgcacccgagacctgcgggggagcatccccgcacatctgcacgaatcgagagccctgctcgctcaggccgccgggctcgctccgacggatctgccgttcgtcggcgagctgatcgaggtgcgcaccgagttcgagccgtggcgagatgcattcaacctggcgctcggcgggttcgcacggacactgctcatcgacgtctcgaacctcggacgattccgcgcggccatcgactcggtgcgcaccacggagcggatcagttacgagggagtgcacaccggtctcgccgagtcgcggccggccgacccgagaacgcttccgggtcgactcgagcatcggtcgacacctttcaccgggtggctccagcagcgactccgcgagcggttcgagtacgtctgcgtcgattcctcggccgagctcgccgagcatcctcgcgcgttgacgatcacgggacaggtgtcgcagggcgaccgggggtcccacggcgggcatggccgcgcgaacctgctcggattctcgaacgcacgccgtctgcgtgaactcgacgagcaggtcaccgagctcgagatccgacgtgatgccgcgtcctcggcggctggcgaagcggaggcggccctggaccggatcgaggccacggcgaaggcgcacgcgaagatcgaggatctcgcctgggagcagatcgacgtcgaggcggtttcggcggagcgcgcgcgatggctcgcggtcgaggcggaggtcacggtcgagaacccgaagatcgccgagttgcgttcgcaggccgaggaactcaggaagcgggcaggtcgtctgcgtgacgagagcgcccgtctcgggcgtgacctgacgctcggccaggaccgctgggtcgaggtgaccgaccaggtcgacgcctctcagcggatcgtcgatgcggccgaggccgctggtatcgcgctggacgagcggcaccgttccttcctcgacgcacgcttcctcggcgcggaggcttccgtcagcgtcacggcatccgagcgactcgcccacctcgacgccgcgttgcgcactgccgcgacgaggctgctcgaggaccgcacgtcggcagccacggcgcacgccgagcagcgcgagcagatgcgacgcctgatgaccgggttcctcgagcgctgggacaccctcacgatcctccccgaccccgacgagtcggtcggggagttcgaggggatcctcgatgcgctggagaccaacggcctgcacgagctggagtccgagtggcgtgacagccttctcaagctctccggaaacgatctgacgagtctggactcgacgctcggccgcgcgctgcgtgagatcaagaaccgcatcgacccgatcaacaggatcatggaggagctgccgttctacgacgacgagcaccgcctgcagatcacccctcgcgagaatcagtccgaagcgcgcagacgattccgcaaggagctgcgcgaggtgcgcggcctcatcgacgcggcggagacggatgctgaccgtgagagcgtctaccggcggatgagtcgcctgatcggacggatgcggcggacggcgccggacttcgccgagctcatcgacgtgcgcaaccatgtgcgggtgagtgcggagcggatccatgccacgacccgggagcacgtcgcgctctacgaccacatcggcgagaaatcgggtggagagtcgcaggagctcgtcgcgttcatcgtgggtgccgcgctgcgataccagctcggcgacgcgggagccgagcgtccccggtacgcgcctgtgttcatggacgaggccctgatcaaggctgatgcgcacttcacgaagcgtgcgatcggcgcgtggcggggtctcggcttccagctcgtgatcggtgcgccgaacgacaagtacagcgcgatcgaaccgcacgtcgacgtggagtacgacatcctgaaggacacccgcggtcgctcctgggctcgtccgaaggtgggcctgccggccgggggcgagtga

SEQ ID NO: 47869 - DNA, 1677 bp, Frigoribacterium sp. Leaf164
gtggaagaaccgtcggggcacgacgccctcagccgcgacggcgtgcgcgaggtgttcggcaccgaccccacctgggcgctgctgcgcagctcgaacagccgctggatcctccccctcttctcccgccacctcgagcgcgccgagggccccgtctcggccgactggttccaccaggccgtcgcggaggcgctggccgagaacgccgcggagaccgcggaggccgcggccggcgagacggcgaacgtcagcgacaccacccccggggaggcgcccgccggccccgcagagacggccgacctccccgaggccaagaccccggcggactactgccgcggctgggtcgacagccggtggctgatccgcacccgcgcctccggcgaggaggacggccaggccgcccgggcccgctaccgcctctcgccgcacgccctcaaggcgctgcgcatcgtccgcgagctggccgaggccgacaacgccgtctccgaggcccgcttcggcagcatcgcgcacgccgtccgccagctcgccggcctcgccgaccccgaccccgcgtcgcaggtcgcccggatcgacgagcagatcgccgagctgcagcgccgccgcgacgaggtcgagcggcacggccccgtccccgcgaccgccgacgtcgtgtcgcgccaggtgcgcgaggtcgtgcggctgaccgcgtcgctgcccgaggacttccgccagctcagcgccatggtcgagcagcgccaccgcgaggtcgcccgccgcgcgacccacgagcacgtcggcaagggcgcgctcgtcgagcagtacctccgcgagaacgacctgctcgagcagacccccgagggccgcgcctaccgcggcttcgcccagatgctctcgtcacgcgagatcgacgtgatgcgcgccgacatcgacaaggtgctgtcgcagcccggcgccgccgagcacctcaccgagcggcagcgtgagcagctcgagcagctgatctcgtcgctgctcgccgaggagcagtccgtgcaggagacctacgggcgttggacgtcgtcgctccgccgcttcctcagccggtcgggcgccgagaagcaccagcgcctcctgaccctcgccgagcgcgccctccacgccggcgccgcctgggccgagcgtcgccccggcgccgccgtgctgcccgaggacgtgctcggcctcggcccggtcgacgtcgtcgacgtcagccaggtgcagctctggagcgagcgcggccgccccaccgtcgaggtgcgcgtggccgagggcgacgccgccctgcccgccgccgaccgcgccgcgctccgcctcaccgcgggcaccagcccggcggccgtcgccgcgacgatcgaccgcctgctcgacgagggcgacggccgcgacgaggtcacgagcgccgacgtctaccgcgccaccgagcccgagttccgccgtctcgcgctcgtgctgagcatgctcgacctcgccgtcgagcgcggcgtcgtcaccgacgagaccgagtcggtcgtgctgacgcccgacgacccgtccggcaccggggccggagcaccccggggaggcgccccccgcgaggtcacgctgccccggttggtcttcacccgggacgcacccccgcccggcgccgacgcccccgcccccgacgacaccgcccgcaccctccagggagaccccgcatga

SEQ ID NO: 47870 - DNA, 915 bp, Frigoribacterium sp. Leaf164
atgaccgccgccccgaccgacgacctccgcccggccgacgcgacgcccggcgcggcggccgacgcgacgctcgacgtggcgcccgactccgacgacgcccccgcccgccccgtctccgacgagctccccctcgccggccgcaaggccctggtcacgctgatgacgcaccgcttcatcagccgcgcgacgcagaaggaggcgtgggccggcctcctggcgcacgagccggaggtccgtgcccgcctggccgagatgttcctcgagctcgaggtcgaccgcggctacgaggtcgccttcaagcgccaggtcggcggcgacgacgcccccgtgctgctgcggcgcgagaagccgctgtcccgtgacgcgtcgttcctgctgatcttcctgcgccgcgagcacgcctacgccgacggcgacgacgacgcggtcgtggtgtcgcgcgaccaggtcgccgagttcctcggccggttccacgacgacaccgcccacgacgaggtgcgggccctgcgccgcgtcgacgccgcgatcgccgcgatggtcgcccgcgacctgctcgagcccgagcccgacgacccgtcgctcttcgtcgtcgcccccgcgatcgtgccgctcgtccgccccgagcagctgcggcacttcgagcgcgtgtacctcgaggccgcgggcgccgagccggaggccggtgcgcccgcggcgagcgccgccgctccgggcgagctggacgagcccgacgagctgaccgaccccgaccccgaccccgagctcgacgcgggtgacgacctgaccgagctcgaccccgacgccgcgcacgacgccggtgacacgcccgcccccgacgacgcgccccgcgcctccgacacggccctcgacctgccgctcgacctccccctcgacccggaagcagaccaggcatga

SEQ ID NO: 47871 - DNA, 3600 bp, Frigoribacterium sp. Leaf164
atgacccccgcctcccccgccgacgcgccccgcgcctcccgcacgcccgtcgaggccggcaccgcccctgccgccgacgcgaccgccgccaccacgcccgcgccgcccgtcacccccgcgctcgacgtcgacgtcgagcccgacgccgcgcccgacctcggcatgttccactcgggccagtaccgcatcgagctcgtgcagctgctcaactggggcagctacgcgggcctgcaccgcatgcccgtggggcggggcggcatcgccatcctcggcccgaccgggcggggcaagtcgacggtgctcgacgcgatggccgcggtcatcatgccgaacccgcaggagttcaaccgggccgcccgcgacgactcgcgccagcgctccgagcgcaccgtctacagctacgcgcggggcaagaccgacgaggtgcgcgacgccgactccgaccgcacgacgacgcggttcctccgcccgctgggcgagtcgttcgcgagcggcgccgcgatcacctggagcaccgagctcggcgagaccctcaccgccgtgcgcctcgcctggatcggccccgacaccgccagccaggacgacgtcacgcaggcgagcgtctacctgctcgtgcgcgggcgcttcgacctcagccggctgaccgacgtccgccgcgacgagacgagcacctcgccgctgacgaagagctcgctgacgcgcctcgtcgacccggcgcacgacctcgtcacctactcgcagcccgagctccgcgtgcagctctgcgcgcggctcggcatcggcggcagcgacgagtcgcagctgaaggcgctgacgctgctgcggcgggcgcaggcgtcgaagggcgtcttctcgatcgacgagctgttcaagcagttcgtgctgacgcagccgaaggcgctctcgcggtgggagacgacgctggcgacctaccgcgaggcgtcgcagctctacgacgtgttcgagacgacgcggcggaagctggacgtgctcgagccggtgccgggcctcgccgagcgctggcgcaccgcgggcgacgacgcgaccgccaagcgccgtctgctggccggcggcgacgacgaaccgcgccggctcgacgtctggctggccgaggcggtcggcagctgggtcggcggcgaggtcgaccgggtgcagaccgagaagcgcggccacgtcgagacgaggaggcgcgccgccgaggccgcggaggccgccctccgtgcccgcgagcaggccctggcgcagatcgccgacctcggcggcgacccctcgcactcgctccgtgagcaggtgcgctgggccggggaggcgctcggtcgcgtcgagaaggagcaccgccgcttcgcagccccgctcgagggcgtcggcgagccggtgcccacgaccgcggacgagctggagtcgctgcgcacgcgggcgacggagctcgcggccgaggaggcggcggcccgccgggagcacgacgagctgcgcggcgacctcgcggcccggatcgccgagacgcggcggtcggtcggcgagcgccagcgcgagaaggagtcgttcgagcggcgccgcagcaacgtgcccgacgacgcggtcgagcgacgtcggcgcatcgccgacggcacgggcgtgccggtcgcccggctgccctacgcgggcgagctgttcgaggtcgccacggagcaccgcgactggacgaccgcgatcgagagggtgctcggcgacctggccacgcacctcctcgtcgaccccgacgacttcgacgccgtgcgccgcttcgtcgaccgggaggacatgcgcggccgcgtcaccctcgtgcccgcgacgccgggcctgacgccgacgcgcacgccgctcgcgcgcaccgtgccgtcgatgctcgtgttcgacgaggcgagcccgttcgtgggctggctgcgcgacgaggtcgtcgacgaccgcagcgtgctctgcgtcgacgacgcgtcggcgctcgacgacccgctgcccgtcggggcgaagggcgccgtgacgcgctcgggcctccgcaccggctcgcgccgtcgggtgacgaaggacgaccggcgggtccgctcctggatcggcctcgacaacgccggccgggtcgccgagctgacggccgagatcaccgtgctgacggagtcgctcgacgcggcgcgcgcggagtgggacgccgccgagacggtcgccaccgcccgccgcacggtcgtcgagaccgtggcgcgcgccgccgccgtggagtggtcggacgtcgaccccgcgccggcgcgggcccgtctcgccgacctgcaggcgcagctcgagcgggtcgcggtcgagcgccccgaggtgacggcgctgcaggccgaggccgcggcgcaggacgaggcgcggctcgaggccgtgcgtcgcggggccgaggttcagcaggtgctcgaccagctcgaggcgacgcacgcgacgctggtcgacatcgaggacgcgttcagcgacgcctcgggcgccgacccgctgaccgacgacgagcgcgtgctgctcgcgccgctgccgttcgcggcgccgcgcgaggtggccgacgtcgagcgcacgcgccgtgaggcggccgcgcagctgcgggcgcaggtcgacgcgcacgaccgcgagcggacgcagcacgagctcacgctcgagctcgtcttcacgcgctacctcgagctcgacccgaacgcggggttcgacgcgtcgatcgagagcctgccggccgtgctggcgatccaccgcacgctggtcgacgacgacctgccccacgcgaagcagcgctggctggcgaaggccggggcgagcgtgggcgacagcctgcgggcgctgctcgtgcagatcgaggaggacgggcacgtcatccgtcgtggcgtccggccgatctcgcaggcgctggccgcgatcgagttccggcaggggtcgacgctcgacatcgagccgcggccggtgtcgaacagcgacctggcggagttcaagcggacgctgcgcgagcacacgggcggcgggggcggcggttctgcggtcggcggcggctctgctgccggcggctctgctgcctcggccgtcgatctgcgtgaccccgccgagatcgagcgccgcttcctgcgcctgcgtcgcgacctggccagcctcgaggagcgctcgaagtcgggcgaggcctggcgtcgccgggtgctcgacgcgcgcgagcactaccagttccgggcgatcgagacgaggcgagacggcacgcagatcgtgcacgagggagtcgcgggcaagtcgggaggtgagggccaggagctgatcgcgttcgtgctcggcgccgcgctgcgcttccggctcggcgacggcaccgaccgcgtgccgacctacgcgccgatcgtgctcgacgagggcttcgtgaaggccgacaccgagtacaccggccgggcgctctcggcgctgcggtcgctgggcttccagctggtggtcggagccccgcgagacaaggtgaacgccttcgagcagcacgtcgagagcgtcgcctacatctcgagcgacccggtgaaccccgagctgtcgcgcatctaccccctcacgatccgcgaggcgatggaggtcgagcgccacggcctcgaccccgccgcgctcggctag

SEQ ID NO: 47872 - DNA, 1494 bp, Leifsonia sp. Leaf336
atggacgaggccctcgacggcgcacgcgtcgccgcagtctgggaggaccatcccacctgggctctgctgcgcagctataacggccgttgggtgcttcctctcttctcgcgtcacctggaatacgcggacggcacggtctcggccgactggttccaccagaaggtcgccgacgccctcgaggagctcgactacgatcgcgagccggccgagccggagacgacccgcacctcccccgccgagtactgccgcagctgggtggacagccgctggctggtccgcacccgcgcgggcgccggcgagggacgcgcgcgctaccgcctctcgcagttctcgctgcaggcgctgcggatcgtgcgcgagctggccgagcccgacagcgccgtctcggaggcgcgcttcgcgagcatcgcgaacgccgtccaccagctggccgcgctgaccgatcccacggccgagtcccagctcgaccggctcgaccgggagatcgcggaattgcagcggcgccgggacgacatcgcgcggcacggggcgtcggtggcgacaccggaggccgtgtcgcgacaggtgcgcgaggtgctgcggctgacggcgaccctcccggaggacttccgccagctgggggcgatggtcgagcagcggcaccgcgacgtcgccagggcggcatcctcccagacggtcggaaagggcgcgctcgtcgatcggttcctgcgcgacaacgacctgctcgagcagacgccggagggccgcgcctaccgcggcttcgccgccatgctgtcctcccgcgagctggagacgatgcgcgccgacatcgagcgcgtcctcgcgcggccgggcgagatcaccgacctgaccgaacgccagcgcgcacagctggagaccctgatcacctccctgctcgccgaggagcagagcgtgcaggagacctacgtgcgctggacgtcgtcgctgcggcgcttcctcagccgcaccggttcggaccggcacgcccgcctcctcgcactggcggcccgcgcactggacgccggagcgctctggacggagcgccgaccggggcccgcgctcatcgacggcgagctgctcggcatcggcggctgggacctcgtcgacgtgacccaggcccagctctggcgcgaccgggggcgtccggaggtcggcgtcgcgatcaccgagaacgacgatccgctgcccgacgacgagcgcgaggcgctgcggctggccgtcgcgaccagcacggcggccgtgcgcgagaccatcgactccctgctcgccggggcggagaccgtgaccggcgccgacgtctacgcggcgacgcccgcggagtaccgccggctcggtctcgcggtcagcctcatcgagctcggcgccgagaacggcgccgtggcggagggtgtgcagaccgtgccgctcgacatcacggccggcgcacgcgaagtgaccatgccgctcctcgtcttcggacgggacgcggccgaccaggaggcggacggactgtga

SEQ ID NO: 47873 - DNA, 699 bp, Leifsonia sp. Leaf336
gtgagcgccacggagacgatgacggaaggccgtgaggaggctgacaccaccggtgcggacgccttcggcgaccggatggcgggcgacgccctcccccgcgaggcgcggatcgctctcgtcacactgctgaccagccggttcatcacgcgcgccaagcacccggaggcgtggcgcggtctgctcgaccacgaggcggacatccgcgcccggctcgacgagctcttcctcaccctgcacctcgacctcgcgcacgaggtcgccttcaaacggcagaacggcgaagacggcgtccccgtgctgctgcgccgcgagaagccgctgtcgcgcgacgcgtccctcctgctcgtgctgctccgccaggagcacgcctacgccgacgcgcaggacgagcccgtcacggtgacccgcgaccacgtcgccgagttcctcggccgcttccagggcgactcctcgcacgacgaggttcgggtcgaccggcggatccgcgccgcgatcgcggccctcgaccggctcgagctgctgacgcccactccggaggatcccgacgtgtacgtggtctccccggcggtggtgccgctgatcggcaccgacgagctgctgcacctggagcggatgttcctcgccgccgccggcgaggatgcgccggacgaggacgatgacgacgcggccgacgacacccccgaggaggacggcgagtga

SEQ ID NO: 47874 - DNA, 3417 bp, Leifsonia sp. Leaf336
gtgaacgacctgcccgaagacgacggcctggtccgccgtggccagttccgcatcgagctcgtccagctgctgaactggggaggctacgacggcctccaccgcatgcccgtcggtcgtggcggcatcgccatcctcggtccgaccggccgcggcaagtcgaccgtgctcgacgccatgtcggcggtcatcatgcccaaccctcaggagttcaaccgcgcggcgcgcgacgactcccggcagcgctccgagcgcacggtctacagctacgcgcgcggcaagaccgacgaagtgaaggacgccggttccgacacgacgacgacgcatttcctccgtccgctgggcaccgcgttcccgagcggtgcggcgatcacctggcgcaccgagctcggcgagacgatcaccgccgcccgcctcgcctggatcggaccggacacctccacgcaggacgaagtcaccacagcgacggtctacctcctggcgcacggggagttcccgctcggccgcctcaacgagctcgtgcaggagccgggcagctcctcgccgctgacccgcgcctcgctcggccgactggtgcaccccgaacgcgacctcgtgacctcctcgcagcccgagctgcgcgtgcggctctgcgaagagctcggcatcggcggcagcgacgagtcgcagttgaaggcgctcactctgctgcgccgcgctcaggcgtcgaagggcgtgttctcgatcgacgagctgttcaagtccttcgtgctcaccgagccgcgcgcgctgtcgcgctgggagacgaccctcagcagctaccgggaggcctccgccctctacgacgtcttcgagaccacgcgtcgcaaactggagatcctggccgacgtcccggcccgggccgagcagctctccgctgcggccgacgacgccacgggcaagcgcaagctgctgaccgcggccgacggcgagagcgacccgcgcctgcgggtctggctggccgagcacgtccgcgactgggtgtccggccaggtggacgccgtgcgcgggcgcaagcgggagcaggagacgctgcgacgcaccgccgaggccgacgagcatgcggcgcatcgcgcgcagcaggacgcccaggcgcgcctggccgcgctcggcggcgacccgtccgtcgctctgcggcgcgagctcgagctggccgagcggatcctcgcggctcaagccagggaacgggcgtccgccgacgcgctcttcgcccgggccgggctggacgctcccgcctccgccgagcagctggccggtgcacaggcgcaggcggaggccgcgctggcggccctcgctgccgacgacgagctgaaggccgagcgctacgagctcgccggccgagtggacgcggccaagaaggccatcgccgccgtctcggccgagaagcgatcgtacgagcagcgccgcagcaacgtgccagcggacgccgacgagcgacgccgccggatcgccgcggcggtcggtctcccggcggagagcctcccgtacgcgggcgagctgttcgaggttgcgccgggccgccgagactggagccgcgccgtcgaggccgtgctcggcgagaccgccacccatctgatcgtggacgagcgcagcttctccgccgtgcgccggttcgtcaacgacggcgacatgcgcggccgggtcgtgctggttcccgccgtggcaggactcgcgcccgaactcgacccgatcgaccggaccgttcccgcactgctgcacttcgacgaggccagcccgtactggggctggctgcacgacgagctggtgcgcgaccgcagcgtgctgtgcgtcgagtcgccggaggagctcgacgcaccccggcctgccggtgtctccgccgcggtgacccgatcggggatgcggtccgcctcccgcggccgcgtgatcaaggacgaccgcagcagcgcctcctggatcgggctggacaacactccgcgcatcgaggagctggcggcccgtctggccgacctggagaccgagctgggcgcggcccgcgccgcgtccgacagtgcggaggccgcgcacagcgatgcacggacgcgcgccgaggcgctcgccgccctgcgagcgatccagtgggaggcgatcgagctcgcaccccacgagtcgcgcgtcgcggagctcactgagcagctcgaccgggtctccgtcgagcacccggaggcgacggcgctgcaggaggaggcggaccgctacgaccgcgaacgcctcgacgccgccaagcgcggagccgctctgcaggcgcggctggaagaactcgagtccgagcatgccgacctcaacgacatcgaggacagcgtggccgacgcgctggagcggaacagcccgttgacgccggaggagcggctgctgctcggcacccttccgttcgcggctcccaagcagtcctccgacgtcgaccgccgctatgtcgaggcgctcgccgtgctgcgcgaccagatcgatacgcaccagcagaacgtcgagcacctctcggagctgctggtggtgaccttcgagcgctatcgcgatctcgacccgtcggccgagatcgacgccggcatcgacagtctgcctgcggtgctcgccatccaccgcggcctcgtcgacgacgacctcccgcgctcgaaggccgactggctcgtcaaggcgggcgcgagcatgggcgacagcctgcgcgccctgctcacccagatcgaggaggacggccacgccatccgccgtggcgtgcgcccgatctcgaacgcgctgcgcggcatcgagttccgggaagggtcgacgctcgacatcgagccgcgtccggtctcgaacagcgacctccacgagttcacccgcacgctgcgcaagcacaccgcgggtgcggcgggctcggcgaccgccgaccggagggacgccgccgcgatcgagcgcgacttcctcgacctccgccgtgacctgtctcggttggaggagcgctcccgcgccggtgaggcctggcgccgacgcgtcctcgacgcgcgtgagcactaccagttccgcgcgatcgagacgcgcgccgacggcacgcagatcgtccacgagggcgtggcgggcaagtcgggaggcgaagggcaggagctcatcgcgttcgttctcggtgcggcgctgcgctaccggctcggcgacggcagcgacgccatcccgacctacgcacccatcgtgctcgacgaaggcttcgtcaaggccgacaacgagtacacggggcgtgcgctggcggcgttccgcgggctgggcttccagctcgtcgtcggcgccccgcgcgacaaggtcaacgccttcgaggagcatgtcgagtcggtcgcctacatcaccggcgaccccgccaggcccggcttctcgcgtatctactcgctcagcatccgcgaggcgctggagggtgagcggctcggcgcgctggtggagtga

SEQ ID NO: 47875 - DNA, 1548 bp, Plantibacter sp. Leaf171; identical to SEQ ID NO: 47764

SEQ ID NO: 47876 - DNA, 849 bp, Plantibacter sp. Leaf171; identical to SEQ ID NO: 47765

SEQ ID NO: 47877 - DNA, 3387 bp, Plantibacter sp. Leaf171; identical to SEQ ID NO: 47766

SEQ ID NO: 47878 - DNA, 1449 bp, Arthrobacter sp. Leaf337
gtgtcccgatccgcaccgtcctccgcggacgcgatcaatgcccggcttcgggacctcgaactcctgaccaaaggaccggcatgggcgctcacccggtccgcgccgtgggtcatcgcggtcctgcaggcttcctttacccggacccgtccccagcttccgctggaagagttccatgccgacgtcgatgccttcctcgagcagctccgccgccaggacccggggttgggcggggtggccaacgggaagtccttcggcgatgaatggacccgcaagaatttcctgacccgccgcaaccagtccgggcagatcgtctacgaagtcacggagcccgcggcccgcgtcctcgccttcctcgacagcctctccagcgaacgctccaccctgaacggttcccggctggggactctgctgggcgacgtcgagaagctcgccaatgagacgaacccggaccagaccgcccggctggagtccctcgaggacgagatcgaggagcggcggcagctcatcgaggacatcagctccggcgacttcgacggactgctggacgacgacgaggccgtggaggccgccggaaacatcctggacctcgcagccagcctgccggcggactacaagaagatgcgtgaccggatcgaggaactggtgggcgagctccgcaaccagatcatcgaggaatccctcagcaagggcgccaccatggcgcaggtgctggaggcggacaagcggctccggcagagtcccgaaggaaggacgttccggtccttcacggcgttcctggaggacccccagcagcagctgcggttccgctccgcgataggagaggtgctcagccgccagttcgcggacgacctcagccacgaggaccgcgaaacgctgaagaacctggtggccgaactccgcacccagcacagccagatccagcggatctacggcaagctcagcgaaagcctcaacacctacgtccagagtgacgatttccgccagtccgtgcggctccgcaaggtgctccgcgaggccgaacaggctatccgctcgctgccgtatgaacgggaacgccctgggctggtgcccgggccggtgctcttcaatgccggcttcgagtccttgtccatggtcaagctctttgaccccgacgagttcgcggccccgcccaagctggccgaccccattgccttcagcgactcggaccgcgtgcgctcgccgcgcaccgggaaggccaaaccggcggccatccgcgccgcgctcgccggggccgccacgctgccggaggcgtgggagcagcttccgccggaggaacgccacatcaactccatccgcgccctgctgtcccacgcgctgcacgacggcgccggcttcgaccgcgccggctgggacgccatcgacttcgaacagatagacggcaccacccgcaaggcattcctgccggtggtcacgctcacaaaggattga

SEQ ID NO: 47879 - DNA, 825 bp, Arthrobacter sp. Leaf337
atgactgaagagatgacgacgacggcagccccggtggccgggcccgtcgagacgccggaagcccccgcagcgcctgaacacacctacgcagatccgtttacggtcaccccgcgggacaccttcgtggacggcgccgcactgttcccgggcgatacgggcgtgctgccgatgaaggtccgccaggctctggtgaagctgctcaagggcccgtacattgacggcggccgggacgagaaactgtggacaacgctgctggacaaccagctgatcctccgcagccgcctgtcggagcttttcctgacgctccagcttgaccatgaacggaaggtggccgtgctgcgcccggtggatccggacgccatcggcggcagcacccgttccagcatcctccgccagcagcgtgcgctgagccgggtggagaccatcgtgctgctgcgcctgagactcctgctggaccgccacgtcacggcgcagacggatccgaccatcacaaaagaggaaatcgccgagctggtggcccactaccagccgtccggccagcaggacgcgctgcgggactccgacgtcgtcaaccgcgccatcaccaagctcctggcccgccagctcctcatcaccaccggcctcgaggacgtctacaccatctccaacgccctcccgctggccctccccttcgaaaacatcggtgacatcccggcccagatcgaagcgctggtagcagccacggcagacccgacaggtacggaagcgctgatagagctcgaccgtgacagtcccgccagcccggatgatgacactgaggacgacgctgaagggagcaccaagtga

SEQ ID NO: 47880 - DNA, 3468 bp, Arthrobacter sp. Leaf337
gtgagcatcgcaaccatgctgccgatgggcgagctcaccaacccgggccagatgcggctcgcgctggttcaggtggtcaactggggcacgttccacggcgcccacaccatgcatgtggaccgcaacggcacgctgctgacgggcaactccggcgtcggcaagtcgacgctgttcgacgccatgctgcgggtgttcgatgcccggccgcgttccaacgaggccgcggcgcagcgctccggtgccgtggaggacaagaggaccacgttcacgtacatgcgcggcaaggtgggcgacaaggccgtgggcgagggctcggccagtgccttccagcgccccggtgccacgtggtccgccgtcgccctgacgttcgataacgcagcgggcacgaaggtgacggtgtcggcgctgttcgacctgccgaagaacggcacggagtcgagcgtcgggcggtactacctgatcgacaacaagccactggacctcgccgcaatcgagggcattgcggaaaagcgcttcaccaaggccgcactggacgtgatctttccggacgcacaggtcttcgacgtgcacaaggcgttcgccgagcgcttccgccggctgctgggcatcaactcggaccaggcattgccgctgctccgcgtgatccaggccggcaaagggctgggcggcagcgtcaacacgttcttccgcgaccaggtgctcgatgcgccggccacgctggccgcggcggacgacgtcgtcgaggaattcagcaacctgatgtcaatccggcagcggctggaggatgtgcggcagcagcgtgaccagcttgctccggtgcccggcctgaacaaggaatacgcgcagtccctgctggacgcgaaccgcctgcgggagctggccggcgaagagttcgatgcctacaagcagcagctggccgtcacggtccacgagaagaccctggtccggtacaaggacctcgcccaggcaaaggcaagggagctggccgcggagcgtgcggtccgggacggcctggccaaggatctgcggcagcttgaagcggactacaacaaccagggcggcaacgcgatctcggcgatcgagcagtcgctggaaaacgcccgggtggggctcaagctgcgccagcagatcgaggaagccgcgcgccaggccctggccgaggccggactggaccttgagtggacggcggagggctgggagcaggcccacacccacgcggccgcccgttcggctgaactgcagggcgactcggaggcgctgaaggagctgcgctttgaggcgttcgacggccacgccacgaagaaacgtgaacttgcggcggcccagcaggagctcgtctcgctgaagacgcgcaagtccctgctgccgccgtcgagcattgaaaaccggaccgcgatcgccgcggcgaccggcgtgcccgaagagcagatgccgttcggcggcgagctgatcgacctcgcagagggggaggaacggtggcggccggccgccgagcgcgcgctgcggaacctggccaccacgctgctggttcccggtgaacacttcggggccgtcacccgctacctcaacgacaactccgtccgcggcgcactccgcgccattgacgtgtccaagccgttggcgggaggtgcgctggccgcggaggacgtggccgacggcgagctgctgaccaagctggacatcctcaccacggggccggcggccgacgccgggcagtggatccgtgagcggatcgccgtcgacttcgcgtacccgtgcgtcgaggacccggatgaactggccaggctggacaagggcctgagccttggcggcgtggtcaagcgcaaccgccacaccgtggagaaggacgaccgcttcaccagcaggcaggactacgtcctcggcttcgacaatgcctcgaaactggaactcgtggcgacgcaagtggaggatctgcagcaggaactcgcgaaggcagccgagctcgcgcgaagccgcgaagagtcgcaccagggcatgacccgccagctggacgcgctgcgccggatcgccgaggaccaccggccctgggagcaggtttccgcggcagtggcggaggacgaactcggcaagatcgagcagcgcctcaaggatgccctcgccgcgcaggctgacctggagccgctgcgggccaacatcgaggtggcccggcagaagcaccaggccagcacggaagccgcagctgtcctccagagcgaatacaaggcgctggaccggcagctcaccgccggggattcgctgctggaagccgcgcgcacgcgcctgggccaggcaccgccgtcggagtccaccgtgacggcactggaaccgtacttctccgcgttcggcgacgtcggcgagatgcatgagctggacaacctggccaacgaggtccggacccggctccttgccgagctgcacaccgccgagtcccgcggccaggcgacctcggagcggctcacccgcattttcgagggctttgtgcgtgaatggggcacggcgatttccgcggaccacggcacgtccatcggcgccgccggggagttcgaggcccgctaccacgccatagtcagcgacggcctgcccgcgcaggaagccgagttccgtcagttcttcaaccagcgcacgcacgaatcgttcagcacgctgctgcacctgctggatgaggaacgccgctcgatcaccagccgtatcctgccgctaaacggcatcctgtccgaggtcaatttccatgagggcagcttcctggaactcgacatcaagcagacgctcccgcccaccgcgaagcagttcaaggacgccatccagaatgcgctgaaaattcggcacacgcgtccctcgcgcgctgcgggggcggcggcttccggagctgaaacggacgacgacgccgagctcaccaaccgctacaagtcgctggaaacgctcgtgaagcgtttgggttcgcagaccccggaggaccggcgctggcgggccgaggtgctggatgtgcgcgggcacctgttcatccagtgcaaggaacaccgcgaagtggttgacccggcctcgggcaagaagcgcggcaagcggaccgacgtatttatgcacgcggacacgggctccatgtccggcggcgagcggcagcggttcacggcgttcatcatggccgcggccctcagctaccagctgggcatcgccgagcagggcttcaccacctacggcactgtgatgatggacgaggccttcgtcctggcctcggaggaattcgccggggccggcatcaaagcgctgcacgaattcggcttccagctcctgctggcggcgccggaaaacgtgatcgatctgtcccggcacctcggctccgtgacggaaatcctgcgggacaagcgcaccaaccgctccggcgtgctcacgtctccggtgatcgggccgcgggccggtgccgagggccagtggaggtccgaggcgaacccggtggacatcgtcctgcgctaa

SEQ ID NO: 47881 - DNA, 1476 bp, Microbacterium sp. Leaf179
gtgagcagcacccgaaccgaagccgcgtacctgcgctcggtgacggcgttcaagaaccccacgctcgacctgctgcacgggcgcttcgcccccttcgtcgtggccgtgctctcggtggtcttcacccccgaccgcgcggcggtcaccgtcgccgacgcgcacgtcgaggtggccgaggccatcgacgagctgcgcgcggcgggctacgacaccgacgacgaccgccgcatccccgcggggtcggcgcgcgagatctgtcgcggctgggtgcgcgtgggctggctcggcctgcagatcgaggacgacgtcgaggtgtaccgcctctcggcgcacgccgtgggcgccctcgagatcgccggtcgcgccggcggcggccgcgcccgtgtctcccgctcgcgcgtgcgcacgcttctcgacgcggtcgagcgcctcgcccgcgacgccgagagcgaccccgcccgacgccgcgaggcactgctcgaggagcgggcggccctcgacgccgagatcgccgcgctggaggagggcatcgtcgagccccccgacgacgaccacctgctcgaagaggccgagaacgtcatccacctcgcgcgcgagctgcccgcggacttctcgcgcgtggcggagtcgatcgccgcgatgcagcgcgacgtcgtcgccgagctccgccgcgacgtgcgccccaccggcgaggtgctgcgcgagtatctcgagcgcgggcgtcaggtgatgcaggccacccccgagggtcgagccttccagggcgcgctgcgcctgatcggcgatcccgagaacatcgacgacctcaccgaccagctgcacgccgtgctcacccagcccttctcgcggctcatgacggccgagcagcggggcgaattggatgccatcgcccggcgtgtcgaagcgggcgtgcaagaggtgctcaccgcccagcggcgggcctcgcacgtcatcaccgcgcaggtgcgcacccacgatcccattcgcgaccgccaggtcgacgacctgctgcgcggcgtgatggcggggctgcaccgctggagccagaccaagacccccggtcgcgtcgagcccgtgcgcacgctcccgctcgccgacatcggacacttgcgccagtcgctcagcgacgtgcgtccggccggggcgccggcgccgttggcatccgcagacgtcgaggccgagttcgtcgacgccgacacccgcgcctggggcggcccgcactacgccgagctcgaggcgtacgtcgccacgctcggcgacggcttcgatctggcgaccgccttctcgggcggctccgccgacacccgccgcccggtcgatctggtcggcctgctcgagatcgtgcatcgcggggggctcaccgagaccgacgacgtctcgatcgtcgaggccgtacgccccgacggcaccacgcgacgcttcgccttcggagcggtcagagcgaacagcctgcgagaaaaggatgccgatgactga

SEQ ID NO: 47882 - DNA, 774 bp, Microbacterium sp. Leaf179
atggagaacgaccccgacgcgctgttcccgggcgatcgcggcatcctggactccgaggtgcggcgcgtgctcgtgcgcatcctgcagcgccggttcctgagcgccgagaactcccccgtcgagtggaagctgctcctcgagcaccagcagatgatcgagtcgcgtctgaacgatctgttcgtgcggctcgtcgtcgaccacgcgcggggcgtcgcgtacaaggagcaggtgcgcagcgacgagatcgacgtgcccatcctgctgaaggacgaggcgtactcacgggccgagacgctcgtgctcgtatatctgcgcacggtgttccagcgcgagaccaccgccggcaccgcgtcggcgcgcgtcgacgtcgaagaggtcgagcagaccgttctgacgtatttcgccgagaccgacggcacgcgcgcgagccagcagcgggccgtgcgcaccgcgatagcgcggctggaccgcgagggcatcatcgaggaagagtccgaggggcgataccgcatcgggccgctcatcgaggtcgtgctcagcgccgagacgctccgcgagctgcagctctggttggaggagcagacgcgggatgccgggagctcacccgagggcggggtcgtgacatccgcttccgacgagcacacacaggatgccgggagcccacgcgagggcggcgtcatggcatccgccctcgacgagcacacacaggatgccgaggctgccggtgaccgcgaggtcgcggcatccggaacgttcgagggagacccccgatga

SEQ ID NO: 47883 - DNA, 3354 bp, Microbacterium sp. Leaf179
atgaccatgctcgagaccctgttcggcctcatccctgccgcctcgcgcggacagcagtgggtggccgaagacctgcagctcgtcaactggggcggctacgacggaacgcatcgcgtgcgcttcgcccccaccgcgacgctgctctgcggtggttcgggctcgggcaagtcgacgctgatggacgcctacgtcgcgctcatgatgccgcacaccaccccgttcaacggcgcctccaacggtgcggtggtggggcgcccgcgcgggcaggagcagcgcaacatcctctcgtacggccgcggcaagctcgatgagtcgcgcaccgatgagggcacgaagatccgggtgctgcgcggcgacggcgtcgacacgtggaccgcgatcgcgatgacgtgggccgaccacgacggcgcccgcttcaccgcggtacgcgcctggtacatccccgccgccgcccgcacgctcgacgacgccgtcaaggtgcgcgccactgtgcacggcgcgttcgacctgcgcgatctggagcgggcggcgcagcagcacctgtccgacgcggcggtgcgggcgaccggactcgacaccctcgccaccgaccgcgagttctcggcccggctgcacggcgtgctcggcatcggcgcggcgggggcgggcacgaaggcgatgagcctgctcgcgcgcatccaggccgggcagcagatcaccaccgtcgacgacctctacaagcgcatggtgctcgaggagcccgagaccctcaccgtcgccgaggccgtcgtgtcgcacttcgacgggctcgagtcgacgcgcacgcgcatgctcgaggcgcgccagcaggtgcgggcgctgcagcccatccgcgcgatgaagacgcgcatcgacgaggccgccgaacgtctgcggctgatcgacgcgctcggacgcttcaccgaccccgactcgcgcgcctcgctctggcgggcgcagcgccgggtcgatctgctcggcgcggtcgaagcggagctgcgcgaccgcacgcacgccaccgacgcgctcgtgcgcgaacgccaggccctcgccgacgccgccgaagccgagcgcgaaggcctcggcgacgtgctgcgcgcggccgggggcgatcggctcgacgccgcccagcgcgagctccgcactctcgagcggcgcctggccggcatgcagcgcgaccgggagcgcttcgagacggcgctcgcggtgctgcagaccgaggtgtcgaccgagaagcagttcgccgccctcgtggacgacgcgcgccgcaccctcggtgacgcggatgccaagacagccgtccgcgacgcgttcgtcgccgccagcagcacccacaccgacctgcgccagcagctcgccgccctcgaggccgagcaccgccgcacgcagacgcgagacgacaacatcccgccccgtctgcacgaggcacgcgaggccctggccgaggccgccggtctgaccgccgccgagctgcccttcgtcgccgagctcgtggacgtgcgcaccgagtacgagccgtggcgcggggccttcaccctcgcgctcggggggttcgcgacgacccttctcgtggatgccgcgcacctgacatcgttccgcgcggcgatcgacggcgtccggctgtcggagcgcctgcggttcgagggcgtgtcgaccgggctccccgaacgcggcgggctggatccggcgacccttcccgggcgtctggaattccgcacctcgcccttcaccgggtggctgcaggaccggctcgagcagcagttcgcgttcgtctgcgtggatgccgcgtcggagttgtcgcggcaccgcctggcgctcaccatctcggggcagacgagccagggtgcacgcggcgcgcacggggggtcgatccgtcagagcgtgctcgggttctcgtcgcgcgtgcggttgaccgagctcggcgagcagatcgtcaccgcgcgccgcgccctcacggccgccaaagccacggtcgacgaggcggccgctgccctcgacgcgttcgacgagcggcgcagcgccctcgagaagatcgccgacctgtcatgggaccaggtggacgtggcatccgttcagcgcgatctggaccgctggaacgagacgatcgccgagatcaccgccggcaacccccgtatcgccgagctgcaggagcagatctcgggcacccgcgcccgggccggccgcctgcgcgaagagatcggcggggccaagaccgaacagcaggcggtggccgcgcgctgggccgagatcaccgacgacgtcgacgcggcacagatgctcatcgaacgcgcggaggattccgagaccgccctctcgcccgacgagatcgactacctcgacgctctcttcgtggcaccgggagcatcggacgcgacgccgtcgcagctcctggcgagcttcgacgccgccctcgaatccgcctcccgacggttgctcgaggaacagcggtcggcgcaggagacgtggggcgaccagcgcgagagcctgcggcgcacgctcatcgcgttcaccgaccggtggccgagtccgaacctgctcgccgaccccgacgagtcgctcggcgacttcgagcggatcctcgccgacctcgaagcgagcggcctgcacgagctcgaagcggagtggcgcgacagcctgctgcgcctgtcgggcaacgacctgacgagcctcgactcggcgctgacgcgggcgctgcgtgagatccgggagcggatcgcgccgatcaacgacatcatgcaggacctgccgttctacgacgacgagcaccgcctgcagatcgtgccgcgcgaggggcagtccgaggtgcgtcgccgtttccgtcgcgagctgcgcgacgtgcgtgcggccatcgacgcggcctcgtccgacgaggaacgcgaagcggtgtacacccgcatggcgcgcctcatcaaccgcatccgctcgacagcgcccgacttcgccgacctcgtcgacgtgcgcaaccacgtgcgggtgagcgccgagcgcttccgcgccgacaccggcgagcacgtcgccctctacgaccacatcggtgagaaatccggcggggagtcgcaggagctcatcgcgttcatcgtcggagcggcgctgcggtaccagctcggggatgccggagccgagcgcccccgctacgccccggtgttcctcgacgaggcgctgatcaaggccgacgcgcacttcaccaagcgcgcgatcggcgcgtggcgcggcctcggattccagctcgtcatcggcgccccgaacgacaaatacagcgcgatcgagccgcacgtcgacgtcgagtacgacatcttgaaggacacgcgcggacggtcgtgggcgaaggcgaaggtgggggtcgcggcggaggggtga

SEQ ID NO: 47884 - DNA, 1791 bp, Frigoribacterium sp. Leaf186
gtgaaccacccgtcggggcacgacgacgccctgagccgcgacgacgtgcgcgcggcgtacgaagacgaccccacctgggccctgctccgcggctacaacgcccgctggatgctgccgctcttctcccgccacctcgagcacgccgaggggccggtgtcggccgactggttccaccggcaggtcgccgacgccgtcgaacagaacgccgccgagcaggcagcgtccgagcgggcagcgtccgagcaccccgaggaggggcgggtcgcgtcctcgtcgaccgtcgccaccccgaccaccgcggacgccacccccaccgatccggcctcctccaccacccccgcgcctcccgccgaaggccgcaccaccccggccgagtactgccgcagctgggtcgagagccgttggctcgtccgcacccgcgcctccggaccggacgctcgcgccgagtaccgcctgtcgccgcacgccctcaaggcgctgcgcctcgtgcgcgacctcgtcgaacgggacaacgccgtcagcgaggcccgcctcggcagcatcgcccacgccgtcgggcagctcgccggcctcgccgaccccagccgcgaggcccagctcgcgcggctcgacgagcagatcgccgagctcgagcgacgcaagcggcagatcgagcggcacggcaccgagccggccgcccccgacgtgctgcgtcggcaggtgcgcgaggtggtgcgcctcaccgcttcgctgcccgaggacttccggcagctcggcgccatggtcgagcagcgacaccgcgaggtcgcgcgccgggcgtcgtccgagcacgtcggcaagggcgcgctcgtcgaccagtacctgcgcgacaacgacctgctcgagcagacgcccgagggtcgggcctaccgcggcttcgcgcagatgctctcgtcgcgcgagatcgacgtgatgcgggccgacatcgagaaggtcctggcccaaaccgacgcggccgagcagctcaccgaacggcagcgcacacagctcgagtcgctcatctcgtcgctgctcgccgaagaacagaccgtgcaagagacctacggccggtggacgtcgtcgctccgccggttcttgacccggtcgggctcggaccagcagcagcgactgctcaccctggccgaccgggccctgcacgccgggggcgtctgggccgaacggcgcccgggtcacgcgatgctgccggccgaccacggcgacgggctcgggctcggggcgctcgacgtccgcgacgtcagccaggtgcagctgcacaccgaccgtgcccgtccgaccgtcgacgtgcaggtcacgatcggcgacgccgccctgcccgaagccgaccgtgccgccctgcgcctcacctcgggcacgagcacagcggccgtctcggcgacgatcgaccgcctgctcgccgaccgcgacgaggtcacgagcgccgacgtctaccgcgccaccgaccccgagttccgccgcctcgggctcgtgctgagcatgctcgacctcgccctcgaccgcggcgtcgtcggcgacgacaccgagacggtcgagctcgccggcgacccggccgacgccacggtgcccggcggcacggggaccgggggcgcaggcccaggaggcgcgggtcgaggaggcgcggtccggcaggtcacgctcccccgcctcgtcttccggcgagcccccgcggctccgtccgacgtcgaacccgccgcggcaccgcccgacgtcgagcccgccgcacccgtcgcgcccgccctcacgaccagcaccccccgcacgaaggaccccgcatga

SEQ ID NO: 47885 - DNA, 990 bp, Frigoribacterium sp. Leaf186
atgagccccgcagccccgctcgacgagaccggcgtcgacgagccggcccgcgcctcctcggtggaggcgaccggcggctccgtcgacgagccggcccgagcctcccgcgacgcgttcgacgacggcgacgcggacgacgcaccgtcgggcgcggcctcggacgccctgccgctggccggccgcaaggccctcgtcacgctgttgacccaccggttcgtgtcgcgtgcccggcagcaggaggcctgggccggcctgctcgcccacgaggccgagatccgggcccggctcgacgagatgttcctcgtgctggtcgtcgaccacgaccacgaggtcgccttcaagcggcagggcggcgaggacgacgtgcccgtgctgctgcgccgcgagaagccgctgtcacgcgacgcgtcgctgctgatggtcttcgcccgccgcgagcacgccttcaccgacggcctcgacgaggcggtcgtgatctcgagggacgcggtcgtcgagttcgtcgggcgctaccacgacgactcgggcgccgacgaggtgcgggcgcgacgccgggccgacgccgcgatcgccgcgctcgtcgctcgcgacctgctctcgcccgagcccgacgaccccgaactgttcgtcgtgtcgcccgcgatcgttccgctgatgaccgccgaccggctggcccacctcgagcgcgtctacctcgaggcggccggggtcgagggggatgtcgaggcgagcgtggaggggtccggcgacgaaccccggggcgacgtcgatgccgacgtcgatgccctcgaaccggaagtcgagcccgactccgacgacagcgccgaccccgacgccgagcccgacgactcccccgagcccgacccgaccgccgtcccgctcgacctcgacctcgacctcgacctcgacctcgacctcgatacccaccccgcggccggcaccgcccccggcacccaccccgacaccgacccggaagcaccccagtcatga

SEQ ID NO: 47886 - DNA, 3465 bp, Frigoribacterium sp. Leaf186
atgagcaccgccgacaccgcgcccgacctcggcatgttccactcgggtcagtaccgcatcgagcaggttcagctgctcaactggggcagctacgccggcctgcaccgcatgcccgtgggtcgtggcggcatcgccatcctcggcccgaccggtcgcggcaagtcgaccgtgctcgacgcgatggccgcggtcatcatgccgaacccgcaagagttcaaccgtgccgcccgcgacgacagccgcaaccggtccgagcgcacggtctacagctatgcgcgtggcaagaccgacgaggtgcgcgacgccgccaccgaccgcacgacgacgcgcttcctccgcccgctgggcgaggcgttcccgagtggtgccgcgatcacgtggtcgaccgagctcggccagaccgtcacggccgtccgcgtcgcctggatcggtgacgacaccgcgagccaggacgacgtcacccaggcgagcgtttacctgctcgtgcacggcccgttcgacctcagccggttgtccgaggtgacccgcgagggcgcgagccagaacccgctgacccgcgggtcgctcgcgcggctgctcgacccgacccgcgacctcgcgacggcgtcgcagcccgagctgcgggtgcagctctgcggcgagctcggcatcggcggcagcgacgagtcgcagctcaaggccctcaccctgctgcggcgggcgcaggcctcgaagggcgtgttctcgatcgacgacctgttcaagcagttcgtgctcgtgcagccgcaggccctcagccgctgggagaccacgctcgccacctaccgcgaggcctcggcgctctacgacgtcttcgagacgacgcgcaagaagctcgacgtgctcgacccggtgccggccctcggcgaccggtacgagctcgccggccgcgacggctcggcgaagcgtcgcctgctggtcgacgacgacggccccagccgcctgcgcgtctggctggccgagcgtgtcggcagctgggtcagcggcgaggtcgaccgcgtcaccgccgacaagcgcgagcagagcgagcgcaggaggcgcgcccaggcggacgagcagctcgcgttccggtcccgtgagcaggccctggcgcggatcagcgaactcgggggcgaccccacgcagtcgctccgcgagcacgtggccgccgccgaggccgagctcaccgccgtggagcgcacccgcggccgcctcgccgccgccctggacgggacgggcgagtccctcccccgcgacgacgcgcagctcgccgccctcgggcagcgtgccgaccgtctcgcggccgacgacgccgcggcccgcgctgcgaccgccgacgcccgcagcgacctcgccgcccgcatcggcgagacgaagcgcgcgctggccgccctcgagaagcagaagcggtcgttcgagcagcgccgcagcaacgtgcccgacgaggcgatcgagcgacgtcgacgcatcgccgagggggcgggcgtgccggtgtcgagcctgccctacgccggcgagctgttcgaggtcgcgcccgagcacgccgggtgggccgtcgcgatcgagagggtgctcggcgatctcgccacgcacctcctcgtcgaccgtgacgacttcgacgcggtgcgccgctgggtgaacgagaacgacgtgcgcggacgcgtcacgctcgtgcccgcgaccctcgacgccgagccgcggctcacgcccgtcgagcacacggtccccgcgatggtgcgcctcgacccggccagcccgttccgcgggtggctgcacgacgagctcgtcgccgaccgcagcgtgctctgcgtcgagggccccgacgacctcgacgacccgcgtccggccggcacgcgcggcgccgtcacccgacgcgggctccgcaccggctcgcgcgaccgggtggtcaaggacgaccggtcgacccgctcgtggatcggcctcgacaacgccgcccgcatcgccgagctcggcgacgagatcgtcgggcgtgaggccgaactggcccgggtccgcgccgagtacgacgcgatcgaaaccgaggcggccgagcgtcgtcgggtggccgacgccgtggcccgctcgagggagttcacctgggacgagctcgacaccgcgcccgcccgagccaggctcgacgacctgcgcgcccagctcgagcgcatctcgatcgagcgccccgagctcgcgacgctgcaggccgaggccgcgcagcacgacgacgaccggtccgccgccacccgacgcctcgccgagatcgaccaggtgctcgcccgcctcgacgagaagcacgcgaccctcgtcgacatcgaggacgagttcgccgacgcctccgacgccgaccccctgaccgacgacgagcaggcgctgctggccccgttgccgttcgccgccccgcgcgaggcgaccgacgtggcgcgcctgtaccgcgacgcggcgtcgcagctgcgggcccaggtcgacgcgcacgaccgtgaccgcgcgaacgccgaggcgaccctcgtcgtggtcttcgagcgctacctcgaactcgaccgcacggcgggcttcgacgcgaccgtcgacagcctgccgaccgtccgggcgatccaccgccgactcgtcgccgacgacctgccgcacgcgaagcagcgctggctcgagaaggcgggcagcgacgtgggcgacagcctgcgggcgctgctcgtccagatcgaagaggacggccacgtcatccgtcgcggcgtccgcccgatctcgcaggccctgcgctcgatcgagttccggcagggctcgaccctcgacatcgagccgcgcccggtctcgaacggcgacctggtcgagttcaagcgcacgctgcgcgagcacgccagcggggccgagcgcaccggtgcgccgggctcgggtgccgagggctcgaccggcggacgccccgaggaggcgcgggacgcctccgcgatcgagcgccggttcctgaggctccgccgcgacctggcccacctcgaggagcgctcgaaggtcggtgacgcctggcgtcggcgggtgctcgacgcccgtgagcactaccagttccgggcgatcgagacccgggccgacggcacgcagatcgtgcacgagggcgtggccggcaagtccggcggcgagggccaggagctcatcgcgttcgtgctcggagcggccctgcgcttccggttgggcgacggcaccgaccgggtgccgacctacgcgccgatcgtgctcgacgagggcttcgtcaaggccgatgccgaatacacgggccgggcgctggcggcgctgacctcgctgggcttccagctcgtggtcggggcaccgcgcgacaaggtcaacgccttcgagcagcacgtcgagagcgtcgcctacatctcgagcgacccgtcgaaccccgagctgtcgcgcatctacccgctgacgatccgccaagcgatccaggtcgagcagcacggcctcgaccccgccgcgctcgcctga

SEQ ID NO: 47887 - DNA, 1476 bp, Microbacterium sp. Leaf151
gtgacccgcacccgcgccgaagccgcctacctgcgctcgatcacggcgttcaagaaccccacgctcgatctgctgcacggtcggttcgcccccttcgtcgtggccgtgctctccgtggtgttctcacccgacagatccgccgtggccgtcgccgacgcgcacgtcgaggtcgccggggccatcgacgagctgcgcgccgccggtctcgacaccgacgacgaccgtcgcatccccgccggttccgcgcgggagatctgccgcggatgggtgcgggtgggctggttgggcctgcagatcgaggacgacgtcgaggtgtaccgcctgtcagcgcacgccgtgggggctctcgagatcgccggtcgcgcgggcggcggtcgggcccgcgtgtcgggctctcgcgtgcgcacgctgctcgaggcggtcgagcggctcgcccgcgacgccgagagcgaccccgaccgtcgtcgcgagatgctgctcgcggagcgggaagccatcgacgccgagctcgccgcgctgaacgagggtgtcgtcgaaccgctcgacgacgagcacctcctggaggaggccgagaacgtcatccatctcgcccgcgagctcccggccgacttctcgcgcgtggccgaatcgatcgccgccatgcagcgcgatgtcgtcgcggagctccgccgcgacgtgcgccccacgggcgaggtgctgcgcgaatacctcgaacgcggccgtcaggtgatgcaggccacccccgagggccgggcgttccagggggcgctgcgcctgatcggcgatccggagcacatcgacgacctgaccgaccagctgcacgccgtgctcacccagcccttctcgcggctgatgacccccgaccagcggggcgaattggatgccatcgcccgtcgtgtcgaggcgggggtgcaggaggtgctcaccgcccagcggcgcgcctcgcacgtcatcaccgcgcaggtgcgcacgcacgaccccatccgcgaccgccaggtcgacgacctgctgcgcggagtcatggcggggcttcaccgctggagccagacgcgcgtacccggacgcgtggagcccgtacgcaccctgccgctcgccgacatcgggcatctccggcagtcgctcagcgacgtccgtccgagcggtgcacccgagcccctggcatccgaggatcccgatgcggagttcgccggcgtcgacacccgcgcctggggcggaccgcactacgccgaactcgaggcgtacgtcgccaccctcggccggggcttcgacctggcgaccgcgttcgccggtgccgatgccggcacccgccgcccggtcgacctggtgggcctcctcgagatcatgcaccgcggcggcctgaccgagacggacgacgtctcgatcgtcgaggccgtgcgccccgacggcacgacgcggcgcttcgcgttcggggcggtcagagcagagaacctcagagaaacggatgccgatgactga

SEQ ID NO: 47888 - DNA, 708 bp, Microbacterium sp. Leaf151
atgactgacgtggaccttcgaacacccgaaaccgactccccggtgttcatcgcccccgtcgcgatggagaacgaccccgacgcgctgttcgccggcgaccgcggcatcctggatgccgaggtgcggcgcgtgctcgtgcgcattctgcagcgccgattcctgctcgctgagaactcccccgccgagtggaagctgctgatcgagcaccagcagaggatcgagtcgcgtctgaacgacctgttcgtgcgtctcgtggtggatcactcccggggcgtggcgtacaaggagcaggtccgcagcgacgaactcgacgtgccgatcctgttgaaggacgaggcgtattcgcgcgccgagacgctggtgctcgtctacctgcgcacggtgttccaacgcgagaccacggccggtaccgcctcggcccgcgtcgacgtcgaagaggtcgagcagaccgtgctgacctacttcgccgagagcgacggcacccgcgccagccagcagcgtgccgtgcgcaccgcgatcgcgcgcctggaccgcgagggcatcgtcgaggaggagtccgagggccgctaccgcatcggccccctgatcgaagtcgtgctgagcgccgagacgctccgcgagctccagcagtggctcgacgaacagacacagggctcgcccgtcgaggtcccggcatccgagactcccgggaaggatctcctctcatga

SEQ ID NO: 47889 - DNA, 3348 bp, Microbacterium sp. Leaf151
atgaccatgctcgacacgctcttcgggctgatccccgccgcgtcccgcgggcagcagtgggtagccgaagacctgcagttggtgaactggggcggctacgacggcacgcaccgcgtgcgcttcgcgccgacggcgacgctgctgtgcggcggatcgggatcgggcaagtcgacgctcatggacgcgtacgtggcgttgatgatgccccacacgacccccttcaacggcgcgtcgaacggcgcggtggtggggcgccctcgcgggcaagaacagcgcaacatcctgtcgtacggccgcggcaagctcgacgagtcgcgcaccgacgagggcacgaaggtgcgggtgctgcgcggcgacggagtcgacacgtggacggcgatcgcgatgacgtgggccgaccacgacggcgcccggttcacggcggtgcgggcgtggtacatcccggcctcggcgcgcaccctcgacgacgccgtcaaagtgcgggcgaccgtgcacggagtgttcgacctgcgggcgctggagccggccgcgcgcacccatctgtcggatgccgcggtgcgggcgacgggcttggacacgctcccgaccgaccgcgagttctcggcgcggctgcacgcggtgctgggcatcggcgcagcggggtcgggggcgaaggcgatgagcctgctcgcccgcatccaggccgggcagcagatcaccaccgtcgacgacctctacaagcgcatggtgctcgaagaacccgagaccctcgctgtcgccgacgccgtcgtgtcgcacttcgacgggctcgagtccacgcgcacgcgcatgctcgaggcacggcagcaggtgcgggccctgcaaccgatccgcgcgatgaggacgcgtatcgacgaggccgcggagcgcctccgcctcatcgacgcgctcggacgcttcggcgaccccgcgtcgcgcgcgtcgctctggcgcgcgcggcgacgggtcgacctgctcggctccgtcgaggcggaactccgcgtccgcacgcactccaccgacgctctcgtgcgcgaacgacaggggctggcggatgcggccgaggccgaacgcgagggactcggcgacgtgctgcgcgcagccggcggcgaccggctcgacgccgcccagcgggagcttcgcggactcgagcgtcgcctggcggggatggaacgcgatcgcgagcggttcgaggcggcgttggcggtgctctcggtcgaggtgacaaccgagaagcagttcgccgcggtggaggacgacgcgcggcgcaccctcgcggacgcggatgccaagaccgccgtccgcgaggctttcgtcgcggccagcggcacccacaccgacctgcgccagaagctcgccgcgctcgaagccgagcaccgccgcacccagacgcgcgacgacaacatcccgcagcgcctgcacgaggcgcgcgaggctctggccgcggcagccggtctcaccgccgccgagctgcccttcgtcgccgagctcgtcgacgtccgcaccgagtacgagccgtggcgcggggcgttcacgctggccctcggtggcttcgcgacgacgctgctggtggatgccgcgcacctggcatccttccggtccgcgatcgacggcgtgcgactgtcggaacgtctgcggttcgagggggtgtcgacggggctccccgagcgcaccggcctcgaccccgcgacgctgcccggacgcctggagtaccgccgctcccccttcaccggctggctgcaggaccggctcgagcagcagttcgcgttcctgtgcgttgattcctccgctgagctggccgcccaccgcctcgcgctgaccgtgtcggggcagacgagtcagggttcgcgcggcgcgcacggcggatcgacccgccagagcgtgctcggattctcctcccgtgtgcgcctgtccgagctcggcgagcagatcgtcgcggtacgtcgcgacctcgccacggcgaaggccgcggtcgagacggcggccgcagccctcgatgcgttcgacgcacggcgcagcgccttcgagaagatcgtcgatctctcgtgggaccaggtcgacgtggcatccgttcaacgcgatctggaccgctggaacgagacgatcgtcgagatcacggccggcaacccccgcatcgccgagctgcaggaacagatctcgggtacccgcgcccgcgccgcgcggctgcgcgaagagatcggcggagccaagaccgagcagcaggcgctcgccgcgcggtgggccgagatcacggatgatgtggatgccgcgcagatcctgctcgaacgtgcggacgatgcgggagtcgccctctcggacgacgagcacgcctatctcgacagcctcttcgtggcgccgggcgcgtccgatgccacgccgtcgcagctgctggcacggttcgacgcggccctcgaatccgcatcgaagcgtctgctcgaggagcaacgggcggcgcaggagacctgggccgaccagcgcgagagcctgcgacggacgttgacggcgttcatcgaccggtggccgagtcccaacctgctcgccgatcccgacgagtcgctcggcgacttcgagcggatcctcgccgacctcgaggccagcggcctgcatgaactcgaggcggagtggcgggattcgctgctgcggctgtcgggcaacgacctcacgaacctcgactccgcgctgacgcgggccatgcgtgagatccgcgagcgcatcgccccgatcaacgacatcatgcaggacctgccgttctacgacgacgcgcaccgtctgcagatcgtgccgcgcgagagccagtcggaggtgcgtcgacggttccgacgggagctgcgcgatgtgcgtgccgcgatcgacgcggcagggtccgacgaggaacgcgaggccgtgtacgcacggatggcccggctcatcgatcgcatccgcccgacggcgccggacttcgccgacctcgtcgacgtgcgcaaccacgtgcgggtgagcgccgagcgcttccgcgccgagaccggtgagcacgtcgccctgtacgaccacatcggcgagaagtcgggtggtgaatcgcaagagctcatcgcgttcatcgtcggcgcagcactccggtatcagctcggggatgccggagccgagcgccctcgctacgcgccggtgttcctggacgaggcgctcatcaaagccgacgcgcacttcaccaagcgcgcgatcggtgcgtggcgggggctcggtttccagctcgtcatcggcgcaccgaacgacaagtacagcgcgatcgaaccgcacgtggacgtcgagtacgacatcttgaaggacacgcgggggcgctcgtgggcgaaggcgaaggtgggggtcgcgggctga

SEQ ID NO: 47890 - DNA, 1464 bp, Acidovorax sp. Leaf160
atgaaagctctacgcggcgcggccgcccttcgtaatcttcgtgagcaacccttgtggcgcctgttggccgccaacaaggggccggtcgtgattgccatgttgcagtccctgttcgtggaatccgggcaaacgcttccaagttcggtgcttcatgaacgcttgacccgggacatcgaagcgctgcgggctgttggggaggagcttccgcaaacgccgcaggcatatgtcgcagagtggctcagtcaggggtggttgacgcgtcgatttcctgcgggggcttccgaagaggagtacgagctgtcggctgacgcgctgacggcactgcgctttgtgacagggcttttgaagcctcgtaccactgcgacggagagccggctgtccgtcgtgattcaccagctgtcacggctggcggaggagaccgataccaatccgcaatcgcgcctggcagccctgcgtgccgagcgcgaccgcattgaccgggcgattgccgaggtcgaacgcggtggggtcaaagcgcttgccccggaccgcgcagtggaacgggcgcgcgaagtcatcgccttggcacaagaactcgcggccgacttccgaagcgttcgtgatgaattcgagaggttgaacagaggtcttcgtcagagcttgatggaaaacgaagggagccgtggtgatgtgctggagcagctctttgccggagtagacctcattggtgaaagcgatgctggcagaactttccatgcgttctggcggctgctgacggacagcgagcaggccgcgacgctccgcgagtcgttggatgaggtgactggtcggcccttcgcgcgacagctagagtcgcaggagcgcaaattcttgttgggactgacgggggccttgttgaacgaaggacgaggggtgcacgatgtcctgcagcatttcgcgcgtagcctcaaaagctttgtccagagccgggaattcctggagcaccgccggctacatggcctcctcaaagcggcgacgcaggctgcgctgagcgccaaggacgacgtgcggccaaacgaacagctgggcttcgaactcatgcagtccagcagccgcatcaggtcggtgtcccagtgggcgctgtttgaccctgcggagcgcgtgaccgactcctcgatgcaggcggccgagccgtccgaactggacctcgaaacggtgagcgagctggttcggcaatcggaaatcgactttcgaacgctcaaagcccatgtgcgggccatcttggagcggcagtctcaggtgtctatcgcacaggtccttgctgagtaccccgcggaacagggtttgggaagtgttgttggctatgtcgccctgggctcaaagcatggggaagtgaccgacggtacagaactggtggtctgggaaggggacgacgaggtgcagcgccgcgccaaggttcccactatttatttcatgagggagcgctatcttgaactcgttgactga

SEQ ID NO: 47891 - DNA, 708 bp, Acidovorax sp. Leaf160
atggatgagtccttcgcagacgatgcggcggcagtttctgctgctaccgaagctgcgaccttccaaggggatacgggggcattgcccatcgacacccgacgggtcctggttcaactccttctcggtccctcggtagacgcccggcgccagtcgaagctctggccagtcctgctgcgcgacgaggtcgccatccgttcgcgcatgcatgacctcttccttgaagtcgtcatcgaccatgagcagaaggttgccttcacgaggcaagtcgtctctgaagacctggatgttcctatcttgttgcgcaaggcttcgctcacattcctggaaacggcgctgctgcttttcctgcggcagcggctgacacaggccgatgcgcagggcgagcgggcggtcgtgtcgcgcgaagacatgcatgaacatctggcggtgttcgagaaggagaacaaccccgaccacgccaagttcgcacgacaggtcgtcaatgcggtcgacaaggcgaagaagttgagcctgctgcagtccatacgcgggtcgggggagcgctacgaggtctcgccaacactcaagctcctgttctccgccgaggaaattcaggagctcacgcgcacgtatgccactttggctgtctcccctggcagagtcggttccaacgtggaagctgatggtgatgacgatgaacagcccgcagatgaggaggaagcccaatga

SEQ ID NO: 47892 - DNA, 3357 bp, Acidovorax sp. Leaf160
atgaacccgtttgctcaagccgacctgcttggcggcagcagtgaccaattccgtctcgcgcggattcaaacgttcaactggggaacgttctcaaatgtcttcgactttcccattccgaaagaaggctatctttttgtcggcccatcgggttccggcaagtcgacggtcctggatgcgcatgctgcactgctgacgcctccgaaatgggtggacttcaacgttgcggcgcgcgaggccgagcgcaatggccgggaccgcagcgtcatgacgtaccttcgaggggcttgggcgcagcagaccggcgaggccggtgaatatgtgtcgcagtacctgcgtagcggcacgacgtggtcggccatcgcggaaacctaccgtgatgaactggggcgtgtggtggtgcttgcccaagttctgtgggtgaagggaaactcgaccgccccgggtgatgccaagcgtgtgtacctgacgcttgaacgggagtttgatgttcaggaactggagttcttcgcgaagaacgagttcgatgctcgacgtttcaagcacgacttgcctgatgcaaaggtgcatacggagttcagcgcctaccaggagcgttttcgccggctgctgggcatcgagaacgagcgtgcattgcgcttgctgcacaagacgcagtccgccaagaacttgggcgacctcaacgtgttcttgcgggacttcatgttggatgagcccgaaaccttcggcatcgccgcgagcctggtcaatgaattcggtgagctcaacgaggcgcaccaggaggttgttgctgcacgcaagcaaattcagacgctggtcccggcccgtgaagaacatggggaactggaccggacaaagtttgaaagcaatggcttgctggccatacagaccgccattgaccaatatcgagaacaccgccgcaagcttcttctcgatgagcgcattgccgaactcgaagtggacagggaggggtcgaggcaggaggcgttgcgcctcgcgtccattgtcgaaaacgagttccagaagctgacggaccttcaacggcagaagctcaacatgggggccgacgtcctggtccggctcgaagatgacatcaaggccgctgaacttgaaaagcccatccgtatcggtaagcgcgaccaggccgcagcggcatgcgaagccatgggctgggctgtcccggattccgtggtgtggtttgttcagcgtgtcgaagccgccaagcagcgggtgttgaaggcccgcgacttgaagaacgaggtcgaggaacggaaagacggtgtcaaggatgagttgcgtagggcaaatgagggcttcctgaaggtcgtcgctgaggtgaaggcgcttgagcgccagaaatcgaacttgccggcacggctggtcgacctgcgcgagcgcatggctcgggacctgtcgattcccgaagagaagctgccgtttgtcggcgaactggtcgaggtgcgagccgaggaaacggcgtggcgtggtgccatcgagcgtgtcctgggtggttttgcgcggtccatcctcgtggacgagaagcactactctgcagtgtcggcttatctgaatgagcggaacatcggtgaacggctggtgtacttccgaaccataccccagacctcggggcggtcccctggacccaattccttggtgcgcaagctcaacatggcatcaggtagtttcggggactgggtccgggaggagctcaagcattccttcgacttcgagtgcgccgacaccctgcaggcgttccgcaatgcttcgcgtgcggtcacccgggaggggcaggtcaagcacagcacgatgcggcatgagaagaatgaccgccactcggtcaacgaccgaaatcagtgggtcttggggttcgacaacaaggaaaagctggcactcttcaagcagcaggctgcggaaatcggcggtcgcatcagtgagttggaagagaccgttcgcaagattgggaaagaggaggaaacccagcaagcgcagatgctgcactgccagaacttgtccaacctgacttggaacgatgtggatgttgggtcgctgttgacgcgcatcaacgacctgaccagccggttgaaggctgagcgtgaggctcgtccggaccttgcagcgctgaatgacagcatcgggaagcaagaaggcgtgcattccctggctgttggtaagaagaacacggaagatagcaaagggcaatccattgccgcagacatcaaccgtttgaaagggaagctggaagagcttgcccggctgtggccgacttcagaccgcccgcctgcgttcgccgagcagattggtgtccggtacgaggccacggagaaagtggtcactttggagagtctcgaccatgtgaccaacttggttgagcgcggcctgaacgcggaactccgggcactggaaagccggttgtcagaccttcgcaactcaatcgtgcagcgttttgcggagttcaataggctgtggcctgcgctggctggcggcctggatgccacgctcgagagcgccgaggactatctggcgaagctcaagcggttggaggacgacaacctgccagcgttcgaggaccggttcttcagtcttttgcgggagcagagcgaccagaacctcacgctgctcaccacgaagctggacgaggagcgctcggccattcggtcgcgcatggagctcgtcaatgaaagcctgcagacggcgccattcaatccggggacccacctcgtcatcgagacgacggacaaggctatcgaggatgtgcgcctgttccgggcgagcctcaaggaatcgctcagccactcgttctctaacgaccgcgacctggccgaggagcgcttcaaggcgttggcagccctcgtaaagcgcttggcgagccaggaaacggtagacaagaactggcggagtcttgtgctcgacgtgcggcaacacgtggagttcgttgcccgggagttggacgaggccgacctggaggttgaggtctaccgtagtggggccggcaagtctggtggtcagcgtcaaaagctggctgcaacctgtttggccgcagcgcttcgataccagcttggcggccaggacagggcacttccccgctattccaccgtggtgctggatgaggcgttcgacaaggcggatgcggagttcacggccatggccatgaatatcttcaagaccttcgggttccagatgattgtggcgacgccgttgaagtcggtgatgacgctggagccgttcatcggcggcgcatgctttgtgcacatcaaggaccgtaagaagtcggcggtcattccaatcgaatacgacagtgagtctcatcgactgaaactgagccaggacgtgcgcaatgtcgaagaagctactgtctcctga

SEQ ID NO: 47893 - DNA, 1800 bp, Frigoribacterium sp. Leaf172
gtgaacgaatcgtcagggcccgacgacgccctgagccgtgacgacgtgcgcgtcgcgcacgaggacgaccccacgtgggccctgctccgcagctacaacagccgctggatgctcccgctcttctcgcgccatctcgagcacgccgagggtcccgtctcggccgactggttccaccagcaggtcgcccaggccctcgagctgaacgcgctcgatcagaccgcgcccgaccagaccgcgccagaccggagcgcgccagtccaggccggaaccgaggaggcgcgggtcggcggatccggggcgacggccgcccccgagacccgcaccaccccggtcgactactgccggagctgggtcgccagccggtggctgatccgcacccgcgcctcctcgacggacgacggcggggcacgccacggcgacgccggccacggcggctcgagcagcacgacgaccggcacctcccccgtggccgacggctggggcgcgttcggcgccgctcatccgagcggcacggcggcggggtcggccccgacgcgcgcctcgagcccgcccccgcgcggcgaggcccgcgcgcagtaccggctctccccctccgcgctcaaggcgctgcgcatcgtccgcgagctcgtggagcaggacaacgcggtgagcgaggcgcgactcggcagcatcgcccacgccgtcgggcagctcgcgggtctcgcggacccgagcgtcgaggcgcagacggcgcggatcgacgagcagatcgccgagctgcagcgtcgccgggaccgcatcgagcagcacggcaccgagccggtcggccccgacgtgctgaagcgccaggtgcgcgaggtggtgcggctgaccgcgtcgctccccgaggacttccgccagctgagcagcatggtcgagcagcggcaccgcgaggtggcccgccgggcgaccgtcgagcacgtcggcaagggcgcgctcgtcgagcagtacctgcgcgagaacgacctgctcgagcagacccccgaggggcgcgcctaccgggggttcgcgcagatgctgtcgtcgcgcgagatcgacgtcatgcgggccgacatcgagctgatcctcgaccatccggccgccggcgagcatctgaccgagcggcagcgcacgcagctcgagtcgctgatctcgtcgctgctcgccgaggagcagtctgtgcaagagacgtacgggcgctggacgtcgtcgctccgccggttcctcagccggtcgtcgacggagcggcaccagcgtctgctcaccctcgccgaccgggccctgcacgccggcggcgtctgggccgaacgccgacccggcccggccgtgctgcccgtcgacgtgctcggcctcggtgcgctcgacgtcgtcgacatcagccaggcgcagctgcacagcgaccgcgggcggccgacggtcgacgtgcaggtgcccgagggcgacgccatgctgccggcggccgaccgggccgcgctccgcctctcgtccggcacgagcaccgcggccgtcgcggcgaccctcgagcgtctgctcgaggccgacgagaccgtcacgagcgccgatctgcacgaggcgaccgaccccgagttccgccggctcgggctcgtgctcagcatgctcgacctcgccatcgaccagggcctcgtcgacgagagcaccgagaccgtcacgctgacgagcgccgacgacgcaggaggcgcggatcgccgggtcgtcctcccccgcctcgtcttccggcgaccgcccgcacggggcgacgacgcccccgactccgccccgcagtccgagagagaccccgcatga

SEQ ID NO: 47894 - DNA, 954 bp, Frigoribacterium sp. Leaf172
atgagccccgaccagtacgacgcgaccgacgcggccacgccgacccgcacctcctcgggggcgcaggaggtgaccgggtcggcgacggcggacggcgtcgacgccgccaccgccggagcggccctcgaccggggcggcgacgggtcgccggatcggctgcgcgacgagcttccgctcgccggccgcaaggcgctcgtgacgctgctgacgcatcgcttcgtgtcgcggtcccggcagggggaggcctgggccgccctcgtcgcctacgagcccgagatccgcgcgcgactggacgagatgttcctcgtgctgatcgtcgatcacgagtacgaggtcgccttcaagcggcagagcggacaggacgacgtgccgatcctgctgcgtcgcgagaagccgatgtcgcgcgacgcctcgctgctgctggtgttcctccgccgggagcacgccttcagcgacgcccacgacgagtccgtcgtggtgtcgcgccaccagatcgcggagttcctcgaccggtaccacgacgacgcctcgcacgacgagatccgctcgatgcggcgggtcgacgcggccatcgcggccatggtgacgcgcgacctgctcgagccggagcccgacgaccccgcgctgttcgtcgtcgcacccgcgatcgtgcctctcgtgacggccgagcagctcgcgcacctcgagagggtgttcctcgaggcggccggggccgatgcgcccgtcgacgccccgctcggcgtcgaggacgacgagccgtcggacgacgaggactccgacgacggacgccccgacgacgggccacgtctcgtcgccgaccccgccgtcggcgattccggcgccgacgaggcgcccgacgccgccgaggcacccgacgccgacgaggccccgcgccccgacccgaccgccgtcgcgctcgacatccctctcgacccggaagcagaccaggcatga

SEQ ID NO: 47895 - DNA, 3486 bp, Frigoribacterium sp. Leaf172
atgatccccgccgacgcgacccgcacctccccggcctccggaacggcccccgagacggcccccgagtcgacctccgacgacgaggcgacgcccgatctcggcatgttccactcggggcagtaccgcatccagcaggtgcagctgctcaactggggcagctactcggggctgcaccgcatgcccgtcggccgcggcggcatcgcgatcctcggccccaccgggcgcggcaagtcgaccgtgctcgacgccatggccgccgtcatcatgccgaacccgcaggagttcaaccgcgccgcccgcgacgacagccgccagcgctccgagcgcacggtctacagctacgcgcgcggcaagaccgacgagatccgcgacgccgcctccgaccggacgacgacgcggttcctccgaccgctcggcgaggccttcgcgagcggcgccgcgatcacgtacgcgaccgagctcgggcagaccctcacggccgtccgtctcgcctggatcggcaccgacacctcgagtcaggacgacgtgacgcaggccagcgtctacctgctcgtccgcgggcccttcgacctcagccgactgaccgaggtcaagcgcgacgccagcagctcgagtccgctgacgaagggctccctcgcgcgcctcctcgatcccctgcgcgacctggtcacctcctcgcagcccgagttccgggtgcggctctgcggcgagctcggcatcggcggcagcgacgagtcgcagctgaaggcgctgacgctgctgcgtcgggcgcaggcctcgaagggcgtcttctcgatcgacgagctgttcaagcagttcgtgctgacgcagccgaaggccctctcccgctgggagaccacgctcggcacgtaccgcgaggcctcggctctctacgacgtcttcgagacgacgcgcaggaagctcgccgtgctcgagccggtgccgggcctcgccgaccgctacgagatcgcgggccacgatgcgaccgagaagcgccgcctggtcgacgagaccgacggcccgagccggttgcgcgtctggctcgccgagaaggtcgggagctgggtcagcggcgaggtcgaccgggtcaccggcgacaagcgcgccctgtcggagtcgaggaggcgcgcggccgccgacgacaccgccgcgtaccgtgcccgtgagcaggccctggcccgcatctcggatctcggcggcgacccctcccagtcgctccgccagctcgtggccaccgccgagcgcgacctcgccgttatcgaacgcgagcgtcggcgcttcgcgacggcgctcgacggcacgggcgagtccgtgccgaccagcgagaagcagctcgtggccctgcggcagcgtgccgaggtgatcgcggcggaggacgccgccgcccgcgccgcggccgacgaggtgcgcggcgagctcgccgcccgcatcggcgagacgaagcgcgccctgtcggcccgcgaggcgcagcgccgctcgttcgagcagcgcggtggcaacgtccccgacgacgcggccgagcgtcgactgcgcatcgccgagggcaccggcatcccggtcgcgggtctgccctacgccggcgagctgttcgaggtcgccgcggcgcacgccgactggagcgtggcgatcgagcgggtcgtcggcgacctggccacgcacctcctcgtcgaccggtcgaggttcgacgccgtccgccgcttcgtcaacgacaacgacatgcgcggccgcatcacgctcgtccccgcctcgaccggtgccgagcccacgcgcgaggccgtcgcccggaccgtccccgcgatgctgcagttcgacgagcggagcccgttcgccggctggctcgtcgacgagatcgtgcgcgagcgcagcgtgctgtgcgtcgagggtccggacgacctcgactcgcccgtgcccgccggtgcccgcggcgcggtcacgcgggccggcctccggacggggtcggggggccgggtcgtgaaggacgaccggcgatcacggtcgtggatcggactcgacaacagcgcccggatcgccgagctgaccgacgagatcgcatcgctcgagcgcgacctgaccgtcgcccgcgccgcatgggactccgccgaggccgagtcgtcggcacgccgccgcgtgctcgacgccgtggcccggtcgaccgagttctcgtggaccgacatcgacaccgcgcccgcgcaggcccgcctggacgacctgcagggtcagctcgaccggttgtccgacgagcgccccgagctcgcgacgctgcaggccgacgcccgccgccacgacgacgagcggtcggccgcgacccgccgcctcgccgagctcgaccacgagctggcccgtctcgacgccgagcactcgaccctcgtcgacatcgaggacgccttcagcgacgccctcggcggcgccgacccgctcaccgaccacgagcgcgcactgctcgcgcccctgcccttcgccgctccgcgcgaggtggccgacgtcgagcggtcgtaccgcgaggcgcttggtctgctgcgtggtcagatcgacggccacgagcgcgagcgcacgcaggccgagaacaccctcgtgctgatcttcgagcggtacctcgagctcgaccggacggccggcttcgacgcgtcgatcgacagcctcggcgccgtcagggccatccaccgcaccctcgtcgacgacgccctgccgagcgcgaagcaggactggctcgcgaaggccggcgccgacatgggcgacagcctccgggccctgctcgtgcagatcgaggaggacggtcacgtcatccggcgcggcgtccggcccatctcgcaggctctgcggtcgatcgagttccgcgaggggtcgacgctcgacatcgagccgcggcccgtgtcgaacggcgacctcgtcgagttcaagcggaccctgcgcgagcacatcggcgaccgcgcggaatccccgcgcgacccggccgagatcgaacgccggttcgtcaccctccggcgcgacctggcgcacctcgaggagcgctcgaagatcggcgacgcctggcgccgccgggtgctcgacgcgcgcgagcactaccagttccgggcgatcgagacgcgggtcgacggcacgcagatcgttcacgagggggtcgccggcaagtcgggcggcgaggggcaggagctcatcgccttcgtgctcggcgcggccctgcgcttccgactcggcgacggcaccgaccgggtgccgacctacgcgccgatcgtgctcgacgagggcttcgtgaaggccgacgacgagtacaccgggcggtcgctcgcggcgctgacgtccctggggttccagctcgtggtcggtgcgccgcgcgacaaggtgaacgcgttcgagaggcacgtcgacagcgtcgcgtacatctcgagcgatcccgcgcgccccgagctgtcgcgcatctaccccctgaccatccgccaggcgatggaggtcgagcgccacgggctcgaccccgccgccctcagctga

SEQ ID NO: 47896 - DNA, 1533 bp, Williamsia sp. Leaf354
atggcggtcggcaccacccccgcgggttccgcggccgctctgcacgccgcgttcaccgagagcgccgacgccgacgtcaccctgcgactgctgcgatcgcgcagcgcgatggtgcacctggcactcatggccgcccgcctcggcgacggccaggtcgacggcgatcacctcgccgcgggcctcgcccacgacatcgccgcgctgtcgtcgcactggaccgaccgcgacgtcgccgtcccgaccgccgaggaactcctcgacctctggacgcggcgcgggttcgtcgcccgcaccctcgacgccgatcgacacatcgagcgctatcagctgacgcggggcgcgaccaccgcgctggcacaggtgcagtcggtacgacacgaccgcacggtcgccacccagacggcgatggagatggtgatcggtcgactgtcgaacatcgcggtcgccatcaatcccgatcccggcgaacacatccgcgacatcgacgcgaagatcgccgagctgaccgcgcggcgggccgagctggccgcaggcgcggtccccgccgtcgacgcccgacgggtgttcgacgacatccgcatggtcacctcgctcgccgaacggatgcctgccgacatcatcggctacggcgagaagctgcgcgagaactcccgcgagctgctcaccggcggcctcgacgagcgggccggtgcctacgccgacgcactcaaccggatgttcgacggtcacgacgaactccaccggtccgccgagggcagcgccttcgacgccttctacaccctcatctccgaccaccgtttgcgcgacgacctcgagcgacacatcgacgcgatcctcgccgccctccccgatctcccgcgtgatcaggccgacatcctgggccgcttcatcgaccgcatgtgggacgaggtgcagcacgtcgacgagatccgcggacaggtgtaccgacggatcaacaccttcgtcaaaggtggtgacttcctgcactatcgggcgctgcgggagcagatcggcgaggcacagcgcgcggccgcggcggccttcgaacacgtcagcgcgggccgcgacatgggtatcgaggtcccgatgggcgtggccgacacccactcgatcggcgcggtctcactgcacgacggggtgatcgagatccccgacggtgtcgaggcctccgccggtgagatcgacatcgaccctgccgcgctcgtcggcaccgagaccatcgactggcaggccctgaccgaggcggtgaacgcgtcggtcgcgcgcggcgccgccgatctcgcggaggtgttgtcgcgcatcgattccccgcgcgtgggcgatgtggtcggcgtgtggtcgctcgcgcaacgacacggcgcggtcgacaccacacggtcggcgatgacggtcggtgcgcacaccgcgcggggtgtccgcgagatcacggtgcccgccatcgtgttcaccgcccccatgcccgaacccgtggtgaccgccgtcgaccccgcggtgcacctgctcgacgacctgaccggggggaccccagcgtga

SEQ ID NO: 47897 - DNA, 813 bp, Williamsia sp. Leaf354
gtgaccgaggacgatctcgcgaccgacgcccccgaggccggcgacgacctgttcgtcgacagccccgacgccgaggcctcgccgtcggtcgacctgtcgcacttcagcttcgacggcaccgaaccgctcggcgagatcggtcagcgccgcaccgaaccccgtttcgacggcgacacctccgaactccccgcgccggtctgttacgccctgcaggaactcgtcgccgcggcccacgtgagcggcaagtcccgtaactggcgtgccatcgaggcgaacgagcagatcatccgctcgcgcctgtcggagctcaacctcgtgctcgagatcgacaccgaacaccggtatgcgttcacccgccaggtcaccgaatccgatccgcgccaacgcaacatcctccgcgcgtcgacgctcaccctggccgcgtcggtgctcgcgctgttcctgcgccagaagtacctgaccagtgtcgacgagtcggcgacggtggaacggaccgagatggtcgaccacatgctcacctacaagcccgtccgcgacaccgacgaggccggattcatccgtcgtgtcgacgccgcgatcaacgtgctcgagaaccgcaaggtcatccgcgccctgcccggcaccgaccgctacgccatccacggggtgatcgccgcgctgttgacgccggaacaggtcgagtcctacacccgcgcctaccgcgtcctcgccggcgacgaccccagccccgatctggccgaactcgacgaggcgtcgctcgacgagaccgagaacgctcccgacggcaccaccgaggatgaggacgagcagtga

SEQ ID NO: 47898 - DNA, 3402 bp, Williamsia sp. Leaf354
gtgaccgacaccctcgagcagaccgccacgaccgcacggcgcaccatcgcgatcggacagttccggctcacgcgtatccagctcgtcaactggggaaccttccacggctacaaggacttcccgatcgacgagcgcggtgtgctgctgaccggtccgtcgggatcgggcaagtcgtcgctgatggacggtcactcggtggtcctgctgcccacctacgaccaggggttcaacgcctcggccgacctcaccgccaagggtgcgaagcgggccgcgcgctcgatggccgactacgtgcgcggggcgtgggcggagaacgacgacgagtacaaccagtcgcaggtgcagtacctgcgcgggtccggcgcgacgtggtcggcgatcgccgccacctacgacaacggcgcgggctcggtgacgacggccgtggccatcaagtggttccccggctccgggaacgacggagccgcgctgcgctcgtggtatcagctgcaccccggcgacgccgacctgttgtcgctcaacgactgggctgcaggcggattcgacatccgctcgtaccgggcctcccatcccgaggtcgcctgcttcgacgtgcagagcgcctaccaggaggcgttgcgccgtcgggtgggcatcggcagttcctcggcggcgctcgcgttgatgggcaaggccaaggcgatgaagaacgtcggcgacctcaacctcttcatccgcacctacatgctcgaccgccccgacacctacaccaaggcgcagcggctggtcgagaacttcacccagctcgacgaggcctatcaggccgcggcgcgggcccatgcgcaggagaaggttctgcgaccgatacccgatgcgtggcaggcgtattgcggtgccgaggagtccacgacccgtgccgccgagctgctggggccgcccatgcgcgcgttcatgcgcgaacaccgcgtggcgttgctgcaggccaaactcgactcgatcgaggaccagcggaccgcgctcgacaacgaggtcgcctcatgggagaacatcgccgacgaacgcgaggaccggcacacctcgctgcgtgaccagctcaccgtcgacaagggtgagctcacgtcgctggaggcggagctgaagtcgttcgaggcgcaggtgaccgcccgcaaccgtgcttacgaacggtattcggcggtggtgtcgcggctcggcgagaacacgccggagtcgcacgaggagttcgccgcactccgtgaccgcgccccgcagatcggccgtgccgcccgcgaggccgcggcgtcgctgtcggcgcgggcgcacccggtgttcagtgccgagaccgacgctcgtcgcgagcatgaggcggtgctcgaggagttgaccaccctgaccgcccgccgctcgctgctgccgcgcgatgccctcgcccagcgcgacgccatcgcgaccggaaccggtgtcgccgctcacgacctgccgttcgcggccgaactcgtcgaggtcgcacccgagcaccgcgacacctgggccggagccgccgaacgtgtgctgcggagtctcggcatgacgttgctggtgccgcaggaacaccgcaggcgggtctcggatttcgtgaacgccaccaacctcggcggtgtgctggagttccgcgccttcgacaccgacgcaggagtgaccgacccgacgccgggaacgctggccgcggtcatgacggtggacaccgcgcacccggccgggccgtggctcaccggcgtggtggcccgctcggccgcgcacgtgtgtgtcggcaccccggtcgagctcgaccgccacgacctcgcggtgacgccgcagggcctggtgaaggccggacgcgaccgctaccgcaaggacgatcgccgtcgcgtcgacgaccgcacccattggatcttcggcaccaacaccgacggaaaacgcgccgcgctggaggaatcgctcgtcgggttgcaggcccggtttgacgaggcgaggcaggcgtcgcaggacatgcgggacctgttggaggacaaccgggaacgcgccaaggcggccgatgcgctcgccgcctacggctcgtggaccgagctgaactggtggtcgtcccgtcgcgacgccgacgagctgaaccagcggatcgaggccgtccgcggcaaccgggtcgatctcgccgaactcgaggagcaggtcgacatcgcccgcgccgactggcgtgaggcggtcgcacgagtcggtgcgatcaacgatcaactgcgccacatcggttcggactgggaccgctggctcgccgaactcgagcagtccagcgacgccgacgccatcagcgacgacgaccgcgactacctctccggtgtgctgagcaccgtgctggagggcaacggcaagcagctgtcgatcgagacctacggcgaggtgcggtcggatctgcgcaacgcactcgaggcggtgcaggccgacgccaacgccgaccgcgacagcgcagagaaccgcatcgtgcgcgccgccgaggcgttcgtgcgggaatggcccgccgcggcgaacaacctgacgcccaccatcgccggtgcacaggatctcgtgtcgatccacgccgggctcatcgaccacggactcgcctccacccaggagcggttccggcaactcatcaccaccgacatctcccactcggtgtcgaacctctacaaggagatcggcgacaccaacaagcggatccgtcgcggtatcgccgaggtcaacagcgggctccggcgggtcgatttcaacaccggcacctatctgcagatcgctgtgcagcacaaccccaccgaggaggcgacggagttcgcccgcatcgtcgacgcgatgatgcgtgacgcccccgcggcccgggccggcgacggcgcggtgctggcgcggcagttctatcggatcaagaacctcatcatcgctctgaccgcgaccgacgccgagggaaagcgctggtgcgacaacgtcctcgacgtgcgcaacagctacttcttctacggcaaagagctcgcgcggcccgtcgccggcgaggaagctgacgacgacgcgccgccggtgcacacctaccgcaacaccgcgaccaactccggtggcgagcaggagaagctggtcgcgttctgtctggctgcggcactgagcttctcgctgagcagtccggacgaccatcgccccggcttcgcgccgctgatgctcgacgaggcgttcagcaagtccgacgagacgttcagcagccagtcgctgcgggcgttcgagcagttcggtttccagctgatcatcgccgcgccgatccgtatggcaggcatcgtcgagcagttcatcggtcaggtcattttggtggacaagcggatcgggcccgacggcgcgcggtcggacgcccggaccgcgacgttcggcgagatcgcgacggcgcggcagcagcggtga

SEQ ID NO: 47899 - DNA, 1506 bp, Curtobacterium sp. Leaf183
atgaccgacgtcgacctcgagtacgcccgcgtgcgcgcggtgctcgaccggccgacgctccgcctgatgtcccgcccgacgagcgccgtcgtgctcgccgtcttccgcacggtgttcgaccgcgacgtgcagtacgtccccgccgaccgcatgcacctgcaggtcgaggagcacgtcgcccgcctgcaggcacgaacgcaccagcaccagcagcaggacgagcccgacaccaggccgaccggccgcgcgctctgccgcgagtgggtcgcggcacagtggctcgtccgctcgaactcccctgacggcgacgagcagtactccctcacgagccacgccctcgaagcgctgagcctcgtggacgccctgtcctcggaccgggcgctgatcagcgagagccgcctggcgatgatcgtcgacgccgtgcaccgctgggccgcccgcgccgagccggaccccgacgtgcagatccgccggctcgacgcgcagatcgccgagctgcaggccgagcgtgatcgactcgccagcggcgacgagcccaccgcggtggacgacgaccggatgcgcgacggctacacgaacatcaccgacctgatccgccagctcccgagcgacttcaagcgcgtcgaggaagcggtggcgacgatgcaccgcgagatcgtggaggacttccggaacgaggtccgtccgatcggcgagatcctcgacgactacctggcgcgcacggacaccctgatggaggccacgcccgagggccgcgcgttcgagggcgccttcgagctgctccgcgacgacgccctgctgctgcgcctgcgcgaggacatcgcgacgatcctcgaccaccccttcgcggagtcgctcagcaccgccgaacgccgcacgttccgcaacacggtcgtgatcctccggcagggcatcgaggacgtcctcgcgcagcgccgcctgctcaccggcacgctccgcgaccagatcgtcgcgcacgacgttgtccgtgaccgcgagctcgacgccgtgctccgcagcgtgaaccgccggatggccaccctgatggagtccggcggtgcgcgggagcggatcccgctcggcctcctccccccggtcgccgaggtcggcacgctccgcgaacgcttctacgacccggacaccgaggcggtcccgccgcccatcgaggaacccgacgacgacgtcttcgacgagatcgacgtcgagtcgctccggcgccacggcggtcccctgctcgtcgagctccgcgaagcactccgctccgccggtgccggcacgagcgtcggcgccttccacgcactgccgccagagcagcgtcgcccggtcgagctcttcggtctcgcgcacctgctcaccggacacaccgacttcgagaccgccgccaccgccgtgccgcaccacacggtgcgcccggacggcacggcagtcaccttcaccatgcccacggcggacctcaccgaggaccgtccggcggacgacgacagcaccaccctggaggcccggtga

SEQ ID NO: 47900 - DNA, 786 bp, Curtobacterium sp. Leaf183
gtgaccgacacgacggcatcccacgtcgacgacacggacgcgttcgacggcatcgatcccttcgacgagtccgcctcggtcgcgctcgacgagaccgagcgcgacgaatcgagcttcgcgctgttcgagggcgacgagggccgcctcgacgagctccagcgccgcgcgctcgtcgcgctgctccggcacccctacgtcagcgcgcggacacaccccgacgagtggcgcgcggtgctcgacgccgagggacagctgcgctcacgcctcaacgacctgttcctcgaactgcacgtcgaccgcgaccgtgaggtcgcgtggaagcgccaggcacgctccgagagccagcgccgcggcttcccgacgctgctccgcgacgtgccgtacacgcgggaggagacgatcgtcctggtctggctccggatgcgactccgcgccgacacccggccgggccccgaccaggtcgtcgtcgaccggtcggagatcctcgggcacgtggcgggcttccgaccggccaccgcgaccgaccgcacgcgcgacgagggccgcgtcgcgaaggccatcgagcgcctgatcaccgcgcgggtcctgctgaagacgagcgacccggaccgcttccgggtggcgagcgtcgtcgaggtcctgctcccgctggagcggctgctggaactggacacgtggttggcgagcacaacgtcgtcgaacgcgacctccgcaccggtggacgcgcctgacggagccgagccgagcctccagaccgatgacgacgacgaggaggagtccgcgtga

SEQ ID NO: 47901 - DNA, 3399 bp, Curtobacterium sp. Leaf183
gtgaccgaccaccggatcgacaccgccggcatgccggcgctgttcgacaccgtcgcgcagtggcgcgccgagtccatgcaggtcgtgaactggggcggcttccacggccaccgccagatcgagctgtccggcgcggcgacgctgatctccggcgcgtccggcacgggcaagtcgacgctgatggacgcgtacctcgcggtgatgatgccctccgacgtgccgttcaacggcgcgtcgaacgacgccaccacggggcgggcgcggagcgcagaccagcgcaacctgctgacgtacctgcggggcaagatcgacacgcggcgcgacccggagtccggcagcctgcgcgacgtgaacctgcgcggcgacgacaccgcgacgtggggtgccgtggcagtgacgttcctcaacgacgacgagcgacgcttcacggtgctccgcgcgtacatcgtgccgaagcgcgcgcgcggcgtcggcgacatccagatgaccatggcgacggtcgacgacgacttcgacctgcgccggctcgaggccttcgtgccgtcgcggttcaaccacctcgagctgaccggtcgggtgccggggctcgtggtccgcgacacgtaccaggagctggcgtacacgctgcagacccggctcgggatcggcgactccggcgggggcaaccgggcgatgcggctgctcgcgcggatccaggccgggcagcacatgcccacggtcgactcgctctacaagtcgctggtgctcgagacccccggcacctacgaggccgccgaccgcgcgctcgcgcacttctccgcgctcgacgaggcgtacgaggcgatggacaccgaggagcggaaggtacggatcctcgcccccatcaccgagctgcacctggagatcgagcgctcccgggccgccgcggccgccctcgacggcatcgcgaccgggtccgaggtgtcgccgttcgcccactggacagcgacccgcaagcgcgcgctgctcgacgacgaggtcgaccgcaaccgccggtcccgcaccgcggcccgcgccgaggtcgaggcggcgtccgcccgtcacgccgccgtcgagatcgagctgcgcgaggccgaggcccgcctgcgcgactcgggcggcaacgcactcgcccagctcgaggaccgcatcgagcgacgcacgcgcgagcgagccgccgtggagcgcacccggacggccttcgacgaccggacggccgcgctcgggaccttcacgacggagtccgcgttcgtcgccggacagcgcgcgtcacacgagttcctcggtacccacgccgcctcgcgtgccgcgctcgacgaccgtcgcgacgcgctcacccgcgaggagtacccgctgctcgaccgcgagcggtccctgcgccaggagcggcagtcgctcgaacaccggcagggcgcgatgccgctgccgatgcacgaggcccgggtggcgatggcgcaggccgccgggatggaccccgcgtcggtgcccttcgtcgcagagctgctcgacgtgctgcccggcgaggagcgctggcgtaccgcgatcgagtccgtgctcgcccccgtcgcccgcacgctcctcgtcgatcaggaccagctcgacacgttcagtgccgcgatcgacgcgctccgcatcccggtccgggtgcagttcgagggcgtgccgtccggaccgcacctggacgtcgttggcgaccgcgcgatggtgtccggcaagctcgccgtcaaggactcccccttcagcacctgggtccggtcgcgcatcgagtccgaccgcatcgacgcccgctgcgtgtcgtcggcctccgagctcgggggcggcggtcgtcgggtgacggagtccggacagctccgcgacggccgtcgcggcgcgcacggcgaccgacggcaggcgaacgtcatcggcttcacgaacgaggcccgggtcgtcgcggtcgagcaggagctggcggcgatcgccgaggacctcgccacactcgaggcccgtcggaccgacgtcgcgcaggacatcaccgcgctcgacgagctccgggccgcgcaccagcacctggtcgacaccacgtgggacgcgatcgacctgaccggcgccgacgagtcgctggcgcgcctgtcgaccgagcgggacgccctgctggccgctgacgacggcctccgagcactccggacgtccgtcgcacggctccggacggccctcgacgacgctgccgaccgccgggctgccgcgcggctgtcggtgcagcggctcgaggagcgccacgcggtgctcgtcgacgggcaggacgccgcggccgagatcctgtcgcgcttcgaagacagtcccgcgctgctgccggacgaacagcaggcccagctgctggccgagacgttcgacgaggtcggcgcacccgacggcgtcgacgggttcgacgacgccacccgtcgcctccgccggcggctcgaggagcgactgtcgcaggccctcgacggcgccgcgtcggcgtcgaacgcgctcacgatgacgttccagcggtaccaggatgcatggcccgacccgaacctcggcaccggtgtcgcgtcgtacccggactaccgcgcgatcctcgacgacatcgtcgcgaccggcctgcacgcgcggcgcagcgagtggcgtcgacggctgtcccagtggagcggggaggacctcgtcccgctggccggcgccttcgaccgtgcggtcgtcgagatcgaggaacggctcgaaccggtcaacgagatcctgcgcgacctgccgttcggcgcgaaccgcgaccgcctgaagatcgtcatccgccgggtcacccgcgaggacgtcacgcagttccgccgcgaactccgtgccctgtccgcgtcggtcgacaccgagctcaccgacgacgtgctcgagacccggttccgccgactccgacgcttcatggccgtgatccggcacgacggatcgatgcaccgcggcgcccggacctcgcagcgcgacgccgtgctcgacgtccgacgccacatggagatcacggccgtgcggtacgacacgacgggcaccgacctgggcgtgtactcgtccctcggcgacaagtccggcggagagacgcaggagctcgtggccttcatcgtgggcgcggcgctgcggtaccagctcggcgacgagacccggccccgccctcggttcgcgccggtgttcctggacgaggcgttcatcaaggcggactcggagttcgccgggcgtgcggtgacggcgtggctgcggctcgggttccagctcgtcgtgagtgcaccgctcgacaaggtcacggcgctcgagccggcgatggagcgtctgctgtcgatgcgcaagcaccctgacacgggccactcgtcgatcaccgagatccggcgggcggagccggcggcggaggctgcggtggcacccgcctga

SEQ ID NO: 47902 - DNA, 1371 bp, Methylobacterium sp. Leaf361
atgctgttcgcgcagctgtccgacgagctgttcaagccgctggcctcgccgagccgcggcttcaacgcggccctgctcctgcacctgcaccggcgcgtcctcggggccgagccggtgcgcaaggccgagctcctggccgagatcggcgacttcgccgccggctggagcgaccccgaggtcagcggcgacgagccgatctcggccgacccggccgagcgccgcacggcgctctaccggcgcctcctcgacaccggctggctgatcgagcgccgcgagcgctacgtcccggtcgcggagttcgaccccgaggcccgcctcctgctggaggagctgtcgcggctggaacggggcgagacccgctcctacggcggggccgtgctggaggtgctgggcgggctcgagagcgccctgtcggacccggcgaaccgctccgaggcgctgtccaacgccgcgcggggcgcggccgccttcctgtcccacgtgcgcggcctcgcggccggcatgcgcaaggtcgaggagcgcatcctgcgcgagcccgaccgcgccaagaccttccggctgttcttcgaggatttcgtcgagcgccacctgatcagcgactaccggacgctgcacacccgcttcaacccgttccgcttccgcgccagcgtggtgcgcgaggccggccgggcgctgcgcgacgccctcacggtccgggccctggccgagggcctgatccgcgaggggcggatcgccgatctcgacacggcgcagcgggccgtccgggcggatctcgcccagatcctcgcggtgttcgagggcctcgacaaccacctcgacgccgtcgacgccgtggtggcgcgcctggagcgccggatcgcctccgcgctgcacgtgatggaccgcccggacccgagcggcgtcgagcgcgtcgccgcgatgctgcgcgccgtcggggaagcggagatcgcccccgaggtgccgggcgacgtctcgctgctgcggccgccgatcgggcacgcgcatctccaggcgccgcgcgcccgcaagtcggccatcgacatggagccgctgcccgacatcgaggacgaccccgtggtcgacgccttcgcggccgccaaggcggagttccgccgccgcaccaccgtgacgcccgagagcatgagcgccttcgtggaggcccggctcggcaaggcggtgcggctgcgcgggtcgcagatcgtcatcgcgggcgtcgacgacttcatcgtgttccagcgcctgcgcgagatcgacgtgctgttcgacgccaagctcggcgcgcgctacgccctgacccggctgcccgagcgggtggtcaacggctggctggactgcccggatttcctgctggagcgccgtccccgtgcttga

SEQ ID NO: 47903 - DNA, 627 bp, Methylobacterium sp. Leaf361
gtgcttgagggcttccgcgcgatcatcgacggcgacgagccgccgccgcccggcgcccgggcgccggacgccgaggagctgtgccgcgccctccaggtgctgctgaaggggcaggtgatctacgccgagacgcagggcatcggccgctcctacgagctcgcccggcactacgcgccgttcttcaccgactacttcgcctgcctcggctacgcgctgaccgtgtcgcaccgcgaccagatggtctcgctgagcccggccgccgacgccccgcgccacgacatcgtctcggagcgcctgcgcaaggacgagaccctggtgctgctggcgctccggctcctctacgaggagggcctgcgcgaccaccgggccggaacggacgggatcgtcgactgcaccaccgacgagatcgtcgagaagatccgcgccgtggcgcgcaacgagccccccgaggagggccggctcgccgacatcctgcgcctctacgccaagcgcggcggcctgcgcctcggcgagcgcgaccgggtcgagcgggtcacgccgctgtcgctcctgccggggctgacggtgctggcctccgacgcctggatggagcgcctgcgggcgtggtccgaggccggcgaggcctga

SEQ ID NO: 47904 - DNA, 3438 bp, Methylobacterium sp. Leaf361
gtgtacgtcctcaccgacatcgccatctcgaactggtacctgatccgccgcgagcagatccgcctgcgcggcgccgcggcgctggtcgggccgaccggggccgggaagtcgacgatcttcgacgcggtcggcacggtgctggccggcaacaacgccagccgcctcgccctcaacgcctcggcctccggccgcagcgcccgcaccgtgcgcgactactgcctgggctggatcagcgacccggcggagggcggccgcccgacgcgggaatcctgcgagaccgtgctggtgctggtcttcgagaaccccgattccggccgcgtggtctcggtcggcctcgccctggcggcgcgggccgccgagccgaaggagaccgtgctgtcgcgcttcatcgcggtcgggcacaggttcgaggtctccgactacgcccgcaccgcctccggcggcacctacacggcgccctggagcgagatcgccgcggagctgcgcgcccgcgcgtcgagcttcaccgagtaccgcacctccggcgagcgcttcacggccgacgtgctggcgaccctgcgcgagggcgcgccggcgccggagccgcgccacttcctgcgcagcttcgccaacgcggtggcgttcaagccgatcttcgacaccagcgccttcgtgcgcgccttcgtgctcgagccggagcccctcgacgtcgagcgcgtgcgccactccatcgccaactggcggcgcctccgggagaccatcgccgagctggagacccggctcgggcgcctgcggcgcctgcgcgaccgctacgaggcctggggcgaggcggtcctcgccgccgcgacgcacgagctgcgggcggccagcgccgatctgcgccgccgcagcctcgacctcatcgccgtccggggccgcctccgcgagggcgccgacaccctgcgcatcgcgcgcgagcgcgtcgcggcgagccgcggctacgtccgcgagatcgacggcgagatcgccgagaagaaggcgctggccgccgcgggcgccgccgagggccggctcgcggcctcgacgctcggcctgtccatgctggagcgcgaccgcaaggagctgatcggccggatcggcgacctcgtcgccctcgtcgggcagatggccaagctccagccggtcgccccgatcctgcgccagagctgcccgcaggcggcccgcctcgccgaggcctgcgcccgggcgggcctgcgccgcgaatcctcccccgaggagatcctgcgccccgacggcccgctggccgagctggccgacgggctggcgcgcctgcccgacttcgacgaggccctggaacgggccgccgaggacgcggcgctcaaggcccgcgcgcaggagagcgaggccgagcgcacggcgccgcgcaccggcggcggcccggcggcgcggctgtcctccgatacggtggcgttccgcggcgagctggagcggcgcgggatcgacgcgctgccgatctgcgaattggccgagatcgtcgacccgacctgggggccggcgctcgaagggctgctcgggcgcgcccgcgaggccctggtggtcgccccggaccggctgagcgaggccctcggcgtgctgcaatcgggccgcgaccgctacagccgctgcatcctggtcaagaccaccgacaccgccaagcagcgcgcccgccgctacgacgacggtccgctcaccgtgatcgagaccagcgacccccacgccgaggcgttcctcggcgtgcggctcggcggctacgacctcgcccgggacgatgccgaactggcgcgcctgtcccgggccgtggcgcccagcggccggaccacggccggcatggcctacacggtcacccgcagcgtcgacctgctgatgacccgcggccatcgcgggccgaccgccgacagccgccgcgcccacgagatcgccgtcgcggaggcgcggcgcctgcgcggcgaggccgcggtcctgcgcgaggccgcccggacggccgccgcgatccgggcccgcgtcgcccggggcctcgacgcggtggaggccctgcgggccgagctcgacgggctggaggggcggcggcgcacgctccagaccgagcgggaggggatcgagaagcgcgacacggccgggctcgccgccgagatcgccgcgctgaccaccgagcgggtcggctacctgcgggaattgtcggaggagctggagccgaagctcgaccgcctgctcgccgacgaggcggccctgcgcgcccggatggggcctatgcgcgaggccgtccgcgccgccctgtcggcccgccgggcggccctgcgccagctgagcgcgggcgacgcggcgcgggtgcgcctcgcccgcgccgagcccttcgacctcggcgcggtcgccgaggcgcggcgggcgctcgccggcctcgacgccaaggcggccggggcgcgggtgagcgccgagcgcggcctcgcccgggattccgccgaggccgcccgctcgcacggccggatcgccgagcgcgagcttgcggaggcctgcgccgcctggcgggtggagaaccccctcgcctcgggggacgccccggcgatcgacggcttcgcctgggtgcggcgggaatacgaggcggtcgaggggcacgagttgcgccgctaccgggcgcaggcagagcgggccgagtccgagatgcgccgcctcatgaccgaggacctgctgacgcgcctcgccgaccggttcgagcgggtccatgcccggctcgcggccctgaacgagcggctctcggcgcgcagcttcaccggccagacctacgcgttcgaggcggcggtggaccgccgctacgccgccgtccacgcgctggccaccgagaccgcccgctcgcccgaggccgcgcaggcgctgctcgccggcgaggcggaggggccgatggcggccgcgctcgaggagatcaccgcgctgatcgccggcgcggacgacgcggcgcggctcgccgattaccgcaactacttcgtctacgagatcggcatgcgcgaccgggcgggcaaccgcaccacgatgtcggcccgggcgctgcgcggctccggcggcgaggcgcaggcgccgttctacgtggcgatcgccgcgtcgctcgccagcgcctactacccgggcgaccggccgggcgacgagaatccggggctcggcctgtgcctgctcgacgaggcgttctcgaagctcgacgtgcgcaacagccaggcgctggtcgatctctaccgcgcctgggggctgcagctgctgatcgccgcccccgaggacaagcgcacgacgctgaccgaggtgatggacacgatcgtgacggtctacaagagcccggatctgacctcggtccggatcgaggccgagcacccgctcgaggcggcccgccgggcgctgcacgcgatcaaccccgaccaggtcgggatcgagggcttccgccagtcggacgccgcggagtga

SEQ ID NO: 47905 - DNA, 1449 bp, Arthrobacter sp. Leaf141
gtgccccgctccgccaggtcatccgctgacgcgatcagcgccaggcttcgggacctcgaactcctgacaaagggccccgcctgggcgctgacgcgatcggctccctgggtgatcgccgtgctgcaggcatccttcacccgtacccgcccgcagcttccgctcgaagagttccacgccgacgtcgactccttccttgaagagcttcgccgccaggaccccgggctgggtggcggcgccaacgggaaggccttcggcgatgaatggacgcggcggcagttcctgacccgccggaaccagtcgggccggattgtttatgaggtcaccgaacctgcagcccgcgtgctggcgttcctggacagcctgtccagtgagcggtccaccctgaacggctcccgcctgggcaccctcctgggcgacgtggaaaagctggccaacgaaaccaacccggaccaaagcgcgcggctggaatccctggaagaggaaatcggtgagcgccggcaattgatccaggacatcagcagcggcgacttcgacggcgtgctggatgacgacgacgccgtggaagccgccggcaacatcctggacctcgcggccagcctgcccgccgactacaaaaagatgcgtgaccggatcgaggagctggtgggcggactccgcaaccagatcatcgaggaatccctgaccaagggcgccacgatggcccaggtgctggccgctgacaaacggctccggcaaagccccgagggccgcacgttccggtcgttcacggcgttcctggaggacccgcagcaacaggtccggttcaggtccgccatcggtgaagtcctcagcaggcagtttgccgacgacctgtccgcggatgacagggagaccctgaagaacctggtggctgagctccgccagcagcacagccagatccagcggatctacggcaagctcagcgaaagcctcaacacctacgtccaaagcgacgacttccggcagtccgtccggctccgcagggtcctccgcgaagcggagcaggccatcaggtcactcccgtatgagcgcgaacgccccggcctggtccgcggaccggtgctcttcaacgccggattcgaatcgctgtcgatggtgaagctttatgacccggacgggtttgcggccccgcccaaacttgccgaccccatcgcgttcagcgactccgaccgggtgcgctcgccgcggaccggcaaggccaacccggctgcgatccgttctgccatggccggggcagccaccctggcggacgcctgggaacagctgccgcccggggagcagcacatcaacaccatccgcggcctcctctcccaggccctgcaggacggcgcggacttcgaccgcggggcctgggccggactggacttcgaacagatagacggcacccggcgcagggcatacctgccggtggtcaccctcgcaaaggattga

SEQ ID NO: 47906 - DNA, 858 bp, Arthrobacter sp. Leaf141
atgactgaaccctccgctgaaaccggaacagaaccttccgaatccgttgccgcagcagccggacctgctgccgtagcccgggcaggggcggacgccgaacccgccgccgggcgctcccttgccgccgggccccgcgacacgttcattgacggcgctgccctctttccgggcgacaccggggtgctgcccatgcgcgtgcggcaggcgctggtgaagctgctcaagggaccgtacatagacggcggccgcgacgagaagctctggacggttctgctggataaccgggtcatcatccgcagcaggctctccgaactgttcctcaccatggaactggaccctgaccgcaaaattgctgtgctacgtcccgtggatccggacgcgatcggcggcagcacccgctccagcatcctccggcagcagcgagcgctgagccgggtggagacgattgtgctgctccggctccgcctgctgctggaccggcacgtgacggcgcagactgaccccaccatcacccgcgaggaaatcgccgaccttgtggcccactaccagccctcgggccagcaggacgcgctgcgggattccgatgtggtgacccgggccatcaccaagctcctggcccgccagctcctgctggccacgggcctggacgacgtgtacaccatctccaacgcccttccgctggccctcccgttcgaaaacatcggcgatatcccggcccaaatcgatgccctggtcgcagcctcggcggacccgtcgggcaccgaaccgctccttgacctcgacgccgaaacagcgaccgacgatgatgccgccgacgacgcggacggtaccaccaccaccgaagaaggcaccaagtga

SEQ ID NO: 47907 - DNA, 3447 bp, Arthrobacter sp. Leaf141
gtgagcatcgccagcatgcttcccctcggggaagaaacgaacccggggcagatgcggctggcgctggtccaggtggtcaactggggcaccttccacggtgcgcacaccatgcatgtggaccgcaacggcaccctgctgaccggcaactcgggcgtcggcaagtcgacgcttttcgacgcgatgctgcgggtgttcgacgcgcggccgcggtccaacgaggccgcagcccagcgctccggcggggccgtggaggacaaacgcaccacctttacgtacatgcgcggcaaggtgggcgacaaagccgtgggcgagggctcggcaagtgcgttccagcgccccggcgccacctggtcagcggtggcgctgacgttcgacaacgcagccggtaccagggtgacggtgtccgcgctcttcgacctgcccaaaaacggcacggaatcgagcgttggccggttctacctgatcgacagctcaccgctggacctgccggccctggaggacatcgcggacaagcgcttcaccaaggccgcgctggagacggtgttcccggacgcccaggtttttgacgtgcataaggcgtttgccgagcgcttccggcgactgctgggcatcaactcggaccaggcgcttccgctgctgcgggtcatccaggccggtaaaggcctgggcggcagcgtcaacaccttcttccgggaccaggtcctggacgccccggccaccctggcggcggccgacgacgtggtggaggagttcagcaacctgatgtccatccggcagcggctcgaagacgtccgccagcagcgcgaccagctggcgccggtccctgggctgaaccgcgagtacgcccaggcgctgctggacgccaaccggctgcgggacctcgcaggcggcgaattcgaggcgtaccggcagcagctggcagtcaccgtccacgaaaagacgctgacccggttccgggagctcgcacaggccaaggcccaggacctcggggcggagcggaccgtccgggacgcgctggccaaggatctccggcagctggaaacggactacaacacccagggcggcaacgcgatctccgcgatcgaacagtcgctcgagaacgcgcgcgtcagcctgaagctccgcgaacaggtggaggaggccgcccgcgccgcgctcgccgatgccggcctgcagctggcctggacggccgcaggctgggatcaggcgcacgaacaggcagcagcccgctccgccgagctgaaggacgactcccaggccctgcaggagcttcggtttgaggcctttgacgcccatgcgacccgcaagcgggaactcgccgcggctgagcaggagctggtgtccctgaagacacgcaaatccctgctgccgccgtcgagcattgaaaaccggaccgcgattgccgcggccaccggtgtgcccgaggaccagatgccctttgcgggggaactgatggacctgctggaaggcgaggagcgctggcgccccgccgctgagcgggccctgcgcagcctcgccaccacgctgctggtgccaggcgagcatttcggcgccgtgacccggtacctgaacgcgaacaacatccgcggcgccctccgcgccgtggacgtgtccaagccgctgccaggcggtgcgctggcggtggaggacgtgaacgacggcgacctgctccgcaagctggatatcctcaccgccggcggggcagcggaagcaggggcatgggtccgcgagcggatcgccctcgacttcgccttcccctgcgtggaggacccggacgaactcgccgccctggacaagggcctgagccttggcggggtggtcaaacgcaaccgccacaccgtggaaaaggacgaccggttcaccagccgccaggactacgtgctgggcttcgacaacgccgccaagctggaactggtggccagtcaggtggccgacctccggcaggaagtggccaaggccgcggaactggcgcagagccgggaggaatcacaccagggcatgggccgccagcttgaagccctgcgccgggtcgcagcggacgacaggccctgggaccaggtgtcggccgccgtcgcggcggaggacctggcacggatcgagcagcggctcaaggatgcgctcgcagcgcaggcggatctggaaccgctgcgcgccaacatcgagcaggcccggcagaaacaccagtccagcaccgagtcggctgccgtcctccaaagcgagtacaaggcgctggaccggcagctgaccaccgccgattccctgctggatgccgcgcgcgggcgcctggccgaagcgccaccgtcggacgccaccgtcgaagccttggcgccctactttgacgggttcggcgacatcacggagctgcatgaactggacaacctggccaaccgggtgcgctccacgctcctgggggagctgcacgccgccgaatcccgcggccagggcaccgctgagcggctcaccaggatctttgaggggtttgtccgcgaatggggcagcgccatctcggccgaccacggcaccagcatcggcgccgcagccgacttcgaaacccggtaccacgcgattgtcagcgacgggctgccggcacaggaagccgaattccggcagttcttcaaccagcgcacgcacgaatcgttcagcacgctgctgcatctgctggatgaagagcggcggtccatcaccagccggatcctgccgctgaacggcatcctgtcgcaggtgaacttccatgaaggaagcttcctggagctggacatcaagcagactttgccgcccactgccaaggcgttcaaggacgccatccagaacgcgctcaaggcccgccacacccggccggcgcggcccgaagccggtcaggaacgcgacgaggacgccgagctcaccgcccgctacaagtcgctggaggccctggtccggcggctgggctcgcaggctccggaggaccgccgctggcgcgccgaggtgctggatgtccgcggccatctctttatccagtgcaaggaacaccgcgacgttaccggaccccgcggcgggaagcggtccgaggtctttatgcacgccgacaccgggtcgatgtccggcggcgagcggcagcggttcacggcgttcatcatggcggcagcgctcagctaccagctgggcatcgcggagcagggcttcaccacctacggcacggtgatgatggatgaagccttcgtcctggcctccgaagagttcgccggcgccggcatcaaggcgctgcatgaattcgggttccagctgctgctggcggccccggaaaacgtcatcgacctgtcccggcacctggggtccgtcaccgagatcctccgggacaagcgcaccaaccgttcaggcgtcctcacggccccggtgatcaggcccacggcaggggcggaaggggcctggcggtccgaggcgaacccggtggacatcgtcctgcgttag

SEQ ID NO: 47908 - DNA, 1566 bp, Curtobacterium sp. Leaf154
atgaccgacgtcgacctcgagttcgcccgggtccgagcggtcctcgaccgtccgaccctgcggctcatgtcccggccgaccagcgccacggtcctcgccgtgttccgcacggtcttcgaccgcgacgtgcagtacgtccccgccgaccgcatgcacctgcaggtcgaggagcacgtcgcgcgcctgcaggcggcgggtgcccgcgtgcccgcgagcgaccaggcagtgccggcggccagcgcgcagaccgacagcgagcaggccgagggcgagcaggaggcccgcccgaacggccgcgccctgtgccgcgagtgggtcggcgcccagtggctcgtccgctcgaactcccccgacggcgacgagcagtactccctgacgagccacgcgctcgaggccctgagcctcgtcgacgccctgtcggccgaccgcgccctgatcagcgagagccggctggcgatgatcgtcgacgcggtgcaccggtgggcggcccgtgccgagccggaccccgacgtgcagatccgccggatcgacgcccagatcgccgagctgcagtccgagcgtgcacgcctggagcacggtgacgacgtcgtggcggtggacgacgaccggatgcgggacgggtacaccaacatctccgacctgatccggcagctgccgagcgacttcaagcgcgtggaagaggcggtcgcgacgatgcaccgctcgatcgtcgaagacttccggcaagaggtccgcccgatcggcgagatcctcgacgactacctggcccgcaccgacaacctgatggaggcaacacccgagggccgtgccttcgagggtgccttcgagctcctgcgcgacgatgccctgctcctgcggctccgggacgacatcgcgacgatcctggcgcacccgttcgcgcagggcctcggagccggcgagcgtcgagccttccgcaacaccgtgacgatcctgcgccagggcatcgaggacgtgctcgcccagcgccgtcagctcaccgccacgctccgcgaccagatcgtcgcccacgacgtggtgcgcgaccgcgaactcgacgccgtgctccgctcgatcaaccgcggcctcgccaccctgatggaccagggcggcgcgcgtgaccggatcccgctgccgctcctgcctgcggccgccgaggtcggcacgctgcgcgagcgcttctacgatccggacgccgagtccgtaccgccgccgatcgaggagcccgacgacgacgtcttcgaggacctcgacgtcgagatgctccgcaagcacggcgggccgctgctgaccgagctgcgcgcggcgctgcgcttcgccgaggccgactccagcgtcgacgcgttccacgggctgccacccgagcagcgccggccggtcgagctgttcggcctcgcgcacctgctgacggggcacgaggacttcgagtcggccgcccacgtcgccgagcaccggacggtgcgtcccgacggcaccgcgatcaccttccagatgcccaccgctgcgctcgacgacgagcgcactccggtcggcgacgcacacgacgagaacgcacaggaggcacggtga

SEQ ID NO: 47909 - DNA, 789 bp, Curtobacterium sp. Leaf154
gtgagcgacacgacgccggcaccggtcgacgacacggtcccctacgacgaccccgcatccgtgatgcaggacgacgagcgtgacgagtccagcttcgccctcttcgagggcgacgagggccggctcgacgagcaccagcggcgcgccctggtggcgctgctccggcactcgtacgtcagctcccgcacgcaccccgacgagtggcgtgccgtgctcgacgccgagtaccagctgcggtcgcgcctgaacgacctgttcctcgagctgcacgtcgaccgtgaccgcgaggtcgcctggaagcgccaggcccggtcggagagccagcgccgcacgttcccgaccctgctccgcgacctgccgtacacccgcgaggagacgatcgtcctcgtctacctgcggatgcgtctgcgcgccgacgcccgaccgggcccggaccaggtcgtcgtcgaccgctccgagatcctcgggcacgtggcgggcttccgtccggcgaccgcgacggaccgcacccgcgacgagggccgggtcgcgaaggcgatcgagcgcctcgtgacggcgcgcatcctgatccgcacgtcagacccggaccgcttccgggtggcgagcgtcgtcgaggtgctgctccccctggagcgcttgctcgaactggacgcctggttgcggaccaccaccgcacaggacgaggcgaccgccccgggcggcgagccgaccgacggggacgacccgggcctcccggcagacggcgaagccgagaccgacaccgacgacgaaggcgagacggaagcgtga

SEQ ID NO: 47910 - DNA, 3369 bp, Curtobacterium sp. Leaf154
gtgaccgacacgttcgagatcccggcgctcttcgacacggtcgcgcagtggcgcgccgagtcgatgcaggtcgtcaactggggtgggttccacggccaccggcaggtcgaactgtccggcacggcgacgctcatctccggtgcctcgggcaccggcaagtccacgctgatggacgcctacctggccgtgatgatgccgtccgacgtgccgttcaacggcgcctcgaacgacgccaccaccggccgcgcccgcagcgctgaccagcgcaacctgctcacgtacctgcgcggcaaggtcgacacccggcgcgacccggagaccggcagcctgcgcgacgtgaacctgcgcggcgacgaccagaccacctggggcgccgcggcggtcacgttccggaacgacgacgagcggcgcttcacggtgctgcgtgcgtacatcgtgccgaagcgtgcccgcggggtcggtgacatccagatgaccatggcgacggtcgacgacaccttcgacctgcgccggctcgaggagttcgtgccgtcgcggttccaccaccttgagctgaccggccgcgtgccggggctcgtcatccgcgacacctaccaggagctcgcgtacacgctgcagacgcggctcggcatcggtgactccggtggcggcaaccgggcgatgcgcctgctcgcgcggatccaggccggccagcacctgccgacggtcgacgcgctgtacaagtcgctcgtgctcgagacccccggcacgtacgaggcggccgaccgggcgctcgcgcacttctccgccctcgacgaggcgtacgaggcgatggacaccgaggagcgcaaggtccgcatcctctcccccatcaccgacctgcacgacgagatctcgcgcgcgaccgaggccgcagcggccctggacggcatcgcgaccggtgccgaggtgtcgccgttcgcgcactggacggcctcgcggaagcgcgatctgctcgacgccgaggtgtcccgcaacgcccgcgagcgcacggcatcgcgcgccgaggtcgccgcggctgaagcccggcacgccgccgtcgagatcgagctgcgcgacgccgaggcccgactccgcgaccagggcggcaacgcgctcgcccagctcgaggaccgcatcgagcggctcacccgggagcgcgacggggtcgtccggacccgggcgacgttcgacgaacggaccgccgtgctgggcacgtccgtcgcgaccgaggccgacttcactgccgcgcagcgcagctcgcacgagttcctcgggtcgtacgccgacgcccgcaccgcgctcgacgagcggcgcgacgccctgacccgcgaggagtacccgctcctcgaccgcgaacgttccctgcgccaggagcgccagtcgctcgagcaccggcagggcgccatgccgctgccgatgcacgaggcccggctcgcgatggcgcgtgccgccggcatcgacccggccgagctgcccttcgtggcggaactgctcgacgtgctgcccggcgaggagcgctggcgcacggccatcgagtccgtcctggcgcccgtcgcccgcacgctgctcgtcgaccaggaccgcctcggcgacttcagcgaggcgatcgacgcacttcgcctgcccgtccgcgtgcagttcgagggtgtgccgaccggcccgcacctggacctcgacggcgacccggccatggtctccggcaagctcgcgatcaagccgtcgccgttcagcacgtgggtgcgcgagcggatcgagtcggaccgcaccgatgcccgctgtgtcgcctcggcatcggacctgggcggtggtggccgccgggtcaccgagtccgggcagctgcgcgacggccgtcgtggcgcgcacggtgaccgccggcagtcgaacgtcatcgggttcacgaacgaggcccgcgtcgccgcggtcgagcaggagctcgcctcgatagcgcaggacctcgcgacgctcgaggcacgccgcaccgacgtcgcacaggacctcaccgcgctcgacgtgctccgcgccgcccaccagcacgtggtcgacgccacgtgggccgcgatcgacgtcgacgggttgggcgcctccctcgcccggctcgacgaggaacggcaggcactgctcgccgccgacgacggcctccggacgctccgggcctcggtcgcccggctgcgcaagtcgctggacgaggctgccgaccgccgctccgccgcacggctgtccgtgcagcggctcgaggagcgccacgcggtgctcgtcgacggccaggacgccgccgccgagatcctggagcgcttcgagtcctcgcccggttcgctgccggacgaccagcaggcccgcctgctcgaggagaccttcgaggagatcggtgcgccggacggcgtcgacgggttcgacgacgccacgcgacggctgaagcgtcggctcgaggagcggctctcccaggccctcgacggcgctgcggcggcctcgacctcgttgacgctgacgttccagcggtaccaggatgcctggcccgacccgaacctcggcaccggcgtcgcgtcgtaccccgattaccacgcgatcctcgaacagatcgtggcgaccggcctgcacgcgcgtcggagcgaatggcgtcggcgcctgtcgcagtggagcggcgaggacctcgtcccgctcgccggcgccttcgaccgcgccgtcgtcgagatcgaggagcgcctcgagccggtcaacgagatcctgcgggagctgccgttcggcgcgaaccgggaccgcctgaagatccagatccgccgggtcacccgcgaggacgtcaccgcgttccgccgcgagctccgcgccctgtccgcctcggtcgacaccgagctgaccgacgacgtgctcgagacccggttccgacggctccggcgcttcatggccgtcatccggcccgacccggacgccgcccgtggccgcaccacccagcgcgacgcggtgctcgacgtccggcggcacatggagatcacggcggtccggtacgacaccgacggcaacgacctcggcgtgtactcgtcgctcggtgacaagtccggtggtgagacgcaggagctcgtggcgttcatcgtcggcgccgcgctgcgctaccagctcggtgacgagacccgtccccggccccggttcgcgccggtgttcctcgacgaggcgttcatcaaggcggactcggagttcgccggccgtgccgtcaccgcgtggctccggctcgggttccagctcgtcgtgagcgcgccgctcgacaaggtcacggcgctcgaaccgtcgatggagcggctgctgtcgatgcggaagcaccccgagacgggccactcgtccatcaccgagatcgcccgggtggagccggcagccgtctga

SEQ ID NO: 47911 - DNA, 1731 bp, Frigoribacterium sp. Leaf415; identical to SEQ ID NO: 47780

SEQ ID NO: 47912 - DNA, 996 bp, Frigoribacterium sp. Leaf415; identical to SEQ ID NO: 47781

SEQ ID NO: 47913 - DNA, 3465 bp, Frigoribacterium sp. Leaf415; identical to SEQ ID NO: 47782

SEQ ID NO: 47914 - DNA, 1389 bp, Methylobacterium sp. Leaf465
atgctgttcacacacctctccgacgatctgttcaagccgctcgcctcgccgagccgggccttcaatgcggcgctcctgctgcacctgcacggtcgggtcttcggggacaccgccgaacccctgcgcaagagcgaacttctgacggcgatcggtgacttcgccgccgatttcgtggaccgggagatcgacgacgacgcctccggcacggtggaaccgagcgagcgccgctcggtcgtctatcgccgccttctcgatgccggctggctggtggagcggcgggagcgctatgttccggtggtcgagttcgaccccgaggcccggatggtcatcgaggaactggcgcggctcgacaggggcgagcggcgctcctacggcggtgccgtcctcgacgtgctgggcagcctggaaagcgcgatcgccaaccccgccgagaggtccgaggccctggtcaacgcggccaagtcggcccgtaccttcctcagtcatctgcgcagcctggctggatcgatgcgcaagagcgaggagcgcatcctgcgcgaggcggatcagggcgtcgccctgcgcctctacttcgaggagttcgtcgcgcggcacctcgtcagcgactaccggacgctgcacacccgcttcaatcctttccgcttccggtcgggaatcgtgcgcgaggccggccgtgccctgcgcgatcccctcaccctgcgcgccctgaccgatgcgggtctccgggaggggcgggcgcccgaccgggagacggccgagcgcgccgtccgcggcgatctggccgagatcctggcgatcttcgagggtctcgatcgccacctcgacgtggtcgccgacatcgtcgcccggctcgagcgccggatcgccgccacgctgcgctacctggaccatcgggattccgaccggatcgagcgcacggccgcggccctgcgcgcggtggctggtggcgatgacgacctcgccggcctgcccgatccccaggtctcgctgttccgccccccgatcggcgagccgcattgttacgcaccgcgcctgcgccgggcggcgatcgaatccgagccgttgcccgagatcgagatcgatcccgtcatcgaagccttcatcgccgccaaggacgcgttccgggagcgcgtcgcggtcacgcccgagcggatcgtggccttcatcgaggcacggctcgggccggagcgcaccatccggggctcccagatccggatcgccgacgtcgacgatttcgtcgtgttccagcgcctgcgggagatcgacgtcctgttcgacgggagcctgcgcggccgctatcggctttcgcggatggagggtcgggtgtcgaatggctggctcgattgcccggacttcctgctggagcgggcgccggcgctgcgccgctag

SEQ ID NO: 47915 - DNA, 636 bp, Methylobacterium sp. Leaf465
atgctcgaatcgtttcgcgccatcgtcgacggtgaggacttgccgccgcccggagcccgcgcgccttcggaagaggagttgacccgggcgcttcaggtcctcctgaagagccaatgcgtctacgccggaacaccgggcatcgggcgctcctatgagctcgcacggcactacgcgcccttcttccaagcctacttcgcgtgcctcggctaccagttcgacgtgatgcatcgcgatcagatggtgtgcctgcgggttccgcccgagggcgtccgtcacgatgcccaggccgagcgcctgcgcaaggacgagactctggtcttgctcgccctgcgtctcgcctacgaggaaggcctgcgtgcccaccgggtgaccaccgagggtgtcgtggaatgcacgaccgacgacatcgtcgaatcgatccgcaccgctacgcgcagcgatccgccggaagaggcccgactcaccgagatcctccgtctgttcgcgcgcaagggggccctgcgcctgggcgaacgcgacaaggtcgagaagatcacacccttgatggtgatgcccgggatcgcggtgttgtcgccggacgcctggatggatcaggtccgagcctggggggctgcgcgcggcgacgaggaggcgtga

SEQ ID NO: 47916 - DNA, 3456 bp, Methylobacterium sp. Leaf465
gtgtaccgccttaccgatatcgtcctctcgaactggtacctgatccgccgcgagcagattcggatccggggcgcggctgcgctggtgggacctacgggggccggcaagtcgaccatcttcgatgcggtcggcacggtgctggcgggcaacaatgccagccgcctcgccctcaacgcttcggcctcgggacgcagcgcccggaccgtgcgggattactgcctcggctggatcagcgatccggccgagggcggacgccccacccgtgaagcctgcgagacactgatcgtcctggtcttcgagaacgagaccacggggcgcgtcgtctccgccgggctcgccctggcggcccgggcagaagacagccgcgagacgaccctgtcccgcttcgtccatgtcggccaccgcttcgaggtcgccgactacgtccgtgaggcgccgggcggaagcttcgtcgcgccctgggccgagatcgccaaggacctgcgcacccgcgggagcaccttcgacgagtaccgagcgtccggcgagcgcttcaccgccgaactcctcggaaaccttcgcgagggcgcggcggtgccggagccgcgccacttcctgcgcaccttctccaacgccgtggcgttcaagccgatcttcgattcgtccgccttcgtccggtccttcgtgctcgaacccgagcccctggacgtcgcccgcatccggcaatcggtggagacctggcggcgcctcctcgagaccatcgaggagttggaacggcgcctcgcccacctcgcccggatcgtcgggcgctacgagacctgggccgaggcgagcctcgccacggttctcggagacctgcgcgccgctgatgcggacctgcgtcggcgcatcatcgacaccgtgaccgcccgccagaccctcaaggacgtcgccgagcgcctgcgcatcgcgcgcgagagcgtcgccaccagccagggcttcgtgcgcgaaatcgacggcgagatcgcgggtaagaaggcgctgctcgccggaaccgccgccgaggggcgcctcgccgcctcgaacgccggcctcgccatgttggcccgcgaccgacgcgacctggccgcccgggtcgccgaactggtcggaatcgtcctcgataccggcaagctcgcggtgatcctcggcgaaatccgcaaggtttcgccggaggccgcccgcctggtggaggcctgcgcccgatcgggtctgcgacgcgaggccaatccggaagaaaccctgcggtcggacggtccgctcgccgcgctgatcgccggactggctggaatgcccccgatcgccgcgcccctcgagcgggcggcggaggacgcggccctgcgggcccgcgccctcgagaacgaggcgcagtcccgcgcgccggcaccgagcgcggggcggggggcggcgccgcgtctgtcctcggacgtggcggcgttccgcgaagagctgtcccgcctcggcatcgtggcgacaccgatctgcgagctggccgagatcatcgatccaaaatgggggcaggccctcgagggcctcctcggcggcgcccgcgaggcgcttgtcgtgcaaccggaccgcctcaacgaagcgttcgcgcatctcgaagcgcgcaagagccagttctaccgctgtctcctggtaaagacgaccgatacggcccggcggcgcggcgggcgcgacgacgagggtccgctcgcactgatcgagacggccgatccccacgcgcaggccttcctcggggcgcgccttggcggctacgatctcgccccgaacgacgcggccctcgcgcatatgagccgggccgtggccccgagcgggcgctcgacctcgggcatggcttattcggtggtgcgcccggtccagctcatgatgacccggggccaccggggtccgaccgcagagagccgccaggattgggagcaagcggtctccgaggcgcgccgagcccgggcagaggccgatgtcctgcgggaagcggcccggatcggggccgccctcgcgcgccgcctgtccgaaacgaacctggatttcgctgaattgcgcgccgaggcggacgcgatcgagggccgacgccgcagcctgaccacggagcgggagagcgtggagcgggccgagaccggcgtcttggaggccgagctcgcggagctcgctaaggagcgttcggcctatctcaccgagcttgtccaggtgctggagccgaagcgagacctgctgctgggcgaggaggccggcctgaaagccaaggttgcggcgagccacgaggccgcccgtgctgcgctccaggcgcgccggaccgcgtatcagcgctgggccggcggcgacagcatgcgcatccggctcgtgcgtccggacgccttcgacccgaaggcgctcgcgacgctgcgtgccgagcgtgcggatctcgacgccaaggcgctggcgagtcatgccaataccgggcgtgcgcgagcccgtgaagcggcggagacggcgcgaacgcagggcagggcggccgagcgcgacctcgccgagtactgcgtgcagtggcgggtggaaaatccgctgggggcgagcgacgtgccggcctccttcggctacggctgggcgaagcgggcccatgacgaggtggcgagccacgaactgcggcgctaccgggatcaggcgcggcgggcggagagcgagatgcgccgcctgatgatcgaagacctgttgacccggctcgcggacaagttcgagcgcgtacgcgcccggctcgaggccctcaacgagcgcctgtcgagccagaccttcacggggcagacctatgccttcgaggccgaggtggatcggcgctacgccgccgtccatgccctggcgacagaggtcgcccgctcgccggatgcggcccaggcgatcctgccggacgagggcggcgcgattcccgatggtccgctcgcggcggcgatcgacgagatcaccgccctgatcgccggtgaggagagcgccgcgcgcctcgcggactaccggaactacttcgtctacgagatcggcatgcgcgatcgggcgggaaaccgcaccacgatgtcgaaccgcgcgctgcgaggttcgggcggcgaagcgcaggcgcccttctacgtcgccatcgcggcgtcgctcgcctcggcgtattatccgggcgaccgacccggcgacgagaaccccggcctcggcctctgccttctcgacgaggcgttctccaagctcgacgtgcgcaacagtcaggccctggtcgatctctatcaggcgtgggggctgcaactgctgatcgcggccccggaagacaagcggacgaccttgaccgaggtgatggataccatcgttaccgtctacaagagcccggatctctcctccgtgcgaatcgaggccgaacaccccctggaagctgccaagcgcgccctggcggcgatcaatcccgagcgccagggcatcgaaggcttccggatcaccgacgccgccgagtag

SEQ ID NO: 47917 - DNA, 1476 bp, Microbacterium sp. Leaf436
gtgagcagcacccgaaccgaagccgcgtacctgcgctcggtgacggcgttcaagaaccccacgctcgacctgctgcacgggcgcttcgcccccttcgtcgtggccgtgctctcggtggtcttcacccccgaccgcgcggcggtcaccgtcgccgacgcgcacgtcgaggtggccgaggccatcgacgagctgcgcgcggcgggctacgacaccgacgacgaccgccgcatccccgcggggtcggcgcgcgagatctgtcgcggctgggtgcgcgtgggctggctcggcctgcagatcgaggacgacgtcgaggtgtaccgcctctcggcgcacgccgtgggcgccctcgagatcgccggtcgcgccggcggcggccgcgcccgtgtctcccgctcgcgcgtgcgcacgcttctcgacgcggtcgagcgcctcgcccgcgacgccgagagcgaccccgcccgacgccgcgaggcactgctcgaggagcgggcggccctcgacgccgagatcgccgcgctggaggagggcatcgtcgagcccctcgacgacgaccacctgctcgaagaggccgagaacgtcatccacctcgctcgcgagttgcccgcggacttctcgcgcgtggcggagtcgatcgccgcgatgcagcgcgacgtcgtcgccgagctccgccgcgacgtgcgccccaccggcgaggtgctgcgcgagtatctcgagcgcgggcgccaggtgatgcaggccacccccgagggtcgagccttccagggcgcgctgcgtctgatcggcgatcccgagaacatcgacgacctcaccgaccagctgcacgccgtgctcacccagcccttctcgcggctgatgacccccgagcagcgggccgagctcgacgccatcgcccgacgcgtcgaagcgggcgtgcaagaggtgctcaccgcccagcggcgggcctcgcacgtcatcaccgcgcaggtgcgcacgcacgatcccatccgcgatcgccaggtcgacgacctgctgcgcggcgtgatggcggggctgcaccgctggagccagaccaagacccccggtcgcgtcgagcccgtgcgcacgctcccgctcgccgacatcgggcacctgcgccagtcgctcagcgacgtacgtccggccggggcgccggcgccgttggcatccgcagacgtcgaggccgagttcgtcgacgccgacacccgcgcctggggcggcccgcactacgccgagctcgaggcgtacgtcgccacgctcggcgacggcttcgatctggcgaccgccttctcgggcggctccgccgacacccgccgcccggtcgatctggtcggcctgctcgagatcgtgcatcgcggggggctcaccgagaccgacgacgtctcgatcgtcgaggccgtacgccccgacggcaccacgcgacgcttcgccttcggagcggtcagagcgaacagcctgcgagaaaaggatgccgatgactga

SEQ ID NO: 47918 - DNA, 774 bp, Microbacterium sp. Leaf436
atggagaacgaccccgacgcgctgttcccgggcgatcgcggcatcctggactccgaggtgcggcgcgtgctcgtgcgcatcctgcagcgccggttcctgagcgccgagaactcccccgccgagtggaagctgctcctcgagcaccagcagatgatcgagtcgcgtctgaacgatctgttcgtgcggctcgtcgtcgaccacgcgcggggcgtcgcgtacaaggagcaggtgcgcagcgacgagatcgacgtgcccatcctgctgaaggacgaggcgtactcacgggccgagacgctcgtgctcgtatatctgcgcacggtgttccagcgcgagaccaccgccggcaccgcgtcggcgcgcgtcgacgtcgaagaggtcgagcagaccgtgctgacgtacttcgccgagagcgacggcacgcgcgccagtcagcagcgggccgtgcgcaccgcgatcgcgcgactggaccgcgagggcatcatcgaggaggagtccgaggggcggtaccgcatcgggccgctcatcgaggtcgtgctcagcgccgagacgctccgcgagctgcagctctggttggaggagcagacgcgggatgccgacagctcacgcgagggcggcggcgtggcacccgctctcgacgagcagacacaggatgccgggagcccacgcgagggcggcgtcatggcatccgccctcgacgagcacacacaggatgccgaggctgccggtgaccgcgaggtcgcggcatccggaccgttcgagggagacccccgatga

SEQ ID NO: 47919 - DNA, 3354 bp, Microbacterium sp. Leaf436
atgaccatgctcgagaccctgttcggcctcattcctgccgcctcgcgcggacagcagtgggtggccgaagacctgcagctcgtcaactggggcggctacgacggaacgcatcgcgtgcgcttcgcccccaccgcgacgctgctctgcggtggttcgggctcgggcaagtcgacgctgatggacgcctacgtcgcgctcatgatgccgcacaccaccccgttcaacggcgcctccaacggtgcggtggtggggcgcccgcgcgggcaggagcagcgcaacatcctctcgtacggccgcggcaagctcgatgagtcgcgcaccgatgagggcacgaagatccgggtgctgcgcggcgacggcgtcgacacgtggaccgcgatcgcgatgacgtgggccgaccacgacggcgcccgcttcaccgcggtacgcgcctggtacatccccgccgccgcccgcacgctcgacgacgccgtcaaggtgcgcgccactgtgcacggcgcgttcgacctgcgcgatctggagcgggcggcgcagcagcacctgtccgacgcggcggtgcgggcgacgggactcgacaccctcgccaccgaccgcgagttctcggcccgactgcacggcgttctcggcatcggtgcggcgggggcgggcacgaaggcgatgagcctgctcgcgcgcatccaggccgggcagcagatcaccaccgtcgacgacctctacaagcgcatggtgctcgaggagcccgagaccctcaccgtcgccgacgccgtcgtgtcgcacttcgacgggctcgagtcgacgcgcacgcgcatgctcgaggcgcgccagcaggtgcgggcgctgcagcccatccgtgcgatgaaaacgcgcatcgacgaggccgccgaacgtctgcagctgatcgacgcgctcggacgcttcaccgaccccgactcgcgcgcctcgctctggcgggcgcagcgccgagtcgatctgctcggcgcggtcgaggcggagctgcgcgaccgcacgcacgccaccgacgcgctcgtgcgcgaacgccaggccctcgccgacgccgccgaagccgagcgcgaaggcctcggcgacgtgctgcgcgcggccggcggcgaccgcctcgacgccgcccagcgcgagctccgcacgctcgagcggcgcctggccggcatgcagcgcgaccgggagcgcttcgagacggcgctcgcggtgctgcagaccgaggtgtcgaccgagaagcagttcgccgccctcgtggacgacgcgcgccgcaccctcggtgacgcggatgccaagacggccgtccgcgacgcgttcgtcgccgccagcagcacccacaccgacctgcgccagcagctcgccgccctcgaggccgagcaccgccgcacgcagacgcgagacgacaacatcccgccccgtctgcacgaggcacgcgagaccctggccgaggccgccggtctgaccgccgccgagctgcccttcgtcgccgagctcgtggacgtgcgcaccgagtacgagccgtggcgcggggccttcaccctcgcgctcggggggttcgcgacgacccttctcgtggatgccgcgcacctgacatcgttccgcgcggcgatcgacggcgtccggctgtcggagcgcctgcggttcgagggcgtgtcgaccgggctccccgaacgcggcgggctggatccggcgacccttcccgggcgtctggaattccgcacctcgcccttcaccgggtggctgcaggaccggctcgagcagcagttcgcgttcgtctgcgtggatgccgcgtcggagttgtcgcggcaccgcctggcgctcaccatctcggggcagacgagccagggtgcacgcggcgcgcacggggggtcgatccgtcagagcgtgctcgggttctcgtcgcgcgtgcggttgaccgagctcggcgagcagatcgtcgccgcgcgccgcgccctcacggccgccaaaaccacggtcgacgaggcggccgctgccctcgacgcgttcgacgagcggcgcagcgccctcgagaagatcgccgacctgtcatgggaccaggtggacgtggcatccgttcagcgcgatctggaccgctggaacgagacgatcgccgagatcaccgccggcaatccccgtatcgccgagctgcaggagcagatctcgggcacccgtgcccgggccggccgcctgcgcgaggagatcgggggggccaagaccgaacagcaggcgatggccgcgcgctgggccgagatcaccgacgacgtcgacgcggcgcagatgctcatcgaacgcgcggaggattccgagaccgccctctcgcccgacgagatcgactacctcgacgctctgttcgtggctccgggagcgtcggacgcgacgccgtcgcagcttctcgcgagcttcgacgccgccctcgaatccgcctcccgacggttgctcgaggagcagcggtcggcgcaggagacgtggggcgaccagcgcgagagcctgcggcgcacgctcatcgcgttcaccgaccggtggccgagtccgaacctgctcgccgaccccgacgagtcgctcggcgacttcgagcggatcctcgccgacctcgaagcgagcggcctgcacgagctcgaagcggagtggcgcgacagtctgctgcgcctgtcgggcaacgacctgacgagcctcgactcggcgctgacgcgggcgctgcgtgagatccgggagcggatcgcgccgatcaacgacatcatgcaggacctgccgttctacgacgacgagcaccgcctgcagatcgtgccgcgcgaggggcagtccgaggtgcgtcgccgtttccgtcgcgagctgcgcgacgtgcgtgcggccatcgacgcggcctcgtccgacgaggaacgcgaagcggtgtacacccgcatggcgcgcctcatcaaccgcatccgctcgacagcgcccgacttcgccgacctcgtcgacgtgcgcaaccacgtgcgggtgagcgccgagcgcttccgcgccgacaccggcgagcacgtcgccctctacgaccacatcggtgagaaatccggcggggagtcgcaggagctcatcgcgttcatcgtcggagcggcgctgcggtaccagctcggggatgccggagccgagcgcccccgctacgccccggtgttcctcgacgaggcgctgatcaaggccgacgcgcacttcaccaagcgcgcgatcggcgcgtggcgcggcctcggattccagctcgtcatcggcgccccgaacgacaaatacagcgcgatcgagccgcacgtcgacgtcgagtacgacatcttgaaggacacgcgcggacggtcgtgggcgaaggcgaaggtgggggtcgcggcggaggggtga

SEQ ID NO: 47920 - DNA, 1377 bp, Methylobacterium sp. Leaf469
atgctgttcacccgcctgtccgacgacctgttccggcccctcgcctccccgagccgggccttcaacgccgccctgctgctgcacctgcacgcgcgggtgttcggcgatacggccgagcccctgcgcaagaccgagctgctcgccgccatcggcgacttctccgccgattacgcccaaggcgagatcgccgacgatgagaccacgcccgtcgatcccatcgagcggcgctcggccgtctaccggcgcctgctggactccggctggctggtggagcggcgcgagcgctacgtgccggtggtggatttcgaccccgaggcccgcatcctcattgaggaactcgcccgcctcgaccggggcgagacccgctcctacggcggcgccgtgctcgatgtgctgggcagcctggagagcgccatcgccaacccggccgagcgttccgaggccctggtcaacgccgccaaggcgtcgcgggccttcctcagccacctgcggacgctcgccggctccatgcgcaagatcgaggcgcgcatcctggcgcaggaggaccagcgcgcggccttccggctctacttcgacgagttcgtggcccgccacatcgtcagcgactaccgcaccctgcacacccgcctgaacccgttccgcttccgctccggtatcgtgcgcgaggcgggccgcgccttgcgcgatcccctcaccctgcgggccctggcggaggccgggatccgcgagggccgtgcgcccgatgtcgaggtggccgagcgagccgtgcgggcggatctcgcagagatcctggcgatcttcgagggcctcgaccgtcacctcgacgcggtggccgacatcgtcgcccgcctggagcggcgaatcgcggcagccctgcgctacatggaccaccgggattccgaccgcatcgaacgcacggccgcggcgctccgcgccgtggcgggcaccgatgcgccgatggagggcatgccaccggccgggatctcgctcctgcgcccgcccatcggcgccgtccacctctacgcgccgcgcctcaagcgcccgcccatcgactgcgagcccctgccggaactcttcctcgatctggccgtggaggccttcatcgcggcgaaggacgcgttccgccaccgcgtggcggtgacgcccgaccggatggtggacttcctcgagggccggctcgggcgcaagggcgccgtgcggggttcgcagatgccgatcgccgacgtcgatgccttcgtggtgttccagcgcctgcgcgagatcgacgtgctgttcgacgggagcctgagcggtcgctaccgcctctcgcgggtcgagggccgggtcgccaacggctggctcgactgcccggacttcctgctggaacgcacacgctga

SEQ ID NO: 47921 - DNA, 633 bp, Methylobacterium sp. Leaf469
atgctcgaagccttccgcgccatcgtcgacggcgacgagccgccgccgcccggcgcccgtgcgccctccgacgaggagctgacccgcgccctgcaggtgctgctcaagagccagtgcgtctattccggcacccccggcatcggccggacctacgacctcgcccggcactacgcgccgttctttcagagctacttcgcctgcctcgggtacggtttcgaggtctcgcaccgggaccagatggtgttcctgcgcgtgcccccggagggcgtgcgccacgacggtcaggccgagcgcctgcgcaaggacgagaccctggtgctgctcgccctgcggctcgcctacgaggaagggcttcgcgaccaccgcgtcaccaccgagggggtggtggaatgcaccaccgacgacatcgccgaatcgatccgcaccgccacccgcagcgatccgccggaggagacccgcctgctggagatcctgcggctgttctcccggaaaggcgccctgcgcctaggcgagcgcgacaagaccgaaaagctcacgcccctgatggtgctgcccggcatcggcgtgctctcgcccgacgcctggatggagcacgtccgggcctgggcttcggccggggatgacgccgcctga

SEQ ID NO: 47922 - DNA, 3459 bp, Methylobacterium sp. Leaf469
gtgtatcgcctcaccgacatcgccctctcgaactggtacctgatccggcgcgagcagattcgtatccgcggcgcgacggccctcgtcgggccgacgggggccggcaagtcgacgatcttcgacgccgtcggcacggtgctggccggcaacaacgccagccgtctggcgctcaacgcctcggcgtcgggccgctcggcccgcacggtgcgcgactattgcctcggctggatcagcgacccggccgagggcggccgcccgactcgcgaggcctgcgagaccctcatcgtcctcgtgttcgagaacccggtctcgggccgcgtcgtctccgttgggctggcgctgagcgcccgggccgaggacagccgcgagaccaccctgtcgcgcttcgtctgcacaggccatcgcttcgagatcgccgactacgtccgcgagacgcccgacggctccttcgttgcgccctgggccgagatcgccaaggatctgcgcatccgctccgagaccttcgaggagttccgcgcgtccggcgagcgcttcaccgcggaggtgctcgggctcctgcgcgagggcgcgccggtgcccgaaccccgccacttcctgcgcaccttctccaatgcggtcgccttcaagccgatcttcgattcctccgccttcgtgcgctccttcgtgctggagcccgagcccctcgacgtcgcccgcatccgccagtcggtggagaactggcgccgtctccttgagaccatcgaggagttggagcggcgcctgtcgcatctcggccgcatcctcgcccgctacgagacctgggcggaggcgagcctgtcggcggccctcgacgacctgcgggccgccggcgcggatctgcgccgccgagtcgtcgaatacacaaccgcccgcaccggcctcgccgatgtcgccgagcgcctgcgcatcgcccgcgagagcgtcgccaccagccagggcttcgtgcgcgacatcgacggcgagatcgcgcagaagaaggccctcatggccgggacccacgcgcaggggcggctcgccgcctccgatgcgggcctcgccgtgctcacccgcgaccaacgcgacctcaccctgcgggtgacgggcctcgtcggcctgatccaggacgtcgcccgcctgacggcggtcatcggcgaggtccgccgcgtcgatccgggtgcggcccgcttcgtcgaggcctgcgcccgcgcggggctccgccgcgaggccccgccggaggaaacgcttcgctcggacgggcccctgaatgccctggtgacggcgctcgtcgacatgcccgacatcgccggccccctcgatacggcggccgaggacatggccctgcgcgcccgcgccgccgagacggaggcgcagggcctttcggcgcccttcgccggcggcggggcggccaagggcgcgcgcctgtcctcggacgtggcggcgttccgggacgaactcgcgcggctgggcatcgacgccgtgccggtctgcgaactcgccgagatcgtcgagccgaaatggggcatggccctggagggccttctggggggtgcccgcgaggccctggtggtgcagcccgaccggctgaatcaggcgttcgcccatctcgaagcccggaaagcacagttctaccgctgccttctggtcaagaccacggacacggcccggcgccggggcgggcgctacgacgacggccccttgggcatgatcgagacccgcgatccccacgccgaggcgttcctcgccgcgcggctgggcgggtacgacctcgcccccgacgatgcggccctcgcgcatatgagccgggccgtggcgccgagcgggcgctcgacctccggcatggcctattcggtggtccgtcccgtccagctcatgatgacgcggggcagtcgcggtccgacacaggagggccgcgaggccatggagcgggcggtggccgaggcccgtcgcctgcgcggcgaagccggcgtgctgcgcgaggccgcccgcatcgccgcgcagctcagggcgcgcctggccgaggctcccatcgacctgcccggcctacgggccgagtgcgacgccatcgagggccgccgccgcagtctcgccaccgagcgcgagagcgtcgagaaggccgataccggcgccctcgaagccgaattgaaggagctcgcgaaggagcgttcggcctacctcacggaactcgtgcaggtgctcgaacccaagcgcgatgccctgctgggcgaggaagcgggcctgaaggccaaggtcgcctcctcccgcgaggcggcgcgcgcggcgctggccgcccggcgctcggcgcatgcgcgctgggtcggcggcgacacggtccgcatccgcctcgtgcgtccggagggcttcgacccgcgggccgtggccaaggcccgggcggacctcgccggcctcgacgcgaaggaactcgcggccgccgccgccgccgcccgcagcgccgcccgcgaggccctcgagacggcccgtacgcagggccgcaccgccgagcgcgacttggccgagtattgcgtgcagtggcggatcgacaaccctctggggcgcggcgacgctccggcctcgttcggctacggctggacccggcgcgcctacgacgaggtcgcgggccacgagctcaggcgctaccgcgatcaggccgtgcgggcggaaggcgagatgcgccgcctgatgaccgaggacctgctgacgcgtctcgccgacaagttcgagcgcgtccgcgcccgcctcgacgccctcaacgaacgcctgtcgagccagaccttcaccggccagacctacgccttcgaggccgccgtcgaccggcgctacgccgccgtccacgcgctcgccaccgaagtcgcacgctcgcccgatgcggcgcaggcggtcctgccgggccagggcgagacgccggccgaaggcccgctctcggccgccatcgaggagatctcggccctcatcgccggtgaggagagcgcggcgcgtttggccgattatcgcaactacttcgtctacgagatcggcatgcgcgatgccgccggcaaccgcaccaccatgtcgaaccgggctctgcgcggctccggcggcgaggcgcaggcgccgttctacgtcgccatcgcggcctccctggcctcggcctactatcccggcgaccgaccgggcgacgaaaatccggggctcggcctctgcctcctcgacgaggcgttctcgaagctcgacgtgcgcaactctcaagccctcgtcgacctctaccaggcgtggggcctgcagctcctcatcgccgcgcccgaggacaagcgcaccacgctcaccgaggtgatggacaccatcgtcaccgtctacaagagcccggacctgaagggcgtccgcatcgaatccgagcaccccctggaagcggccaagcgcgcgctcgccgccatcaacccggaacgccaggggatcgaggggtttcgcctgcccggtgcggctgcgtga

SEQ ID NO: 47923 - DNA, 1482 bp, Duganella sp. Root336D2
atgaaaccggacaaaccattagccgcctatcggcaaatgcgccagcagcctttatggcggcttttggcggccgccaacgggccgactgtcatcgccctgctgcaagcacatttatacgaaagtgaacgcagcctgcctgcatccatcttccacgagcgcattgagcgcgaacttgaacgcctgcgcaatcttggtgaggagtggccgcaaaccgcgcagcaatatgccgcttcctggttgggggatggctacctcgaacgtcgtttcccgcccggctcgaaagaagaagagtacgagcttgcgacgtctaccgtcgaagcaatccgcttcatttcaagcctggcaaaaccacatagcgccgccacggagagccggctagggctggtgatagacgcgctctccaagctgtccgacgataccgacaccgacaagggccgtcgaattgcacgcctgcgcgctgagcaggcacgcatcgagcgcgaaattgccgatatcgaacaaggcaaggcaatcatccttccggaagcggcggcgctggaacgcacgcgcgagatcattgcgctggcagataacctggcgggcgacttccgccgggtgcgagaccagttcgagcaattgaaccgcgacctgcgcgaacgcatcatggacaatgaaggcagccggggcgaagtactggattcgctgtttgccggcattgacctgatcagcgagagcgaagcgggccgcaccttctcggccttctggcgcctgttgaccgatcccgtgcagtcctccaccctggaggatgcattggaccagttaatgtcgcgcgaatttgtcgctgcgctgaatccagccgagcgtcaattcttgctgcgcctcacgcgtacgctactggagcaaggcggcatcgtccacgaagtgctgcaatccttcgcccgcagcctgaagcacttcgtacaaagccgggaattcatggagcagcgccgcctgacccagttacttcgctccgcccagcgttcggccctggcattgaaggaagaggtcaaggcgacggataccctcaactacacgctggagctgaccagcagcaagctgtcctcattgtcgcagtggctgctgcacgatcccgcactgcaggcactgccggaccggatgggcgaggctgccgcagtcccgatcgaccttgccgctatcggcgaactggtcgcccagtcggaaatcgacttccgctcgctggcagtcaatgtccaggcggtgctggcaacgcattcccagtgttccgtcgccgacgtgctgtacgcgttccccgccgcccaggggctgggcagcgtgatcggcctgatgtcgctgggcagccgctatggcatggtggcccagtccagcgagaccgttacctggcttggcaacgacaacgtgcaacgcaaagctacaataccggctatctacttcttcaaggatcaacaggatggacttgcccgaacaggcggcagcgcaggctga

SEQ ID NO: 47924 - DNA, 684 bp, Duganella sp. Root336D2
atggacttgcccgaacaggcggcagcgcaggctgacgttgcgccggcgccgaccgttctcttcatgaacgataccggtgagctgccgctggatacgcgccgggtgctggtgcagctgctatcaggaccttcgcttgaagggcgccgccatcccaagctgtggcctgtgctgctgcgcgacgagacagtggtgcaacgccgcttgcacgacctgttcctggacctggtgatcgaccgcgacctgcaggtggcctttacacgccaagtggatgccggcgacctggatataccaatcctgttgcgccgcgcccaattgacgttcatcgactccgtgctggtgttgttcctgcgccagcgactgacccaggccgaagcgcacggcgaccgcgccgtagtagcgcgtgatgagatggtggagaacctggtgctttacgaacgcgcagccagcaccgaccgtgccggcttcaccaaacgtatctccgcctccatcgagaagatgaagaagcacaatatcctgcagaagatccgcgccagcgaggaccgctttgagatctcacctacgttgaagctcctgttcaccgctgaggagattgtagcgctgacggccctgtatgatgcgatggccgctggcgaatcacctgaactggagcgccagccgctggatgatggcgaggacgaggaatga

SEQ ID NO: 47925 - DNA, 3348 bp, Duganella sp. Root336D2
atgaacgaccagttccgcatggcgcgcctgcaggtattcaactggggcaccttcagtggtttgcacgatattccgatcagcgagcgcggtttcctgatcgtcggcccgtccggcgcaggcaaatcgaccttgctggatgcgttttccgcactgctggtgccgccgcgctggatcgatttcaacgccgcggcgcgcgaggccgaccgcactgggcgcgatcgcaacctggtcagctacatccgcggcgcctggtctgcgcagagcgatagcgcctccggcgttacgtccacgcgctacctgcgcggcggcaccaccacctggtccgcgattgccctgcactaccacaacagcaacgggcaggatgtagtgttgctccagctgttctggctgcgtgggaacagcaatgccaacaccgatgtcaagcgcatcttcctcgtcctggagcgcccgttcgacctgcgggaactgcaggactttggcagcaccaatttcgatatccgcaagctgaagcaaaccctcccggacgcccacatcaaggatgaattccggccctactgcgagcgcttctgccgcttgcttggcatcgagagtgaaatgacgctgcgcctgctgcacaagacgcagtcggccaagaacgtgggtgacttgaataccttcctgcgcgatttcatgctggacaagccggaaaccttcgaggtggcggaccgcctggtcaacgagttcggcgagctgaacgccgcgcaccagtctgtcgttacggcacgccggcaggtacaaaccctggcgccagcccgcgcgcggcaccaggagatggagtcactgcaactggagcgcaacggtctgaaggagctggaagctggactgaatggctaccgcgaacagatgcgaatgaagctgctggccgggcatatcgaggcattgcgcatcgacgttgaaggcatgtccggccgtgtccagcagttgcgcaattcccaggacaaccgcgaactcgccttgcgcgacctggagctgcaacgcagtgccgccggcggcgaccgcatcgagcagctggaaatcgaacgccgcctggtggaagagcaacgcatcgggcggatggccaagagaaagcaggccgtcgatgcctgcactgcactcgaatggacttttgcgggctcgccggatggcttcgcgctgctggccggccaggcccggcgggaactcgaggaatggcagcagagcgccaccggtgaagaccagttgctggagctgggacgcgcccgcgatgacgtgaagcgcaagcgtgaggaagtacttcaggaactccagtcattgcggcgccagccaagcagcatcccggcacatatgcttgaaatgcgccggcagctggcagccgcgctgggcttgggtcacgacgccctgccctttgccggtgagctgatggaggtcaagccggaggaggcacagtggcgtggcgccatcgaacgcgtgttgcacggcttcgcgctgtccatcctcgtcgacgaggaacattacgcagccttggccaaccacgtcaacgaggccagcctgggccagaagctggtgtatttccgtaccggccgcgccgaacagtcacaggcgcgggcgctgcgggcaagttcgctggtcaccaaactgaatgtaaaaagcggccgctttgcagactggctgcaggccgatttgcggcaacgatttgactacgagtgcgtggagtcgatgcgcgctttccgcgccgcgccggaacgggcgctgacgcgcgaaggacaggtcaagcacaatcgtgcacgccatgagaaggacgacaggaatagcgtcaacgacaggcggtattgggtccttggtttcgataaccgcgagaagctaagcctgtacgaacagcaggaccaggaactccgccagcaacatgagtcgctggaaatccagctgtcagcccttggcaagcagcggcgcgaggccggcgcacgcgtgctgcaatgccataccctcgccaacctccaatggcatgagatcgaagtcgagcccctagtcctgcgcatcggcgcaatcgaacgccagcttgcggccatccgcgacggcaacgccaacctgcaggcgatcgacgatcgcctgcgccagcagcgcgagctggtgaagcaggcggcggcggcactggaggaagagaaggtgtcgctgctggcgcggcagcgcgagatcgatctgcatgaaaagcagcttgccgcggcacagcaggatccttccatcgtccgcccgacgccctaccagcaacagggcctggacgagcgctatcttcgcctgccgcaaccgctggtattgaaggacgtcgaccatgcggaccgggtagttcgcaagggcatttcagacgacatcctgaagcttagcgagcatatcggcgattgcggcaagtttatcgaagcccagttctcagcgttcatcagcaactggcgtgccgattccgatggcctggatgccgcgctggcagctgcaccggacttcttcaccaaactgacgcggcttgagaccgatggcttgccggcccacgaacagcgcttcttcgacttgttgcgcaaccagagtcaccagaacctggcagccttgaacacctacctgagtgatgcgcgcaaggcgattctggcacgcatggaggtggtgaacgagagcttgcggcaggtgccgttcaaccgcaacgaggaacgtacaacctacctgcagatacagccgaaagaccggcaactgccggacgtgcgccagttcaagcaggacattctcgatgcgctcagccacgcgtggcatgacgatccggaagcggcggaagcaaggttcatcgaactgcgccgcctggtggaccgcctctccagccaggatgccgaacagcggcgctggcgcgaatccgtcctggatgttcgcctgcacgtcgaattcatcggcagggagtacgacgaacatggcgtcgaacaggatgtgctcgagagcggcgctggcaaatccggcggccagcgccagaagctggcgactactgttctcgcagctgcgctgcgctaccagcttggcggcagtgaaagcggcgtgccagtctacgcgccggtggtgctggatgaagcctttgacaaggcagacaacgagttcaccgcgctggccatgaatatctttgccaattttggattccagatgatcgttgccacgccgttaaagtctgtaatgaccctggaacccttcattggcggcgcctgttttgtcgcgattcgcgaccggcgtgagtccggaatactgctgattgaatacgatgaagaacaacggaggctgaaactggcctccgacgtacgcgcagaggcctcccttgaagcagccggatga

SEQ ID NO: 47926 - DNA, 1161 bp, Duganella sp. Root336D2
ttgaagcagccggatgatgttcgcacgctgctgaaaaaacgcttcgcaggcaaacaccgcgaatggctggttgccggtgatccttcgcagcagtggccgctggtgattccacttgggcctccaagcgaggctgaggctttgaagcaggtcgacgctgtgcgcgactgggcctccgtctggcgcaattggagcggcgaaggcgatgttaagtgggtggagcgccgctggcgcctgctcggcactcaacgcctgccagaggccttgcatctggacggcccacgtgcggtttgcgcgtggattggcgagcttgatcgctggcgcattgccgaacgccgtttccaggacttgtgccagcgctggccgcaactggcgctgactgcctcccgcctgttcaatgtgctggccgattttgaagatgccgactttcagcgcctgctgcttgcgctggattggctggaggcgaatcctcgctccggcctctatcctcggcagctgccgatagcgggcctggataccaaatggatcgagccgcgcaaaggcctgcttgcaaagttattggctggcatacgtaagctggacggcaacggggaggatttccatagcctgagcggattggagtctctgcctgccgtcgtgcaggtgcggcttctcgaccctgttttgcgtgccaggtgcggcggcttgcgtgatttcagcgcgcccgttgaacagttggccggcatgtcactggaaccaacaaccgtgctggttgtggaaaacctgcagtcgggattggctttgcccgacatgccaggcaccatcgccttgatcgcgctgggatataacgttgacgtactatcgcgcattccatggatcagcggctgcaggggcatctactggggcgacatcgacacgcacggctacgcgatccttcatcgcgcacgctgtcacctgccgcaactgcaatcgctgttgatggacgaagcgaccttgctgcagttttcttcgctgtggaccaaggaggcagatcaatgcgccgcggaagacttgccgctcttgcagcctgcggaacgcattgtctaccagggattgcgggatcatcgctgggggcactgcctaaggctggagcaggaacgcatctcgtggcagctggtccttctggcactgggtattccgcgctga

SEQ ID NO: 47927 - DNA, 1494 bp, Nocardioides sp. Root122
gtgagcgaggtcgcaggcgagcttgcgcgcgtgaagggtgcgttcgcgcaacccacgctgacgctgctccaccagcgccaggcgcccgtcgtgatcacgatcttccgcacggccttcgggcgcagcaacaaccccatcccgaccgccaggctgcacacgcaggtcgaggagcacctcggccggatgcggctggcgggggagcaggacgtgccgaccggcaccggccgcgaggtctgccagcgctggatgcgtggccagtggctggtccgctcgctcgacgaggcggggcacgaggtctacgcgctgacctcgcacgcccagcaggcgctggagctggtcaagaacctcgcccgtgatcgggcaacgctcagcgagcaccgggtcgccaccatcctcggcacggtccgccgcttcaacaccgaggccaaccccgaccggacggcacgcgtgacgatcctcaacgaggagatcgcgcggctcaaggcggagcgcgaccggctcgtcgacggcggtgagctggagggtgccaccgaggacttcatgctcgaggggttcaccgagctgctgtcgctgatctcggcgctgccgagtgacttcgctcgcgtcgaggagcgcttcgcgacgatccggtcggagatcctctcggccttccgagcggaggaccgtcccgccggcgaggtcatcgacgactacctcgcccgcgccgacgcgctgatgacggcgacccacgagggacgggcgttcgagggcgcgttcgcgttgctgcgcgacgacgcgctggtgacgcagctgcgcgaggacctgaccgacctgctggagcacccgctctccgaccggatcctcagcgacgccgagcgagccgagctgcgcggcaccgtacggctcgtgcgcgacggcctcgaccgggtgctggcacagcggtctcgggtgacggcgaccctgaaggagtacatcgtctcccacgacgcggcccgtgaccgcgagctcgagcagacgctgcgccaggtcgaggcggagctgatggcctggatggccaccaccggcccccgcgcggtccacgacgtcgcgctcctgcccgcgcggaccagcatcgaccacctccgcgagcggttccacgacccggcggacgacgtgctgcccgaccgcatcagcacgcccgaccccgacctcgcgccaccggtctcgctcgccgagctcgtcgcccagggtggacccaagctcgcgacgctgcgcgatcggctcgacgccgtgctgggctcgctccttcccgtcgcgtccctcggtgcgctgttcgacgggctggagccgtcgctgcggcggccggtcgagatcttcggtctgctgcacctcgccgccgaccgggactggcgggccgaggagtcgctcgagtccttcgaggccgtccgccccgacgggagccggcggaccttcgcggtgccccgcacaccactgcccgaccccgatctgcccgcaacccaggagaccaccggatga

SEQ ID NO: 47928 - DNA, 735 bp, Nocardioides sp. Root122
atcgacgacgtcgaagccgggttcgaagccgtgatcgaggacgggatcgaggatgggatcgaggacgacgagctgtccgacgacgtctccttctcgctgttcgagggcgacgagggcggcctggcgtacgcccagcggcgcgcgctggtgaccctgctcaagcagcgcttcatcagtgcccgcacgcacccgcgcgactgggaggtgctggtggagcacgagcgcctcctccggtcccggctcaacgacctcttcctcgacctgcaggtcgaccgcacccgggaggtcgcgtggaagcgccaggcgacgtccgagaccggcagccgcttcccgacgatgctctacgacgcggcgtggtcgcgcgaggagacactcgtgctggtccacctccgcgaccggctgcgcgccggcgccgcgagcggtgacgcgcgtgtcttcgtcgaccgtgaggacatcgtcggctacgtcgcgagcttccgaccctcgcacgcgaccgatgccgcgggtgacgagaagcgggcgcgcaacgcgatcaccagcatcgtgaagtcggggctactgatcgccaccgggtccgaggagcgcttcgagatcagcgaggccgtggagccgctgatccccctggagctgctcaaggagctgctcgaggccctggtggccgccaacgcgagcgaggtcccgcccgatccggacgacgcggccgacctgttcgacgacgtcgcagaggagcagtga

SEQ ID NO: 47929 - DNA, 3480 bp, Nocardioides sp. Root122
atgtcgatcgacgagatcgagcagacgacacccgacgggctcttcgagcggcgggacgtcgccacacccggggacgacacgatgcagtggcgcgcggcgctgctccagatggtcaactggggcggcttcgacgggctcaccgtcgtgcccctgcgcggcgacgcgacgatgatctccggcgcttccggtgtcggcaagagcacgatcctcgacgcctacacggcgctgatgatgccgtccgacaccaagttcaacggcgcctccaacgacgccgtcgcgggccgggcgcgcggcgtcggccagcggaacctgctgtcctacctgcgaggtgccgtcgacgtcgtcgacgacccgcgcacgggtcggccggtcgagaagctgctccgcggcatgggcgccgacacgtggggcgcgatcgcgatgaccttcgtcaacgaccagggcggccggttcacggtgctgcgcacctactacgtgccgcgtcgcgccacgcggtcgggcgacgtgcagatgcagctggccacccaggacggcgcagtggcgctcgacacgctcgaggtggcggtgcccgagcggttccacgccaacacgctcaagaagctcttccccggcatccgggtccaccggacctacgcggagctcgccgccgtgctgcacgcgcgcctgggcatcggtgccaatggcgacggcgccaaggcgctgaggctgctcgcccggatccaggcgggcaaccaggtgcgcagcgtcgacgagctctacaaggacatggtgctcgagcggccctcgacgttcgccgccgccgaccgtgcgatcgagcacttcgacgacctcgacaccgcgcactcggcgatgcgcaccgaggagcagaagctcgagctcctgacgccgatcgtcgagctccacgaccgcaaggtcgcggcgacgcggaggctcgccgagctcgactcctacggcgtgacgcgcgacggagacacgccgctgcggatgtggctgctgcgcacgcacctgggcctcatcgagaccgccgtggtcgacaaccgtgccgcgcgagcgtcggccgccgacgagctcgccaccacgagcgcggcagagcgcacgcacctcgccgacctcgaggcggccagggagtcgcaccgcgcggccggtggctccacgctccggtcgctcgccctgtcgctcgagcaggagcaggtggtccgcgaggaccggcttgcgcgccgccgcgtcatgcaggagcggctgctcccgctcatcgacgccgccgacgcccaggcgcccgacgtcgaggccgcgctcctgtcgaacgagtcgttcaccgtgctccagatgcacgcccagcagtggctggccggcttccagcgcgagcaggagcggatccggcgccagcgtgacgccgtgctccgcgaccagttcccgctgagccagcgccaggccgagctgcgtcgcgagcgggcgtcgctggagagccgggccggacgggtgccggcccggatggacgagctgcgcgcggaggtcgcgcgggccagcgggctcgacgtcgccgagctgccgttcgtggcggagctggtggacgtcgcacccgacgagacgcggtggcgcacggctgtcgagaccgtgctcggtgcgagcgcccggacgatgctcgtaccgctcgaccggctggagcgcttctctgcagcgatcgacgggctgcgcctgcgcggtcggctgacgttcgagggcgtcgagctcgacctgcccgacctcggtcccgcagatccggagcgtgtcgccggcaagctggtcttcaaggactcgcccttctcgggctgggtgcaggcacacgtcgcagagccgtcccgcaacgccctgtgcgtggagtccgccgacgacctcgcgggtgccggctaccgggtcacccttgccggacagacccgcaacggccgtcgcggtgtccacggccgcaacgacacccgcaacatcatcggcttctccaacgccgacgcgatcgcggaggtcgacgccgagctcgccgagctcgagcagcggctcgacgcccagggtgcggaggtggccgcgctggaccgcgcgtcacgcgtgctggagcagcagcggacgtcgtacgacctggtggcgaccgcgcggttcgacgacctcgacgtcgacggcagcgaccgccgcatcgccgacctcgggcgccgtcgcaccgagatcctcgacgccgacgacgggctgcaggtgctggagtcgcagatccgcgacctcaccgagcggctcgaggagacgcgacgggcccgctacgccgtcgagcagcgccagcgcgagctcaacgccgcccacggtgagctcgtcgacgacgaggacgccgtcaaggaccggctccaggcgatggaaaccgccggcaaggtcgagctcagcgccgaccaggaggctgccctggcagccgacttcgccgccgcggccgcgccagcggaccccgacgacctcgaccggttcgcggagtccgcgcagcggctcgccgagcggctccgcgcggccgtgggggacgccgaggccgaggtgcgccgcgtcgacgacgacctggcgcaggtcttccgggtctacaagctccagtgggactcgcccaacctgggcgccagcgcggactcctaccccgactacgcccgcatcctccacgacatccgcggcgagggcctcgcggcccggcgggcggagtggcgacgccggctcacggagtggagcggccaggacctggtgccgctggtcggagcaatggccgcgtcggtggaggagatcgaggaccggctcgagccgatcaacgcgatcctgcgccgcctggagttcggcgcgtcgggcgaccgcctccggatccggctgcggcggctggcaccggcacacgtgcagacgttcatgaaggacctgcgtgcgctctcgtcggggtcgacctccgagctggacgaggacgcgctcgagaagcgctttgccgacctcagcaggttcatgcagcagctccgcaagcccagccaggtcggcgaccaggcgacgtcgctgactgaccgcgagcgcctgctcgacgtacgtcgccacgtggagatcagcgccgagcgctacgaccacaccaccggcgagctgcgcgcgacctaccggacgctcggggagaagagcggcggcgagagccaggagctggtggccttcatcgtcgggtccgccctgcgcttccggctgggcgacgagatgcgctcgcggccccggttcgcgccggtcttcctcgacgagggcttcgtcaaagccgactccgagttcgcgggccgcgccgtgcaggcctggcgcggcctcggcttccagctcatcgtcggagtgccgctcgacaaggtgacgggcctcgagccgcacatggacgagcttctcgccatcaccaagaacagcacgacccaccagtcgtggatcacgccgatcaccgacgcaggccgggtcggcgaaccgccccgtggccactcctag

SEQ ID NO: 47930 - DNA, 1599 bp, Leifsonia sp. Root4
atgagcgacatcgcgggcgaattggcgcgggttcgcgaggcgttcgacaagccgacgctgcgcctgctcgatcgcaaatgggcgcccttcgtgctcgccgtcttcaagtgctccttcagccgcgaccggcgcagcattcaggccgaacggctgcacgcccaggtcgatgcctacctcgccgacctccggaccatcggcgccgacacccccaatggcaacggtcgttccctctgcgtgcagtggatgaatgaccagtggctctaccgcgacaccggcgacagcgaggatggcgccgacgagaacggtgccgcaggcgaaaactcgtccgccaccgaggagttctactcgctcacttcgcacgcgctcgaggcgctctcgctcgtcgagagcctcgctcgcgaccgcgccctgctcagcgagtcccgcctgaccatgatcgtggatgccgtgcgccaccgtgccacgcaggccaaccccgaccgcgacgaacgcgtgcgccgcctcgatcagcagatcgccgagctgcagagtgagcgcgaccgggtggctggcgggggagagatcgccgcggcatccgtcgaggacatgcgcgagggctacgccaatctcatcgacctgatcggccagctgcccggcgacttcaagcgggtagaggagtcggtggcgacgatgcaccggcaaatcgtcaacgacttccgcgccgaggaccgcccggtcggcgaggtgctcgacgagtacctcgccaagacagacgcgctcatgtcgctgacggccgagggccgtgcattcgagggcgccttcgagctgctgcgcgatgacgcgctgctgctcgacctcaagggcgacctcgagacgatcctctcgcaccccttcgccgcgcagctgaagcccgtcgaacggcgcagcttcggggcgaccgtcaccctcatccgcagcggcatcgacgacgtgctcacgcagcgcaacggcctcacgacgacgctgcgcgagcacatcgtcaaccacgacatcgtcaaggaccgcgagctcgagggtctgctgcgcgacatcaacaaggaactcgtcacgtggatgcagaccgccggcccgcagtcgcgagtgcgcgccgagatcatgccgggcaacctcgacgccccgcacctgcgcgagcgcttctacgaccccgaatcacacgttccgccggcggcgttggccgatgtctcgcagcacgcgcccgaggtgctgagcctcggcgagatgcgcaagcagggcgggccgcagctgctcgagatgcgcgaggcgcttgttgacgccctcggggcgagcggagcgaacaacggcgacacctcgatcggtgatgtcttcaacagcctggcacccgagctgcggcgcccggtcgagatcctcgggctcatgcagttggccacgcagatcgacgccgtcgggcacgatggcgcggccggcgcggccgacggccacaccaaaaacaccagcaccgagcagtacatgacggtgcggcccgatggcacgacgcgcaccttccaggtgccgcgcatcaccctcagcgatgacgaaacggcggccctcgcggccctgaactctggagcgaacagtgactga

SEQ ID NO: 47931 - DNA, 1026 bp, Leifsonia sp. Root4
gtgactgacgaccgacgcgacgaaccatccgcgggcggcgagctcggcacgggcgccaagccgttcgggcacaagtccaccattgagcacgcggccagtgcagccgctcccggcgcagccagcgcggagcagagcgccgcgcagagtgctgctttcaccgacggcgacgccttcgtcggcgccgacgacagcacggatgccgacggcgacagcctctcgctgttcgagggagacgagggcggcctctccgcagcccagcgccgcaccctcgtgctgctgctgaagcaccgctacatctcggcatccgaccaccccgccgcctggcgcacgctcatcgcctcgaccggcctgatcaagtcgcgactcaacgacctcttcctcgacctgcacgtcgaccgccactacgaggtcgcgttcaagcggcaggcacagagcgagggcggggccgcgttcccgaccgtgctgcacgacacctcctataaccgcgaggagacgatcctgctcgtcgtgctgcgtcagcgcttccgcagcgaacgcgccaacggccacgacttcgtcatcgtcgaccgcgacaatctgctcgagaaggtcgcgcacttccgtccagcccacgccaccaaccgctcgggcgacgccaagcgggcatccgcggccatcgagaccctcgccaaggcgcaggtgctgctccgcacgagcgaccccgaccgcttccgcatcgcgccggtgatcgaggtgctgctgcccgtgcagcgcctcgccgagctgctcgactggctgcgtgccgagaacggcagcgggagcgtcgacatcacggatgccaccgagccgctggtcgacgtcgcggaacccgccgaatccgccgaatccactgaaaccgatggtcgagtagcgaggaacgagcgtatcgagaccgagtcaccgggtctcgatacggccgcgggcggcctactcgaccagcaggacgacgccgacaccgattccgacgccgaaaccgccgccgagcccgaactggagcccgcagtatga

SEQ ID NO: 47932 - DNA, 3471 bp, Leifsonia sp. Root4
atgagcgattccccgctgttctacatcgacggcgccaccgagggcaccacccagtggcgggccgagacgttccagatggtcaactggggcggcttccacggccaccactcggtcgcgctcgcgtcgaccgcgacactggtgtccggggcatccggaaccggcaagagcaccctgctcgacgcctatcttgccctcatgatgccctcggacaccccgttcaacggcgcctccaacgacgccggatccggccgggcccgcagcgccgagcagcgcaacgtgctcacctacctgcgcggcaagaccgacgacaaccgcgaggccgagacgggcgcgctgcacgaccaggtgctgcgcggcgcgggggagcccacctggggcgccatcgcgatgacgttcatcgacgacaaccagcgccgcttcaccgtgctgcgcagctactacgtgccgcgggcgacgaacagctactccgatctgtcgatgaagatggccacctacgacggcgcgctgaacctcgccgacctcgaggatgtcgtcgccgcccggttcgagaagcgggctctcaaggcgcgcttcgccggcatcgaggtgttcgacacctacgcggccttcgcgcagacgctctacacgcgcctcggcatcggggccaacggcgagggcggcaaggcgctccgcctgctcgcccgcatccaggccggccagcaggtcaagaccgtcgacggcctctacaagtcgatggtgctcgagcgcccggcgacctacgccgccgccgacaaggccgtcaaccacttcgaagacctcgagcgctcgtacggcgcgatggtcactgaggcgcaaaaggcgcaggtgctggagcgtctgcccgagctgcagaagcagttcgtcgaggccaacgaccgcgccgacctcgttgacaccttcggtgtcacccgcagcggcgacaccccgctgcgcctctgggagctcgccaccgagcagcgcctgctcgacgcagccgacgacgtcaaccgggccgagcggaagcgcgcccagactgagctgagcgccgccaccgccgccgagaaggacctcaaggaacgcctcgccgagagccagcgccgccaacgcgcaaacggcggcgacgtgctcgacgagctgaagaccgaggtcgcccggctcaccgagacccgcgacgaccgcgtcgcctcccgcacccgcttcgacgaccgggtcgccgtgctggcccagccgatgggcacgcccgtcgagttcaccgtggcgcaggccatcgccgccgacacgctcaccgccttcgccgacgcccagacgcaggccgaggcgcaccgggagacgctccgccgcgagcagtacccgctcgaggagcagatccgcaccctcaagaaggagcgcgacttcctcgacggccggcacagcctcgtcccgcagcacctacacgccgcacgcctcgccatcgcggaggcggcgggcatggcatccgacgaactgcccttcctcgccgagctcatcgacgtggcccccggcgaggagcgctggcgccaggccgccgaggtcacgctcggctcggtcgcgcgcatcctgctcgtcgacgagaccaagctcgccgcgctcggccgggcgatcgacccgctcacgctgccggtgcgcatccacttcgaaggtgtgccgctcggcgcggtgacggatgccgccggcgagagccgtgacccgggcctcgtctcgggcaagctcgtgcacaaggcgtcgccgttcaccacgtgggtgcacgaacgcgtgcgccaggcatcgctcgacgcccgctgcgtcgagacgccggccgagttcggcggcgacggcccctacgtggcgctcagcgggcagacccgcaacggcagccgcggcgcgcacggcatgaaccgtgaccagaagccgatcatcggcttctcgagccaggccaggcaggacgagatcgagcaggagctcgcccagctcaccgtctccgtcgagcagctgggatcccaggcgcacaccctcgcggccgagctggccgcgctgcgggcacgccgcgacgccagccagtcggtggcggatgccgtctgggccctgctcgacgtcgacaccgccgaggccgccctcgcgggcaagaacgccgagctggagcgggtgctcgccaacagcgacgtgctccgcgggctgcaggaggaggagcagcggcttgaggccgaactcgaggcggcgcagacgcagcgcttcgaggccgagcgcgccgcccgcgtgctggcctcggcgcagtcggagctcgtcgatcgcgaggatgccgtcaacgcccagctcgagcgcatcgccgacgaggagtcggtgacgctctccgaggagcagaccgcgctcctcgacgccgagttcgaggccgtcggcgaccccgacgacctggagagcttcgccgccgggctcaagcgcctccgcgaacgcctgaccgagcagtcctccagcgaacgcgcgcgggccgtccaggccgccggcgcgatgaggagcatcttcgagtcgtaccagcgtgcctggccggacccgacgatcggcaccggcctcgactcgttcgagagctaccgcgacatcctcgactctgtgctcaccctcggcttgcacgagcgccgccaggagtggaagcgtcgcctcgccgcgtggagcggccaagacctggtgccgctcgccggcgccttcgactcggcgatctcgcagatcgaggaccgcctgcaccccatcaacgagatcctcgcgacgctaccgttcggcgccggccgtgaccgcctcaccatcacgctgcgccgcctgcaccgcgacgacgccacggcgttccgcaaggagctcaagcagctctcctccggtgcgacggagcagttcaccgacgagcagaccgaggaacgcttcctgcgcctgcaggcgttcatggccggcatccgcaagccggaggacgagtcgaagccatcgccgacgcgcgacctgttgctcgacgtgcgccgccacgtggaggtcacggcctcgcgcctgaacgccgacggcgaggagctcagcacctactcctcgctcggcggtaagagcggtggcgaatcacaagaattggtcgcgttcgtcgtcggtgcggcgctgcgcttccagctcggtgacgagagccgcacccggccgcgcttcgcgcccgtgttcctcgatgagggcttcgtgaagtccgacgccgagttcgccggacgcgcggtcgccgcgtggaagggcctcggcttccagctcatcgtcggcgccccgctcgacaaggtcacggccctcgagccctacatggacctcgtgctctcgatcacgaagaaccacgccgccggctactcctacatcaaccccatcgcggatgccgcgacccccgtggccccgcccacctcgccggttgagcctgtcgaaaccacgcctccgctggttgagcctgtcgaaaccccggagctgatccccgccgactga

SEQ ID NO: 47933 - DNA, 1464 bp, Microbacterium sp. Root322
gtgacaggaacacgagcagaagcggcattctcccgcgctgtcaccgcattcagcactcctacgctcgatctgctgcacggtcgcttcgcgccgttcgtggtggcgtcgctctcgctcctgttcaccgccgaccgggcatccatcccgatcgccgatgcgcaggccgagctctccgagatcctcgacgagttgcggggagcgggcgacgatgaggacgaccgtcgggtaccggcggggacgggacgcgacgtcgccaggaactgggtgcgactgggctggctggtgcagcagatcgatgaggacatcgaggtgtaccggctgtccgcgcacgcggtggaggcactggagatcgcgggacgcacgggcggaggccgcacgcgtgtctccaactcacgggtgcgcacgctcctcgaagccgtggagcatctggccgacagtgccgaggccgatccccttcgccggctcgcccgtctgcgtgaggagcgcgccgcgctcgacgccgagatcgaccggatcgaggaatcgggccgggccgatccactggacgacgaagagctctacgaggaagccgagaacgtgctgcatctggcgcgcgagctcccggccgacttcacacgggtcgccgagtccctcaagctgatgcagcgcgacgtcgtcgcccatctgcgccgcgacgagcggccgacgggtgaggtgctccgcgaatacctccagcgcgcgcaggacgtgatgaactcgacgccggaagggcgcgcgttcgccggtgccctgagactcatcggcgatccggaccgcatcgatgcgctcaccgaacagctgcacggcctgctccggcagccgttcgcccgcatgctcgacgccacccagcgtgccgaactcgatgcgatcgggcgtcgggtggaactcggcgtcgaggaggtcctcgccgcgcagcggcgggcatcccatgtcatcaccggccaggtgaagacccatgatccgctgcgggaccgtcagatcgacgacctgctccgcgacgtcatcgccgcgcttcacgtctgggatggcacgggggcgagcgccgcgccggtgcgcagcctcccactcatcgatctgggtcacctcagacagacggtgagcagcatccgccctcccgccgtccccgccccgctcgcggatgccgaggatgtcgagttccccgatgtcgacacgcgagcgtggggtggtccgaggtatgcggagctcgaagagtacgtctcgaacctcggcccggagttcgatctcgcgaccgctttcgaggacgccgccgacgacacccgccggcccgtcgacctcgtcggactgctcgagatcgctcatcgcaacggcatgaccgagagcgatgcggtctcggtcgtcgaggcgctgcgtcccgacggctcgacacgacgtttcgcgttcggcgccgtcacggcgcgcaacccgaaggaagaagcacatgcctga

SEQ ID NO: 47934 - DNA, 663 bp, Microbacterium sp. Root322
atgcctgaagagagccacgtgacggaggccccggtggacgatgcgttcatcgcccccgtcccgatggaagacgacatcgaggagcacttcgcgggtgatcgagggacactcgatccggagatccgacgactgctcgcgcacatcctccagcgtcgtttcatcgccgcggagcgcaatcgtcgggagtggacgctcctgctcgaccaccagcaggtgatcgagtcgcggctgaacgacctctacctccgcctggtcgtcgaccacggtcgcggtttcgcctacaagcagcagttgcgctccgatgagatcgacatgccggtgctgctgaaggacgcgccctacacgcgagccgagaccctggtgctggtgcatcttcgcacggtgtatcagcgcgagtccgccgccggtgaggcatccgtgcgcatcgacatcgaagacctcgagcagacggtgctcagctacttcaccgacgtcgacgggggcacggcccgacagcagaaggccatccggaacgcgatggaccgtctggatcgagagggcatcgtccaggaggagaccagtgggcgctatcggatcagtgcgctcgtcgaggtcgtcctcagcgccgagaccctgaaagagcttcgcgattggctgcggtcgcaggaagtggtggaacgatga

SEQ ID NO: 47935 - DNA, 3360 bp, Microbacterium sp. Root322
atgaccatggtcgacacgctcttcgggctcatccccgcggggtcgcggggacagcagtgggtcgcggaggagctgcagctgatcaactggggcggatacgacgccggcccccatcgtgtgcgcttctcacccgacgcgaccctgctctgcgggggctcgggttccggcaagtccaccctcatggatgcgtacatcgccttgatgatgccccacacgacgccgttcaacggcgcctcgaacggcggagtgacgggtcgccctcgcggcgacgagcagcggaacatcctctcctacgggcgcgggaagatcgacgaatcccgcaccgaggacggcacgaagctgcgtgtgctccgcggcgacggcgaagacacatggagtgcgatcgcgacgacgtggctcgatcacgacggatcgcgtttcaccgcggtgcgcgcgtggtacatccccgcggatgctcgcactctggaggacacgacccgggtgcgggccaccgtgaacggggcattcgatctggggcttctggagaaggcggccacgcagaggctctccgatgcgtcggtacgggcgacgggactggagaccctggcgacggaccgcgagttctcggcgcggctgcaggcggttctcggcatcggggcggcaggttccggtgcgaaggcgatcagcctcctggcgaggatccaggcggggcagcagatcacgacggtcgacgatctgtataagaagctcgtgttggaagagccagagaccatggccaccgccgatgccgtggtggcgcatttcgacgaactcgagagcacgcgtacgaggatgctcaccgcgaagcagcaggtgagcgcgctcgagccgatccgcgggatcaaggaccgcatcgctgccgccgccgaacgcgtgcgggtgatcgacgaggtcggcgtcttcaccgatccctcctcgctcgccgcgctctggaacgcgcagcggcgcctggatctgctgcgcgaggtcgaggtcgagctgggggatcgcacccgcgcgctcagcctcgccgtccgcgagaagcgcgccctcgtcgatgccgccgatctcgagcgtgaaggcctcctcgatgtgctgcggcagtccggcggcgaccgcctggagaccgcacagcgtgagctgcgcgtggccgagcgtcgtctggaggacgtccggcgggagagggcgaagttcgacgcgatcgccgaggagctcggggtggaggtcgaaaccgccgcgcagttcgatgccttcgtggccggcacccggggctcatcgccgaagtccgacatccgcgacgcgcgtgcggccttcgcggacgcggagacggcgcgcaggaccgccgaggccgagatgcggagtttgcgcgacgaacgcgagaggaccatccgcgtgcgcggcagcatccccgcgcacctcgacgagtcacgcgcactgctcgcacaggcggtcggactcgcgccatcggatcttccgttcgtcggggaactcatcgaagtgcgcacggagttcgagccatggcgcgaggccttcaacctcgcgctcggcggcttcgcgaggacgcttctgatcgacgtcgagcatctggcagagttccgttccgccatcaacgcggtgcgcaccccggaacggctcaactacgaaggcgtccagacggggctccccgagatgcggggcgccgacccgaagacgcttcccgggcggctcgaccacctgcccacgcccttcaccggctggctccagcagagactccaggagcgcttcgggtacgtctgcgtggactcgtcgtcgcagctgggcgcgcatcagagagcgctcaccatcagcggtcaggtctcgcaggggagtcgcggcgcgcacggcgggcagggccgcgccaacatgctgggcttcaccaacgaccgtcgtctgcgtgagatcgatgagcagctgcggcagctgagcgctcggcatgacgagtgcgccgcctctgcggcggacgccgaggcggccctcgaccggatcgaggcgcggtcgaccgcgttcgcgaggatcgatgacctgacctgggagcagatcgatgtcgccgcggtggaggcggagcgagagcgctgggtcgccgtcgaagccgaggtcaccacggccagccccgagatcggccagctccggcaccaggccgacgacctgaggactcgggcggcccggctccgcgacgacgaggcgcgtctgagcaatgagctcgcacagacgcaggatcactggggccaggtcaccgacgacgtcgacgcgtgtcagagcgtcatcgatgcagccgcggcatcgggactcgagatgggggagcggcacgcgtcgttcctcgatggtcgattcctgcattccgagacgggggacaccccgtccgcggcggagcgcctggcgcacctggacaccgcgctgagaaccgcggcccagcgccttcacgaggatcgccgcgaggccgccgaggcccacgagcagcagcgcgagagcatgcgacgactcatgaccgggttcctggagcgctgggataatctgacgatcctgccggatccagacgcgtcggtcggggagttcgagagcattctggaggcgctccagaccaacggactgcatgagctggagaccgagtggcgcgacagcctcctcaagctctccggcaacgatctgacgagtctcgactcgactctcagccgttcgctgcgcgagatcaaggatcgcatcgatcccatcaaccgcatcatggaggagctgcccttctacgatgacgatcaccgcctgcagatcaccccgcgggagaatcagacggaggcgcgcaagcgcttccgacgtgagctccgcgaggtgcggggactgatcgatgcggcctcgaccgatgcggaacgggaggccgtgtatcgcaagatgagccgcctcatcgcccggatgcgtcggacggcgcccgacttcgccgaactcatcgacgtgcgaaaccacgtgcgggtgagcgcggagcgggtcaccgccgcgacacgcgagcacgtcgcgctctacgatcacatcggcgagaagtccggaggggagtcccaggagctcgtcgcgttcatcgtcggcgccgctctgcgctaccagctcggagacgcgggggcggcacggccgcgctacgcgccggtcttcatggacgaagctctgatcaaggcggatgcccacttcaccaagcgcgcgatcggcgcctggagaggactcggcttccaactcgtgatcggtgcgccgaacgacaagtacagcgcgatcgagccgcacgtcgatgtcgagtacaacatcctcaaagacacgcgcggtcgctcctgggcgaaggcgaaggtggggcttccgcaggaggcggtctga

SEQ ID NO: 47936 - DNA, 1428 bp, Pelomonas sp. Root1217
atgtccgcgtcggcgatcttctttcacggcgcttgtgaacatttttttcgcccgctgacctgggcagatcgcgaggcctgcgctgcggtcttgcgcggcctgcacgagcgcgtgcatggcccggaggccgactacgcgcaggcgctgacgaaggacctggtgctggagatctgcctgggcgtgatcgcccaaccagcctaccgcgagggagcactctccgccgcccaggcggtgaatgccgaggccgagcgcggctacgcgctgaacttgctacgtgcgctgaaggagcacggctggctggaggattacaaggatcccatcgacctgcaaccggtgctcaagctgacccgtgctggcaaagccttcgccgagaccttcgccgagctggacaacgcccgccacaagacccgccagcgcaatatgcgctcggcccgcaaggcgctgctggcgttcctggacaaccatgacgaagacgagttgctggacgcacacgactacgccagccgcgtcgtgcaggacctgcaggacgacatcgagtacttccgcgcgctgatgcagagcctcacccgcgaggcgctgacgcagaagctggcctgggacgagttcaacgattttctggagcgccgtttcggcaaggaaatgtccgtgcggctggtggccgattcggtggaccgccaccgcggccagatcatcgagctgctggaccagattcgcgcctggcccgccgagcagcgcgagcgcgccgacgccgcactgcaccagcgtgccgactggctggagccggtgctcggcaacggacgcagcgccacgctgtggctatgccagcggattgaaaagctgatcgacgcggcctgcgagctgaaactgccgatgttgcgcagcgagatgcacaactacgtgcgccgcttcaccagcctgctgcgccaggcgctctcgctggactacggcgcggaatctccgatgggcctcacgctggacggcatcaaggctgctgacgccgcgggcaagcaagcctggctcgaactgctgggccggcgcctggccacgaccgagctgcgcctgttgcccgccggcggcctgcgctggacgcagcgcgagcgccagcagctcgagggcgacgacaccgaatggcggatccgcgcggacagccggctcgaggcggcgctgcgccgtgccgaggccgaggctttcgtcatcagtgaggaggcggtgctgcggcaactgggccactcgggtgccgtgtcgctgcgcctgtccgatctcgcggcgcggcgcgcggacgaagtcctgaccagcttgcatgccgtgggcgcggcgcgctccgcgcagggacgccagcgctggcaggtcaagaagctcgacgaacgcttcgagacaaccagcttcatcgcagacgatttcgagctgcgccgcctgccaaagacatga

SEQ ID NO: 47937 - DNA, 684 bp, Pelomonas sp. Root1217
atgaccaccgataccttccacgccctgctcgagactcgccttgccgaccgtaccgctggcaatgtctcgcgccggcgcttcgccgagatctgcaaccgcctgctggcggccggcatcctctggcgcgactattccaaaccggagcaggcgctctatgacgacgccacgctggccgaggaactgctgcgcgaatggtttgacgtgctggggttcacgctcacgcatgacgtcgatgccaacctgatgcggctctacccgccgggcgacgaccaggaagacgaggacggcgtcaagcgactgcgcgcgcggctgtccaaggacatggtcgccgccgcgctgggcctgcgctttctctacaccgagggactgaccggaaagcgcgaactggtcaaccaggagctggccatcagcctggaggagctgtcgcagacgctggtgtcgctgctgggcacgacgctgccgggctcggcggcagagcgcggtcaattgctgcgcgagctgcgcaagcaccggctggtgcgctttcgggaagccgatgccgggttcggccagatggagatgctgctgggcgtgctgcggcccatcctttctttcgtcagcgacgaggcgctgcttgaagtgcgccagctgatgcagaccaaggcgcaagacgtgcctttgccggtcgccgctggggacgcctga

SEQ ID NO: 47938 - DNA, 3636 bp, Pelomonas sp. Root1217
atgcggctgcaacgactgatcactgtcaactggggcacgctggagacgcgtgactggccgctggccgacgccacgctgctgaccggcgaatccggctcgggcaagtccacgctgctggatgccatccaggccgtgctcacggcggcccgccaaggggtctttcacttcaatgccgggcagaacgagtcgacccagggccgtcgcggcggcaaggagccgcgaaccctgcatgcctacgcgctgggccagtgcggcagcgacgtcttcctgcgccagcgctcgaccagctacgtggggctgtgcttcgaaccgtcggaccaggaaaaggacgccgtgccgttcagcgcgctgctgggtgtcgaggcccatgtggacggcggccgcgccgaaggcggcaagccgctgttctacctgctgcgcggggcgagtctgacgctgtcgcatctgtcttcgggcgaatccgtgccagggcgcgttcggcctctgccgctgaaggaagcctacgcccagctgcagctgaggctgggcctgcaggccgagcagctgatgcgcttcgaaggcaaggacagctatctgcagcatctgtacggccacctgctcggccgcaagttcgtccccgaggcggatgccacacgctgcgcccgcgcgatcgtcaaggccatggcctaccgcgagatcggcaacgtcaacgaactggtgcgcgacgagattctcgacgcgcacgacttcagccaggaagtcggcaagatgcgccagctcatgcaggagatcgcccggctgaaggccgacgccgagcgcctgaagctgaacatcgatcggctcaaactggtggacgaggcggccggcgatgttgtggcgctgctgcgccgccacgtcgtgatgctcaatgcccatgcgctgcgcatgcagcttgacaccctggccgagcgggagcgcaccgaacgccgccgcgcgcagctccagggccacgccaccgagtcgcagcggcgcctggacgcgatcgccctcgagcgcaagacgctcgaccatgaattggcgctggtgcagggcgaactggcgcaaagcggcatcgcccaggaaaagcagcgtctgacgacgctggaggcgcagtacgccgaacagttccgcaaggactggagccgggtgcagcagtccgcccggcagatggatcaggtgctggaccatgtgaaccagctgctggcgctggacctgtcactgctgccggccctgcaggcagcggtgcagcggctgggctcggccgcctttcgggcgacgaagcagtggcagccggctcgcgtggcgctgctgaccgatgcccggctcggggacgagctggccgcgttcgagctcgagccgctggatcaggcgctgcgggcgctggaggcggtgctgctcggcgccgacgagacgaccgtgatgtccgcgctggtgacggcgcgcagcgagctgctgaggcagcagtcccaactgctggacgagcagaccggcctgcgcgccgagcaggcgcagctgctcgaggggcgcacgtccgcgccggacgacgtgcagcgggccttgaggctgctggaggctgagctgcccgagagccggccgcgcctgctggccgcgttgatcgagccgcgcccgggcagcgcctggcaggctgccgtggaaggctatatgggacgcgatcgcttcgcgctgatcgtggaaccggacttcgaggaagacgcgatccggctcgtcaagcgccatttcgcgcgccgctcgccaaaggtcgtgcaaggcgccaaggccatcgaggacacgcgtggcatggccgttgcaccgcgcagcctgctcagtgaactggtctgcgagcacccggtggccaaggcctacctgctggcgctgtatgggcgcgtgcgccaggtcgccagcgaagcggaactgcgccgcacgccgcaaggcctgatgcagcagggcctgggcagccgtgcctacggcatgttcgcttgcctggcggccgaacatgagctggccttcggcgtcgagagccgcaagcggcggctggcctgggtcaatgcgcggctcgataccctggtgcccgagctgcaggggctcaaaagcatggcgcagtcgctgacgacggtgcagggctggttcagccagagcagcgccgcctcgctggcgcaaacgctgggcgaggcgctggagacacggctgcggcatgtcgacgtcgagtttcatctgcagcagctggacacctccagcatcgaggcgcaggagcagcgacgcgacgcgctgcacgagcgcctggatgcaaagcaggcccagtgggacgccgagcagcaggcggtcggcgtgcagaacaaggaactcggccaggtgctcaaggcacttggcgacctcgagggccggctgcccgagctggcgcagaacatcgtcacggcccaggtctggatcagccgctttgcagacgccggcggcgcggtggccagcgagttgcaactgctggacgaggcccgctcgcttggagaagccgacctgcccagcgctgccaccttgcagaaccatgcgacgaatgcctcggagaacctgccggaccgcctcaagacgctgcgcaaccacatcgccacctacctggcgggcgcgcgcaccgatgaagagcgtttcggctggaccgagccgccgcgcagtgtcgagcagatcgaggccgtgttgcagtcggtgctggccgtgcagcaggccgcgcgcgagcagatgcgcaggcaagatggcatcggcttggccgagaacgttgcgcggctggagaaggccgagggcaccttcaaccatgtcttcaccagcgacttctgcttcaaggtcaggcgcgacgtgaaggatggttccaacacgctgcgcaagctcagccaggagctcaaggcgatccagttcggggtggattcctacgacgtggtgcaggactgggtaccgcgctacaaggactactacgacttcttcgaggcgctggacggcgtggtcgaccagttggagaaggaccgcactgccatcttcgacgccccccagctctcgcccgagcaccgcgccacggcccaggagatcaagcggctgctgctgtcgcaggaccagatcgccgccgagcgcgcgctcaaggagctggccgactatcgcaactaccgccgctacgacatccaccgcatcgccggcggccaccgcacgccgatgtccacctggggcaccggctccggcggcgagctggagacgccgttctacgtgatccgcgccgccgtgctggcccatgcgctcgggcatttcggccgcgcgccaaacgcaccggcgctgcggctgatgctcagcgacgaggccttctcgaagatggacgaggcgcgttcgcgggccgtgatgcgctttctcgcgcagaacatgggcctgcaactgatcgtggcgatgcccacgtcgaagtccggcgcgatcaagcccgagttcgacaaggaatacaccttctcgaagctggaagcggaagccgacggtcaggtcgtgcacatcagcgaggtccaggagaaggacttcaagcgcgaggcgttgtcggcgctgtgggatgcgcatgcccaggccgccagggcccaggcgacgctggccttcgaagaccaacagaacgcagagcggacggcatga

SEQ ID NO: 47939 - DNA, 1389 bp, Methylobacterium sp. Leaf94
atgctattcacacacctctccgacgacctgttcaagccgctcgcctcgccgagccgggccttcaatgcggcgctcctgctgcacctgcacggtcgggtcttcggggacaccgccgaacccctgcgcaagagcgaacttctgacggcgatcggtgacttcgccgccgaattcgtggaccgggagatcgacgacgacgcctccggcacggtggaaccgagcgagcgccgctcggtcgtctatcgccgccttctcgatgccggctggctggtggagcggcgggagcgctatgttccggtggtcgagttcgaccccgaggcccggatggtcatcgaggaactggcgcggctcgacaggggcgagcggcgctcctacggcggtgccgtcctcgacgtgctgggcagcctggaaagcgcgatcgccaaccccgccgagaggtccgaggccctggtcaacgcggccaagtcggcccgtaccttcctcagtcatctgcgcagccttgctggatcgatgcgcaagagcgaggagcgcatcctgcgcgaggcggatcagggcgtcgccctgcgcctctacttcgaggagttcgtcgcgcggcacctcgtcagcgactaccggacgctgcacacccgcttcaatcctttccgcttccggtcgggaatcgtgcgcgaggccggccgtgccctgcgcgatcccctcaccctgcgcgccctgaccgatgcgggtctccgggaggggcgggcgcccgaccgggagacggccgagcgcgccgtccgcggcgatctggccgagatcctggcgatcttcgagggtctcgatcgccacctcgacgtggtcgccgacatcgtcgcccggctcgagcgccggatcgccgccacgctgcgctacctggaccatcgggattccgaccggatcgagcgcacggccgcggccctgcgcgcggtggctggtggcgatgacgacctcgccggcctgcccgatccccaggtctcgctgttccgtcccccgatcggcgagccgcattgttacgcaccgcgcctgcgccgggcggcgatcgaatccgagccgttgcccgagatcgagatcgatcccgtcatcgaagccttcatcgccgccaaggacgcgttccgggagcgcgtcgcggtcacgcccgagcggatcgtggcctttatcgaggcacggctcgggccggagcgcaccatccggggctcccagatccggatcgccgacgtcgacgatttcgtcgtgttccagcgcctgcgggagatcgacgtcctgttcgacgggagcctgcgcggccgctatcggctttcgcggatggagggtcgggtgtcgaatggctggctcgattgcccggacttcctgctggagcgggcgccgacgctgcgccgctag

SEQ ID NO: 47940 - DNA, 636 bp, Methylobacterium sp. Leaf94; identical to SEQ ID NO: 47842

SEQ ID NO: 47941 - DNA, 3456 bp, Methylobacterium sp. Leaf94
gtgtaccgccttaccgatattgtcctctcgaactggtacctgatccgccgcgagcagattcggatccggggcgcggctgcgctggtgggacctacgggggccggcaagtcgaccatcttcgatgcggtcggcacggtgctggcgggcaacaatgccagccgcctcgccctcaacgcttcggcctcgggacgcagcgcccggaccgtgcgggattactgcctcggctggatcagcgatccggccgagggcggacgccccacccgtgaagcctgcgagacactgatcgtcctggtcttcgagaacgagaccacggggcgcgtcgtctccgccgggctcgccctggcggcccgggcggaagacagccgcgagacgaccctgtcccgcttcgtccatgtcggccaccgcttcgaaatcgccgactacgtccgtgagacgccgggcggaagcttcgtcgcgccctgggccgagatcgccaaggacctgcgcacccgcgggaccacctttgacgagtaccgagcgtccggcgagcgcttcaccgctgaactcctcggaaaccttcgcgagggcgcggcggtgccggagccgcgccacttcctgcgcaccttctccaacgccgtggcgttcaagccgatcttcgattcgtcggccttcgtccggtccttcgtgctcgaacccgagcccctggacgtcgcccgcatccggcaatcggtggagacctggcggcgcctcctcgagaccatcgacgagttggagcggcgcctcgcccacctcgcccggatcgtcgggcgctacgagacctgggccgaggcgagcctcgcctcggttctcggagacctgcgcgccgctgatgcggacctgcgtcggcgcatcatcgacaccgtgaccgcccgccagaccctcaaggacgtcgccgagcgcctgcgcatcacgcgcgagagcgtcgccaccagccagggcttcgtgcgcgaaatcgacggcgagatcgcgggtaagaaggcgctgctcgccggcaccgccgccgaggggcgcctcgccgcctcgaacgccggcctcgccatgctggcccgcgaccgacgggacctggccgcccgggtcgccgaactggtcggaatcgtcctcgacaccggcaagctcgcggtgatcctcggcacgattcgcacggtctcgcccgaagccgcccgctcggtggaggcctgcgcccgatcgggtcttcgacgcgaggccaatcccgaggaaacgctgcggtccgacggatcgctcgccgcgttgctcgccggactggctgagatgcccccgatcgccgcacccctcgagcgggcggcggaggacgcggcgctgcgcgcccgcgccctggagaacgaggcgcagtcccgcgcgccggcaccgagcgcggggaggggggcggcgccgcgtctgtcctcggacgtggcggcgttccgcgaagagctgtcccgcctcggcatcgtggcgacaccgatctgcgagctggccgagatcatcgatccaaaatgggggcaggccctcgagggcctccttggcggcgcccgcgaggcgctggtcgtgcaaccggaccgcctcaacgaagcgttcgcgcatctcgaagcgcgcaagagccagttctaccgctgtctcctcgtaaagacgaccgatacggcccggcggcgcggcgggcgcgacgacgagggtccgctcgccctgatcgagacggccgatccccacgcgcaggccttcctcggggcgcgcctcggcggctacgatctcgccccgaacgacgcggccctcgcgcatatgagccgggccgtggccccgagcgggcgctcgacctcgggcatggcttattcggtggtgcgcccggtccagctcatgatgacccggggccaccggggtccgaccgcagagagccaccaggattgggagcaagcggtctccgaggcgcgccgagcccgggcagaggccgatgtcctgcgggaagcggcccggatcggggccgccctcgcgcgccgcctgtccgaaacgaacctggatctcgctgaattgcgcgccgaggcggacgcgatcgagggccgacgccgcagcctgaccacggagcgggagagcgtcgagcgggccgagaccggcgtcctggaggccgagctcgcggagctcgccaaggagcgttcggcctatctcaccgagctcgtccaggtgctggagccgaagcgagacctgctgctgggcgaggaggccggcctgaaggccaaggttgcggcgagccgcgaggccgcccgtgctgcgctccaggcgcgccggaccgcgtatcagcgctgggcaggcggcgacagcatgcgcatccggctcgtgcgtccggacgccttcgacccgaaggcgctcgcgacgctgcgtgctgagcgtgcggatctcgacgccaaggcgctggcgagccatgccaataccgggcgtgcgcgagcccgtgaagcggcggagacggcgcgaacgcagggcagggcggccgagcgcgacgtcgccgagtactgcgtgcagtggcgggtggaaaatccgctgggggcgggcgacgtgccggcctccttcggctacggctgggcgaagcgggcccatgacgaggtggcgagccacgaactgcggcgctaccgggaccaggcgcggcgggcggagagcgagatgcgccgcctgatgatcgaagacctgttgacccggctcgcggacaagttcgagcgcgtacgcgcccggcttgaggccctcaacgagcgcctgtcgagccagaccttcacggggcagacctatgccttcgaggccgaggtggatcggcgctacgccgccgtccatgccctggcgacagaggtcgcccgctcgccggatgcggcccaggcgatcctgccggacgagggcggcgcgattcccgatggtccgctcgcggcggcgatcgacgagatcaccgccctgatcgccggtgaggagagcgccgcgcgcctcgcggactaccggaactacttcgtctacgagatcggtatgcgggatcgggcgggaaaccgcaccacgatgtcgaaccgcgcgctgcgaggttcgggcggcgaagcgcaggcgcccttctacgtcgccatcgcggcgtcgctcgcctcggcgtattatccgggcgaccgacccggcgacgagaaccccggcctcggcctctgccttctcgacgaggcgttctccaagctcgacgtacgcaacagtcaggccctggtcgatctctatcaggcgtgggggctgcaactgctgatcgcggccccggaagacaagcggacgaccttgaccgaggtgatggacaccatcgttaccgtctacaagagcccggatctctcctccgtgcgaatcgaggccgaacaccccctggaagctgccaagcgcgccctggcggcgatcaatcccgagcgccagggcatcgaaggcttccggatcaccgacgccgccgagtag

SEQ ID NO: 47942 - DNA, 1482 bp, Mycobacterium sp. Root135
gtggacgacgccgcggctgcatccttcgcgtcggcagccgagctcctcgacgtcaaccgcgacatccagggttcgccgaccatccgactgttggcgacgctcaacctcggggtgtacggcacgttgatggaacgccacctcagcgacggcgtggtcggcgagaccgacctggtggtccgactggaacgcgacctcgacgagctgggccgcccgggcggcgagcaatccggcctcgccctgatcaagtcgtgggccagccaggggtggctgcaccgcgtcgccgaccagcgcgcgggcgtcgaacgcaacctctgctacctgacccaggacgcccgccgggcgttggacttcctccgcagcatgcgtcgcaaggacaccatcgccaccggcggctccatcaacggcatcgcctcgcggctcaagcaggtggccctgcgcgtcggcaacgaccccgaccgcatgcgggccagcatcgaatccgagatcgccgcgctgcacgtcgcgctggaggccctcgagcgcggtgacgacgacgtggcccgtcccgagcccgacctgaccgacgtctacgacgaagcccgcgccatcgccctgcagatggagcggctgatcaccgacatcggccagtacggaacgatgatcgagcaggccaccgccgccctggacgagcccatcgacaccaatctcgagtaccgcgaccggcagcgccagatgtacgccgactaccaggccgcctgggactccaagggccgcgactcgcaccgcgccttcctgcggatgatcaacgaccccgatcagcgcgcggaattcgaagccgacgtcgcggccgtcgccgaggcgctgcctgcgctggacccggccctgcgcagggtgatggccagcttcttcgagttggtcgggcaccagatcgacgaggtcgaacgcatccagcagcgctgcgcgcaacgggtgaagaggttcaccgcgttcggcaccctcgaacagagccgcggcgtggcccgtcagctcaacgaggccatcggcgccgcgcgcgccctgctgaagtcctccctgaccgactcccggatcgacctcgagttgccgttggcccggcacgcgatcagctcggtgggtgcgctgagcttccgcatcggcgacctgtccaacccgcgacccgcccagaccgcgagcaccgacgtggacctgtccagcttctccgcgctcaccacgcaggtcgacgcacccgccatgtccgagctcatcaacaccgcgatcacagaaggcccactgtccttgcccgccgccgtcgagatgctcgacgccgcgtacctgggccacgtcatcgtgctctggtcctgggcactcaaacagcccgacaccgtcggggcgtccgaatccgtcacggtccgcttccagtccctggacggacgcgaccgtgaaatggaggttccacacctgatgttcaccgaaccgatctccagcctgctgggagcagcgtcgtga

SEQ ID NO: 47943 - DNA, 723 bp, Mycobacterium sp. Root135
gtgagcccggacgaacctggcgcccatgactacgccgggttttcgtcgctgcctgaggtcgaccaggccgcccgggcaccacaccagcgcaagccacgcttcgacggcgacgtcagcgagctgcccgaccgcgcgtgctgggcgttgcaacacctgctgacccggcgctacatcagtgccgagaccgagcgcgacctctacacgtgggtgctggagtaccgcagtcaactcaccgtccgactctccgaactggacctcgtcctgaaggtgatcgagggggtctccgaggcgggtgacgtcgcgttcgtcgaacaggcccggtacgaatccgcacgcggggtcaagctgttgcgccgcgaaccgctgggcacctacgactcgatcctggctctgcacctggcgcagatgatgcgcgcctcgggcgaccaaagcgtcctgatcagccgcgacgaagtgcacggcttgttcgccggcgtgctcaacgacgtcgaccgcgacgtcgtcacgttcaccgccaggatcgacggcgcgatcgcgcggctggcctccttggaaattctgcgcaagagtcgcgacgacgaggacagctacaccgtcagtcccgtcatcaccgccgtcatgacggcgtcggtgatcaccgaattacaacaacagttcgagttgctcctcagcggtggcagcacgggtctgccgagcgaagtggacgtgacactcgatgtctga

SEQ ID NO: 47944 - DNA, 3369 bp, Mycobacterium sp. Root135
atgtctgagcaattccacctgtcccgccttcaggtcgtcaactggggcgtgttcgacgggtaccactccatcccgttcagcgaaggcggcgccttgatcgccggtgcgtccggcagcggcaaatcgtcactgctggacgcgatttcgctgggattcctgccgttcaacaggcgtaacttcaacgcctccggtgacaactccgcggccggctccagcgcggggcgccgcaccgtcgacaagtacgtccgcggagcctgggggcagcgcagcgaggcgggcgccagcaaggtcatgtacctgcgcggcgacggcgccgcatggtccgccgtggcggtcacctacaccagcaacaccggccgcgcggtgaccggtctggtgctgaaatggcttaccggagaatcgcgttcggactcctcgagccggttcgtcctggccgacggcgaccgcgacatcgaagacgtctgcaaccggtgggcctcgagccgcttcgacgcgggcgtgttcaaggacaattggcgcttctccacgaaggtcgagtcgcagtatctcgctcagctctacgcgaccatcggcatccgcgcctccgacgccgcccagcagctgctcggaaaggccaagtcgctgaagagcgttggcggactcgagcagttcgtccgcgagttcatgctcgacgagcccgccagcctcacccgtcttcccgacgcactcaagcagatcgacccgctggtcgacgcccgcgagttgctcgccgtcgcgcagcgcaagcgaaagattctcggcgacatcgagaagatccagttgcgctacggctcggagtcgtccgacctcggcatcatcgacctcgtcgacgcaccgatggtgagggcctacaccgaccacctccggctggcacaggcaccgacgcagatcgaccagctcgacaccaccatcgaccaactcggcaacgagtacgaggacgtcacccggtcgctgaatctcgccaaggccgaagctgattcgctcaacgcgcagatcagtgggtccagctccagcatcgggccgctgcagtcccaggtcgccgcggccgaggcgcaggccgaggaggtctcccgccgcagggccgcctacgaggcgatgctcgctccgcacgacgtcgacgtcccggacaccgccgacgagttctggaacctgcgtgaggaactcagcgcccaggccaacgaactgctcgccaagctggaccgtggccgggaggcctccaccgacgccgagtacgcgcagaagctcgcgaggatcgcccgcgacgacgcgaccaaggaactgcgccgggtggagcacgtcgggtcggcactgcccgagtcggccatcaccatgcgcgaccacatctgcgccgcggtcggcgtcgagtcgagtgaactgccctacatcgccgagctgatggacctgcggcccgaacacagtcgctggcgcgtcgcggtggagaaggtgctgcgcggcgtgggactgcggctgctcgtacccgacagccaccatgcggcagtgctccgattcgtcaacgacaccaacatgggcgggcggctgcagctgcatcacgtccgcgcaaagttcgtcggcgcgccaccggtggacgccgaaccaaacacgttggcgggcaagctcttcgtcgtcgacgccaagcacccctgtgccgccgaagcggccgacgtcgtcaccgccgccggcgaccacgtctgcgtcgacgtcccggacgtcttcccccgctttcggcgagcggtcaccgacacgggcttgtacaaggactccgaccggctgtcgatcaaggacgacaggcgcccacttcgacaggccgactacatcttccagggtgacgtcgcagccaagatcgacgcgctgaccgtcgacttggccgccgccgaggaggcctaccaccaggctcgcagcgccgccgacgccatcgccgcggaacgccagcagtggcgcgaccgcgccgcggcgtgcaaggcgatctgcgaacagttcccacagtggaaccaggtcgacaccgagtccgccgacgggcacgccgaacggctccgcgaccagtacgagctgctgatcgccgaacatcccgacatcgaggccctcaacgcgcgggccgacgagtgctgggaccagatccagtcgctcatgacgcgccgcgggacgatccagacccgccgcgacgacctcgactcgaggcggacccggctgctcgaactggtcgaacgcctcacaccggcgttcgtgtcggagccgttgaccgacctgctgaaccgctacgcgagcgacgtgccggtgacgttggagctgctcaaccccgaaccgcaccgggatgcggtgttcacggcgatccgccgcgagcgggaacagctccgcgagagtcgcaggcgttcctacgacgagctcgcccgcatcctcaacaccttcgacacggcgttccccgacgccatccccaacgacagcgacgccttcgacgagcgcgtgcacgactacgtggcgctgtgtcgccacatcgacgagcgcgagcttcccgaggcctacgagcggatgatgcggctcgtcaccgagcaggcacccgatgcgatcctcaccctgcatcgggtcgcggagcaggaaacgcggcgcatcagcgagcagatcaagcgggtgaacactggcctcggtgccgtggagttcaaccgcggcacccggctgacgctgcgggccaccccgcgcagtctgaccgccgtcgcggagctcaccgacatcgtgaaggccatctcacggcgaatcgccgaggtcggacttggcgacaagcaggcgatcctcgaccagtacgccgacatcctgcgactgcgcaaccgactggcgtccaccgcgcccgaggacaaggcgtggacccgcgacgcgctcgacgtgcgcaaccggttcacgttcgactgtgccgagtgggacacccataccgaggagctgatccgcacgcacagcaacgccggcgacaactccggtggcgagcaggagaagctgatggccttctgcctcgccggtgcgctgagcttcaacctggcgaatcccgaaagtaccgacaaccggccggttttcgcacagctgatgctcgacgaggcgttctccaagtccgatccgcagttcgcgcagcaggcgttgcaggcgttccgcaagttcggcttccagctcgtcatcgtcgcgaccgtgcagaacgccaccaccatccagccctacatcgacagcgtggtgatggtgtccaaggccgacgccaccggccgcaacgccaggccggtcgcgacggtcgcgaccaagaccatctcggacttcaccgcactgcggcaggacatgatggcctcggccgccgcggcacgggtgcctgcaaccgtctga

SEQ ID NO: 47945 - DNA, 1455 bp, Variovorax sp. Root434
gtgagccttgactatgccacattggatttgcttcggcagagccaccccgcgtggcgtttgctgcggtcggaccatgcacccttggtggtgagtttcttgcaccgtgtcttcatcgcgccgaacgtgcgggtgatgtcgcaggcagatcttgccgaggcgctagaggatgaactgtttgaactacgcgagcgggcaggcccaggttccttccccaaggctgctgttgaatatctcaacgattgggctggcaacgacaaggggtggctgcgaaagttctacgccttgggttcggatgagccgcagttcgatctgacgcctccggccgaaaaggcgattgcatggcttggaaccttgacagagcgagccttcgtggggacagagtcaaggttgctgacattgttcgaactgctcaagcaaatgagccagggcagcgaaactgaccctgcggcacgcattgctgagctgcacaaacggcgagacgagatcgacgtcgagatcgtaaagattctcggcggagatattccattgctggacgacacggcgctcaaggaacgctttcagcaatttactgctttggcgcgcgagctgatgaccgattttcgcgaagtggagcaaaactttcgcggcctcgatcgacgtgtccgggagcgcattgcgctgtgggatggcgcgaagggcctcttgctggaagaaatcatgggtgagcgcgatgcgattgccgattcggatcaagggcgcagctttcgggctttctgggacttcctcatgtcgagtcgccggcaggaggagctttcggcgatgctggagcgcgtgctgagcctcccggccgtctcggacctcaagccggacacccgcacccgccgtgttcactacgattggcttgaggcgggcgagcatgcgcagcggacggtgtcgcagctttctcagcaattgcggcgcttcctcgacgatcaggcctggctcgagaaccgccgcatcatggacatcttgcgtggcatcgaggcgaaggccctggcattgcgcgagtcgccgcctcctgatgagacgatgcgtattgcagtgccggttgtcgatctggagctaccgatggagcgaccgcttcatacgccagcgttcaagccgtcgattgccgatacggcgcttgagtctggcgagagcaatgtggatgcgggcgcgcttttctctcaggtggtgatcgacaaggcccagttggaacgtcacgtgcgccatgcgctgcaggatcgcacacaggtgacgctgaaggaactgacacatatgcagccgctgcggcacgggctggcggagttggttgcttacctgcaactggccgatcagacgttcgcggccgtcatcgacgaggcgaccacggacgccgttttctggcaggtcactggacaggacggctttgcaaggtcccgacaggcgcggctgccgcgcatcatttttgttcgatag

SEQ ID NO: 47946 - DNA, 666 bp, Variovorax sp. Root434
atggacgagaacattgaaataccgttgccgctcaccggtgccgcaacgcacgatctgtcggcagtggtgattcctttgctgaggggcgtgatctaccgcgaggtcgacagcggattgtggagttcgctctacaaccttcaggctcgcgtccgggactatgtctcggtgctgggtttggagctggtgttggacgatgcagaaggctacgcctttcttcgttctcgcacacgtcttgccgaagaaacagaggacccctctgccgcgaagttgcccaggctgatcgtcaggcgtccgctgtccttcccggtgagcctgctgttggcactcctgcgcaagaagctggcggagttcgatgcgggtggtggcgacacacggctcgttctttcgcgcgaccagatcgtggaactgatgagggtgttcttgcctgagcacagcaacgaagccaagctcgtggaccagctcgagagctatctggccaagatcgtggagttgggttttctgcgccgattgaagccgggcagcggcgcgcatgacgggcaagttgcagccttcgaggttcgccgcatcctcaaggcttttgtcgacgcgcaatggttgtccgacttggacgcgcgactggctggttaccgcttgcaacttctgactgggggcgcagccgatgaatga

SEQ ID NO: 47947 - DNA, 3375 bp, Variovorax sp. Root434
atgaatgaagaacagaccatcggcctggacttcgttgcggacgatgcgctttccggctttcggttgcacaggctggaagtcttcaactggggcaccttcgacgcgcgtgtgtgggcacttcatccggacggccgcaatgccttgctgaccggtgatatcggttccggaaaatcgaccttggtcgatgccgtgaccacattgctggtgccggcgcaccgcgtcgcctacaacaaggctgcaggtgcagacaacaaggagcgcagcttgcgctcctacgtgctggggcattacaaatcggagcgcaacgaaagcagcggcgcggccaaacccgtggcgctgcgcggtcacaacagctactcggtcatcctcggcgtgtttcacaacgcgggctacgaccagaccgtcacgcttgcacaggtgttctggatgaaggacgcccaggggcaaccggagcgtttcttcgtcgctgcggaggggaacctgtccattgccaaggactttgcaaacttcggcaccgatatttctgcgctgcgaaagaagctgcgcgccacgggtgctgaagtgcttcccagttttcctccgtacggcgcctggtttcgccgccgctttggcattgagaatgagcaggcgctcgatctgtttcatcagaccgtgtcgatgaagcaggtgggcaacctgacggacttcgtgcgcagtcacatgctggagcccttcgaggtagcgccgcgcatcgccgcattgatcgggcacttcgaagatttgaaccgcgcgcatgcggccgtactcaaggcaaagcaacaggtgaagttgttgacgcctctgattgaagactgcgaccgccatggggatctgctcaagcagacggacgacctgcgcgtatgccgagaggcgctcaagccttattttgctgggctgaaactggaactgctcgacaggcgcattgcttccctggctgaagaatgggcgcggcagaacgctcaggtgcagcgatgggaggaactgcgtagcggtcaacgcatccaggaaaaagagcttcgacagagcatttccgacaacggcggcgatcgactggaacaactgagcgagtccatccgcagcaagaaggccgaagtcgagcggcggcgcgtcaaggccaggaactacaacgagttggcgcgttcggtggggctgctccacatggagtcggcttccgatttcttgacgcagcgccaaagcctggccggaatgaaggaggagatccaggcgagggaggccgcgttgcagaacgatttgaccgagcatgcggtgaggctgcgccagggaaagtcggaacacgacgagttggcggccgagatccgaagtttgaaagcgcgacgcagcaatatccctggcgaacaggtcgcgatgcgcgccaccctgtgcgaggcgctgggtctggacgaggatgccatgccattcgcaggcgagttgctgcagatccgggacgacgagcgcgaatgggagggtgcagccgagcgcttgatgcgcagcttcggtctgtcgctgctggtgccggacaggagctatgccgacgtatccgaatgggtcgatagaacgcatcttcgcgggcgtatcgtctactaccgtgtccgcgccgtacagcgtggtgacgtgccgggtccgcatcgcgactcgctggcgcgcaagctatcgatcaagcctgactcctctttctacgattggctagagcgcgaggtcgcgcatcgcttcgatgtcgcctgttgcttgacccaagagcaatttcgccgtgaaacccatgccatcacacgcacggggcagatcaaggcaaagggagagcggcatgagaaggatgaccggtatcgacttgacgagcgcagccgctacgttcttggctggaccaacacggccaagatcgccgcgctggagaccaaactcagatcgctggagaagcggttggcggacgaggcaggcatcgttgccggactgatgggcgagcagagcgcgctcaaactgcgatgggatgcattgtccaggctcgatgtctatgacaattttggcgagttggactggcagtcgctcgccaaggatgtggcgaggctggagcaagacaaggcggcattggagtccgcttccgatatgttgaagaccctggcttcgcaactgcaagagcttctcgaagcccttgaaaaaaccgaaatggaactcgaaggtcaccgcgacaaacgctccaagaccgaacagaagaaagtcgatgcagaggcccagcatgcacaaacccaggtcttgctggatgatccctccctaagcctgcacgccatgaatttcgaacgccttgagggtacgcgggccgaagctttgggcgaacatcaactcaccgtcgagtcatgcgacaaccgcgaacgtgagatgcgtgactggcttcaggcgaagattgatgccgaagacctcaagctcaagaggttgcgagacaagatcatccaggccatggccgcttacaaggatgcctacaagctcgaaactgccgaggtcgatgcgaatgtcgaagctgcatccgaatacagggaaatgttgagcagccttcaggcagacgacttgccgcgcttcgaggcgaagttcaaggaactgctcaacgagaacaccattcgcgaagtcgcgaacttcaaatcccagctcgaccgcgagcgcgaaaccatcaaggaccgaattgctcgcatcaacgagtcgctgacgcagatcgactacaacgcaggccgctacatcgtgctcgaagcgcagccggcgctggatgtcgatgtgcgcgacttccagaccgagttgcgagcatgcaccgaaggcaccctcaccgggtccgacgacgcccaatactcggaagccaagtttttgcaggtcaaacacatcatcgaaagattgcgagggcgcgaagggctctccgaacaagaccgccgctggaccggcaaggtgaccgacgtgcgcaactggttcgtgttcgccgccagcgagcgttggcgcgaagacgggactgaacacgagcactattccgattctggtgggaagtcgggtggtcaaaaggaaaagctcgcgtacaccatcctggcggcgagtctggcctatcagttcggcctggagtggggagaggtgaagtctcgtaccttccgttttgttgtgatcgacgaggctttcgggcgtggttccgacgaatcggcgcaatacgggctgcgcctgttcgcgcagctcaacctgcaattgttgatcgtgacgcccctgcagaagatccacatcatcgaaccatttgtctctagtgtgggtttcgtccacaacgaggaaggccgatcctcgagactgcgcaatctttccatcgacgaatatcatgcggaaaaagcgaaggcggcaggatga

SEQ ID NO: 47948 - DNA, 1176 bp, Variovorax sp. Root434
atgaactggacgcgaccctccgacttgcgggatcaactactgaaactgtgggatcgaggtgacctgcttgcacgcctggtcactggcgagagcttgtttccaagacggttggcgttgaaagacccgacgtcggctgaaatgacagatcatttcgatgaagtgcgcgattggagccgagatctccgtgctgcgacgggctaccgcatcgtcatgcgggagttcagacatcgcgtcctgggggccaacgcgattcctgccgaggtctgggtcgacagcctggaccaggcgcttgcactggttggaaagcagaaggaggctgttcgctttgcggccttgatcgaactcacgcgcgccagccagcctttgctattgccgtggcttgccaggcgtccgctgcgggtgctggaggtggagagtcagtggtctcgatttctggagatcgttgcctggctgcagaggcaccctcggcctggcctgtacttgcggcaggtggacattccgggcgtgcacagcaagttcatggagacgcatcgcggcactctcatggaattgctggacatcacccttgcgcccgaagccatagacaagaccgcgactggcgcaggcgaattcgtgcggcggtatggctttctcggcaagccatcccgagtccggttccgtatcctggacccagaactagcgtcgcgcgcggcttgtcctgcgcaggacatcacagtggatgcgccaggctttgcacggtgggacctgggctgctcgcgtgtctttgtgaccgagaacgagatcaacttcctcgcttttcctgccatcaagggaagcatcgtcatcttcggctccggctatggtttcgagatgttgagcgatgttccctggcttgcgcgttgcgccattcattactggggtgatatcgacacgcacggcttcgcgattctcgatcaactgcgcgctcgcttcgatcacgtcgagtcgttcctgatggaccgtgcgaccctgatgacattcaagatgcaatggggcgacgaagcgacgccgacctggcgcgagctgttacgccttcggccggaggagcaggcgctctatgacgacttgcgcgataaccgcttgggcaggcatctgcgtctggaacaggaaagagtcggtttcgactgggtcgagaacgcattgactgcgcttggatag

SEQ ID NO: 47949 - DNA, 1524 bp, Nocardioides sp. Root140
atgagcgagatcgccggtgagctggcgcgggtcaagggggcgttcagccagcccaccctgaccctgctccaccagcgccaggcgcccgtggtgatcacgatcttccgggccgcgttcggacgcaacaacaagccgatccccaccgcccgcctgcatgcccaggtcgaggagcacctcgcccagatccgcctgaccggcgagtccctggtgcccgaggggagcggacgcgacctctgccagaagtggatgcgcggtcagtggctggtgcgcgcgctcgacgaacgcggtcacgaggtctacacgctcacctcccacgcgcagcaggcactcgagctggtcaagggcctggcccgcgaccgggccacgctgagcgagcatcgcatcgccaccatcctcggcacggtccggcggttcaacgccgaggccaaccccgatcgcaccgcgcgggtctccctgctcaacgaggagatcgccaggctcagcgccgagcgcgaccggctcgtcgacggcgcagagatggtcagcgccaccgaggactacatgctcgaggggttcaccgagctccagtcgttgatctccgcgctgccgagcgacttcgcccgggtcgaggagcggttcgccggcatccgtgccgagatcctggccgccttccgcgccgaggaccgtccacccggcgacgtgatcgacgactacctggcccgcgccgacgcactgatgactgcaacccacgagggccgggccttcgagggcgccttcgggctgctccgcgacgacgccctggttgcccagctccgcgaagacctcaccgcgctgctcgagcacccgatctccgaccggatcctcgccgagtccgaccgggccgagctgcgcggcaccgtcaagctggtccgcgacgggctcgaccgggtgctcacccagcggtcgagggtgaccgcgacgctcaaggaatacatcgtctcccacgacgccgcccgtgaccgcgagctcgagcagacgctgcgccaggtggagtccgagctgatgacctggatggccaccaccggcccgcgggccacccacgacgtgccactgctgccgttgcgcgccggcatcgaccacctgcgcgagcgcttccacgacccggccgacgaccggctgcccgacccgatcgagccggtcgaccccgacgacgcgaggtcgccgtcgctggccgagctgatggcccagggcgggccgcagctgccgtcgctgcggcagcgcctcgacgacgcactctccgacctgctgcccgcagccactctcggcgaggtcttcgaccggctcgagccctcgttgcgccgaccggtggagatctacggactgctccacctggccgccgaccgcggctggaccaccgacgacgtcgtcgagacctgggccacggtccgccacgacgggtcgcggcgaaccttcgccgtgccgcggatgccgctgcccgaccctgacctcgacgcacaccgcacccagcagagccgcacccagcagaagagtgagacccccgcatga

SEQ ID NO: 47950 - DNA, 795 bp, Nocardioides sp. Root140
atgagcaccgacgtcgacctcaaccggccggagccggaagacgcgctcgaaccggacgacgccctcgagcgcgacccggcgtacgacgactcggtctcgctcttcgagggcgacgaaggcggtctcgagcactcccaacgccaggccctcgtcgtgctgctcaagcagcggttcatcagcgcccgcacccacccacgtgactggcaggtgctggtcgagcacgagcgggtgctccgctcacgcctcaacgacgtgttcctcgacctgatggtcgaccgcgagcgcgaggtcgcctggaagcgccaggccgtccccgagaccggcggccggttcccgaccctgctccacgacaccggctggtcgcgcgaggagacgctggtgctggtgcacgtgcgcgaccggctgcgcgccgggctggccagtggcgacacccgggtcttcgtcgaccgcgacgacatcctcgactacgtggccagcttccgacccgcgcacgccaccgacgagtcgggcgacaccaagcgcgcccagaacgccgtccagagcgtcgtgaagtccggtctcctgatcggtgccaccggtgacgaacggttcgagatcagcgaggcggtggagccgctgctcccgctcgagctgctccaggagctcctgtccgcgctccgctccgccaacgacaccaccccagaacccgaggagcccgccgacctcttcgacgaggacggtgctgacacagacggtgccggcaaggaccgtgccgacaaggacggggccgacgccgacgaggagcgcgacgcatga

SEQ ID NO: 47951 - DNA, 3483 bp, Nocardioides sp. Root140
atgagcaccgaccagatcaacgagcacgagctcggcggcgacgaggtcgacgaggcctccgacgggctcttcgcccgacaggtggtcgacaccccggccgacgacaccgtccagtggcgggcggcccttctccagctggtcaactggggaggcttcggcggcctgacgacggtgccgctgcgcggtgacaccacgatgatctccggggcctccggcgtcgggaagagcacgatcctcgacgcctacaccgcgctgatgatgccctccgacaccaagttcaacggcgcctccaacgacgcggtcagcgggcgcgcccgcggtgtcggccagcgcaacctgctctcctaccttcgtggcgccgtcgacgtgatcgacgaccccaggaccggccgaccggtcgagaagctgctgcgcggcaagggcgccgacacctggggtgcggtcgcgatgacgttcgtcaacgaccagggcggccggttcaccgcgctgcgcacctactacgtgccgcgtcgcgccacccggtcgagcgacgtgcagatgcagctggccacccacgagggggcgctcaccctcgacaccctcgaggtcgccgtccccgagcgcttccacgccaacaccttgaagaagctcctccccggcattcgcgtgcaccgcacctacgccgagttctccgcggtgctgcacgcccgcctcggcatcggcgcgaacggcgacggtgccaaggctctgcgcctgctctcacgcatccaggccggcaaccaggtgcgcagcgtcgacgagctctacaaggagatggtgctcgagcgccccgcgacgtacgccgccgccgaccgcgccatcgagcacttcgacgacctcgacgcggcgtactccgcgatgcgcaccgaggaggagaagctcgacctcctcggcccgatcaccgagctgcacgcgcgcaaggtcgcggcaacccgccgccagtcccagctcgactcctacggcgtcaccctcggcggcgacaccccgctgcgactgtggctcctgcgcactcaccatcgcctgctcgaggcggcggtcgccgccaaccgcgacgcgcgtacgacgaacgcggacgacctgtcccagacgtcgtcggccgaggccgccctggtcgccgacctcgagaacgccaaggactcccaccgcgccgccggtggaaccacgctccagaacctcgccctgtcgatcgagcaggagcaggtggtccgcgacgaccgcgccggccggcgcgccgtgttgcaggagcgcctgctgccgctggtcgacgtggccgacccgcacgcagtcagcgtcgagaccgcgctcgagtccgatgccggcttcggcgccctgcagcagcaggcccgtgagtggctggccggctggcaggaccaggcggccagcctcaagcgtgagcgtgacatcgcccgcgacggactcttcccggtcaagcagcggcaggccgagctgcgcgaggagcgtgcctcgctgcagagtcgggccggccgcatgccgtcccgcatgcatgagatgcgtgaagaggtggccctggccagcgggctcggcatcgacgagctcccgttcgtggccgagctggtcgacgtcgcccccgacgagtcgcggtggcgcaccgcggtcgagaccgtcctcggcggcaccgcccgcctcatgctggtgccgatcgaccggctcaaggacttctcctcggccatcgacgggctccggctgcgtggccggctgaccttcgagggcgtcgagctcgacctgcccgacaccggtccggccgaccccgagcgcgtcgccggcaagctgctcttcaaggactcgccgttctccggctgggtgcaggcccacctcggtgagccgtcgcgcaacgccctgtgcgtcgagaccgccgacggcctcgccggtggcggcttccgggtgactctcgccggccagacccgcaacggtcgtcgcggtgcccacggacgcgccgacacccgcaacatcatcggtttctccaacgaggacgcgctctccgagatcgactccgagctcgccgcccttgaggagaagctgcaggccttcgacgccgacgtggccgagctcgaccgccagggccgcgtgctggagcaggtccgcacggcctacgacacgatccgcgcggcgcgcttcgacgacatcgacgtcgcgggcagcgacgagcgcattgccgagctcggtcatcggcgagccgagatcctccgcgccgacgacaagctgcacgtgctccagggccagatcgacgacctgtccgaccgactggagcaggcccgcaagaagcggttcgtgctcgaggagcgccacaagcgcctggccgcggagcatgccgagctggtcgactccgaagacctggtcaacgaccgcctcgatgtgatggaccgcaacggcacggtgacgctcaccgaggagcaggacgcggcgttggccgccgacttcgccgcggccgcgacgcccgacgaccccgacgacctcgaccgcttcccggtcacgtcgcagcggttggccgagcgactgcgtgacgcggtgggggagaccgagaccgagatcaaccgggtcgacgacgagctcggtgcgatcttccggatgtacaagctcaagtgggagtcgccgaacctcgccgcgacccccgactcgtacgccgactacgcccgcatcctcgacgacatccgcggcaccggcctggcccaacggcgcaccgagtggcgccgccgcctcaccgagtggagtggccaggacctcgtgccgctcgtgggcgcgatggccgcctccatcgaggagatcgaggaccggctcgagccgatcaacgcgatcctgcggcggctggagttcggggcgtccggcgacagactgcgcatccgactgcggcggctctcacccgcccacgtgcaggtcttcatgaaggacctccgcatgctctcctccggtgtgacggccgagccggacgaggccgacctcgagaagcggttcctcgacctgagccggttcatgcgccagctgcgcaggccggtcccgggtggcgatccggtcaccgaccgcgaccgcctcctcgacgtacgccggcacgtggagatcagcgccgagcgctatgaccaccacaccggcgagctgcgggcgacgtaccgcacgctgggggagaagagcggcggcgagagccaggagctggtcgcgttcatcgtcggctcggcgctgcggttccggctcggcgacgagatgcgctcgcggccccggttcgcgccggtcttcctcgacgagggcttcgtgaaggccgactccgagttcgccggccgcgccgtccaggcgtggaagggcctcggcttccagctgatcatcggtgtgcccctcgacaaggtcaccggtctcgaaccgcacatggacgagctgttggcgatcaccaagagcaccacgacctaccagtcgtggatcactccgatcaccgacgcggagcagactcccgctggttga

SEQ ID NO: 47952 - DNA, 1464 bp, Microbacterium sp. Root1433D1
gtgacaggaacacgagcagaagcggcattctcccgcgctgtcaccgcattcagcactccgacgctcgatctgctgcacggtcgcttcgcgcccttcgtggtggcctcgctctcgctcctgttcaccgccgaccgggcatccatcccgatcgccgatgcgcaggctgagctctccgagatcctcgacgagttgcggggagcgggcgacgatgaggacgaccgtcgggtaccggcggggacgggacgcgacgtcgccaggaactgggtgcggctgggctggctggtgcagcagatcgatgaggacgtcgaggtgtaccggctgtccgcgcacgcggtggaggcactggagatcgcgggacgcacgggaggaggccgcacgcgtgtctccaactcacgggtgcgcacgctcctcgaagccgtggagcatctggccgacagtgccgaggccgatcccctccgccggctcgcccgtctgcgtgaggagcgcgccgcgctcgacgccgagatcgaccggatcgaggaatcgggccgggccgatccgctggacgacgaagagctctacgaggaagccgagaacgtgctgcatctggcgcgcgagctcccggccgacttcacacgggtcgccgagtccctcaagctgatgcagcgcgacgtcgtcgcccatctgcgccgcgacgagcggccgacgggtgaggtgctccgcgaatacctccagcgcgcgcaggacgtgatgaactcgacgccggaagggcgcgcgttcgccggtgccctgagactcatcggcgatccggaccgcatcgatgcgctcaccgaacagctgcacggcctgctccggcagccgttcgcccgcatgctcgacgccacccagcgtgccgaactcgatgcgatcgggcgtcgggtggaactcggcgtcgaggaggtcctcgccgcgcagcggcgggcatcccatgtcatcaccggccaggtgaagacccatgatccgctgcgggaccgtcagatcgacgacctgctccgcgacgtcatcgccgcgcttcacgtctgggatggcacgggggcgagcgccgcgccggtgcgcagcctcccactcatcgatctgggtcacctcagacagacggtgagcagcatccgccctcccgccgtccccgccccgctcgcggatgccgaggatgtcgagttccccgatatcgacacgcgagcgtggggtggtccgaggtatgcggagctcgaagagtacgtctcgaacctcggcccggagttcgatctcgcgaccgcgttcgaggatgccgccgacgacacccgccggcccgtcgacctcgtcggactgctcgagatcgctcatcgcaacggcatgaccgagagcgatgcggtctcggtcgtcgaggcgctgcgtcccgacggctcgacacgacgtttcgcgttcggcgccgtcacggcgcgcaacccgaaggaagaagcacatgcctga

SEQ ID NO: 47953 - DNA, 663 bp, Microbacterium sp. Root1433D1
atgcctgaagagagcctcgtgacggaagcgccggtggacgacgcgttcatcgcccccgtcccgatggaagacgacatcgaggagcacttcgcgggtgatcgagggacgctcgatcccgagatccgacggctgctcgcgcacatcctccagcgtcgtttcatcgccgcggagcgcaatcgtcgggagtggacgcttctgctcgaccaccagcaggtgatcgagtcgcggctgaacgacctctacctccgcctggtcgtcgaccacggtcgcggattcgcctacaagcagcagctgcgctccgacgagatcgacatgccggtgctgctgaaggacgcgccctacacgcgagccgagaccctggtgctggtgcatcttcgcacggtgtatcaacgcgagtccgccgccggtgaggcatccgtgcgcatcgacatcgaagacctcgagcagacggtgctcagctacttcaccgacgtcgacgggggcacggcccgacagcagaaggccatccggaacgcgatggaccgtctggatcgagagggcatcgtccaggaggagaccagtgggcgctatcggatcagtgcgctcgtcgaggtcgtcctcagcgccgagaccctgaaagagcttcgcgattggctgcggtcgcaggaagtggtggaacgatga

SEQ ID NO: 47954 - DNA, 3360 bp, Microbacterium sp. Root1433D1
atgaccatggtggacacgctcttcggactcatccccgcggggtcgcggggacagcagtgggtcgcggaggagctgcagctgatcaactggggcggatacgacgccggcccccatcgtgtgcgcttctcacccgacgcgaccctgctctgcgggggctcgggttccggcaagtccaccctcatggatgcgtacatcgccttgatgatgccccacacgacgccgttcaacggcgcctcgaacggcggagtgacgggtcgccctcgcggcgacgagcagcggaacatcctctcctacgggcgcgggaagatcgacgaatcccgcaccgaggacggcacgaagctgcgtgtgctgcgcggcgacggcgaagacacatggagtgcgatcgcgacgacgtggctcgaccacgacggatcgcgtttcaccgcggtgcgcgcgtggtacatccccgcggatgctcgcactctggaggacacgacccgggtgcgggccaccgtgaacggggcattcgatctggggcttctggagaaggcggccacgcagaggctctccgatgcgtcggtacgggcgacgggactggagaccctggcgacggaccgcgagttctcggcgcggctgcaggcggttctcggcatcggggcggcaggttccggtgcgaaggcgatcagcctcctggcgaggatccaggcggggcagcagatcacgacggtcgacgatctgtacaagaagctcgtgttggaagagccagagaccatggccaccgccgatgccgtggtggcgcatttcgacgaactcgagagcacgcgcacgaggatgctcaccgcgaagcagcaggtgagcgcgctcgagccgatccgcgggatcaaggaccgcatcgccgcggccgccgaacgcgtgcgggtgatcgacgaggtcggcgtcttcaccgatccctcctcgctcgccgcgctctggaacgcgcagcggcgcctggatctgctgcgcgaggtcgaggtcgagctgggggatcgcacccgcgcgctcagcctcgccgtccgcgagaagcgcgccctcgtcgatgccgccgatctcgagcgtgaaggcctcctcgatgtgctgcggcagtccggcggcgaccgcctggagaccgcacagcgtgagctgcgcgtggccgagcgtcgtctggaggacgtccggcgggagagggcgaagttcgacgcgatcgccgaggagctcggggtggaggtcgagaccgccgcgcagttcgatgccttcgtggccggcgcccggggctcgacgccgaagtccgacatccgcgacgcgcgtgcggccttcgcggatgcggagacggcgcgcaggaccgccgaggccgagatgcggcgtctgcgcgacgaacgcgagaggaccatccgcgtgcgcggcagcatccccgcgcacctcgacgagtcacgcgcactgctcgcacaggcggtcggactcgcgccatcggatcttccgttcgtcggggaactcatcgaagtgcgcacggagttcgagccatggcgcgaggccttcaacctcgcgctcggtggcttcgcgaggacgcttctgatcgacgtcgagcatctggcagagttccgttcggccatcaacgcggtgcgcaccccggaacggctcaactacgagggcgtccagacggggctccccgagatgcggggcgccgacccgaagacgctccccgggcggctcgaccacctgcccacgcccttcaccggctggctccagcagagactccaggagcgcttcgggtacgtctgcgtggactcgtcgtcgcagctgggcgcgcatcagagagcgctcaccatcagcggtcaggtctcgcaggggagtcgcggcgcgcacggcgggcagggccgcgccaacatgctgggcttcaccaacgaccgtcgtctgcgtgagatcgatgagcagctgcggcagctgagcgctcggcatgacgagtgcgccgcctctgcggcggacgccgaggcggccctcgaccggatcgaggcgcggtcgaccgcgttcgcgaggatcgatgacctgacctgggagcagatcgatgtcgccgcggtggaggcggagcgagagcgctgggtcgccgtcgaagccgaggtcaccacggccagccccgagatcggccagctccggcaccaggccgacgacctgaggactcgggcggcccggctccgcgacgacgaggcgcgactgagcaatgagctcgcacagacgcaggatcactggggccaggtcaccgacgacgtcgacgcgtgtcagagcgtcatcgatgcggccgcggcatcgggactcgagatgggggagcggcacgcatcgttcctcgatggtcgattcctgcattccgagacgggggacaccccgtccgcggcggagcgactggcgcacctggacaccgcgctgagaaccgcggcccagcgccttcacgaggatcgccgcgaggccgccgaggcccacgagcagcagcgcgagagcatgcgacgactcatgaccgggttcctggagcggtgggacaatctgacgctcctgccggatccggacgcgtcggtcggggagttcgagagcattctggaggcgctccagaccaatggactgcacgagctggagaccgagtggcgcgacagcctcctcaagctctccggcaacgatctgacgagtctcgactcgactctcagccgttcgctgcgcgagatcaaggatcgcatcgatcccatcaaccgcatcatggaggagctgcccttctacgatgacgatcaccgcctgcagatcaccccgcgggagaatcagacggaggcgcgcaagcgcttccgacgtgagctccgcgaggtgcggggactgatcgatgcggcctcgaccgatgcggaacgggaggctgtgtatcgcaagatgagccgcctcatcgcccggatgcgtcggacggcgcccgacttcgccgaactcatcgacgtgcgaaaccacgtgcgggtgagcgcggagcgggtcaccgccgcgacacgagagcacgtcgcgctctacgatcacatcggcgagaagtccggaggggagtcccaggagctcgtcgccttcatcgtcggcgctgctctgcgctaccaactcggagacgcgggggcggcacggccgcgctacgcgccggtcttcatggacgaagctctgatcaaggcggatgcccacttcaccaagcgcgcgatcggcgcctggagaggactcggcttccaactcgtgatcggtgcgccgaacgacaagtacagcgcgatcgagccgcacgtcgatgtcgagtacaacatcctcaaagacacgcgcggtcgctcctgggcgaaggcgaaggtggggcttccgcaggaggcggtctga

SEQ ID NO: 47955 - DNA, 1467 bp, Microbacterium sp. Root53
atgtccgttctcgcgcgtgcgctggcgatccggcggctgctcgatcccgcgggcggcaacgccgcgctgcgtctgctgcgatcgtccaacctgcccttggcgggtgccctgctgcccacgcacctcggggcgccgggtgcgaggatcccgacagccgaactgcacgagcggctcgacatcgatctggaggagctgcgccctcatctcgagctcccggagcgcacgggcaaggcgtactgcgacgactggcgtgccgcgggtctgctcgtgcgacgtgcggcgagcgacgccaggggcgagacctacgaactgtcgcccgacgccatcgacgcgcttcgggtgctcgagcagctcgaggcgcctcggacggccctcaccgagtcccggctcgtgagcctggcggccgcggtgcggcagctggcgatcgacaccgaccccgacgtcacgcgccgaatcgacgggctccgggctgagagagcccgcctggacgccgagatcgcgcgcctcgaatcgggggacatcgagcccgtggacgagcgccgtgccagagaacgcgccaccgaggtgctcgtgatggcgcaggatctccccacggacttcgcacgtgtgcgagcgcagttcgaagcgctcaaccacgacctgcgcgcacggatcctcgactcgagcaagacccccgggagcgtgctggacgacgtattccgcggcgtcgacctcatcgagtcctccgacgaggggcgcacgttcaccgcgttcgcggctctcgtgcgcgacgccgagcgctcggacgagctcgagtcggacctgtcggcggtgctgtcacgggacttcgcgctcgcgctcgcgcccgaggcgcgacggatactgcgcgccctcgtgaggcagctcaagtccggcagcagggaggtgcaggtggtgctgaccgagttcgcgcgggggctgaggcgctacgtccagtcccacgagttccagcgcgaccgcgcgctgcgcgacgcgatccaggaagcgctcgccgccgccgtcccggcgagccgacgggtgaagccgtacaccgcggcggggatcgagctggagctcacggcgagctcgttgcggagcgcgggtgagttgacgccgcacgaccccgcggagttcgagccgagcgcaccgctcgaggacgtcgagccgggtctgatcgacttcgaaagcctcgcagcgatcgcccgggagaccgagatcgatttcgtcgagctgacggaggccgtgaacgctgtcgtcgcgcggggcgaaccggcgtcggtcggggacgtgctcgaggcccacccggcgagccagggcctcgcgagcgtcatcggcctgctgtcgctcgccacgcgccacggagcgatcgacaggggtgccgtcgagcggctcacctggaccggatccgacggcgcggtgcgctccgccgatgtcgaacgtcacgtcttcacgaaggagatcccggcatga

SEQ ID NO: 47956 - DNA, 657 bp, Microbacterium sp. Root53
atgaccgatacggacgcacacgcggatcccgcggagcacctcgagtcggatgggctctggcacggcgatctcggccggctgcacgagcggtcccggcgggcgctgctggaggtgctcaaaggcccgtacctgtcgggtcgacagcagcctcagctgtgggcggccctggtcgccgacgagcgcgcgatccgctcgcggctgcacgagctcttcctcgaactcgtcatcgatcccgtcgatgagttcgcgttcgtgcgaaaggtgcggacagacgagatcgacgtgcccagcgcgctgcggtcggaggcgctgaccttcatcgatacggccatgctgctcgtcctgcggcagatccagctttcggcgatgggcgaccggcgcgtgatcgcgggacgcgacgaggtgtacgaccgactcgcggtctatcgtgccggcgcggatgagggcaccttcgaacgcaacctcaacgcggcgtggacccggatgaagagcaggttccgggtcatccacgacgtcggcgacgaccgagtcgagatctcgccggtcgtgcggtacctcatcgacgaggagagggtgcgcgcgctggccgtcgtgtatggggacatcgcgtccggcgccggtgcgggtggacgcgatgacgtggaggagaaggcatga

SEQ ID NO: 47957 - DNA, 3330 bp, Microbacterium sp. Root53
atgaccgacacggatgcgctgcgcaccgcggccgacggcgcgctcgccgtcggccagtggcggctcgccgaggtgcagctcgcgaactggggcacgttcgacggcgtgatccatcgtgtgccgatcgcccgtcaggggcaccttctcacggggccctccggatcgggcaagtcctccctgctcgacgccatcgccgccgtgctgacccccgacaagtggctgcggttcaaccaggccgcgcagggcgccggggcgcgcaccgagcagcgagggctcgtcagctacgtgcgcggcgcgttctcgcgcaccgaggatgcgaccgacgggcgcgtcgtgagcacctacctgcgtcccggttccacctggagcgggatcctcctccggtacgaggacggcggtggcggtaccgcgagccttgcacgtctgttcttcctcaagaagagcggttctgcgctcgcggacctgcaggacctctgcctgatcgaacgtggacccgtcgacctgcgtgacctcgaggacttcgcgcgcggcggcatcgaggcgaggaaggcgcaggcgcgctggcccgacgccctcatcaccaccaaccgcagccacggtcgcttctacgcccggctgcagtccatcttcggaatcgcgcaggagaacgcgctgcagctcctgcacaagactcagtcggccaagaacctcgacagcctggaccagctgttccgcgacttcatgctcgaccgacccgcgacgttcgacatcgcggagaccgcgcgcgagcagttcggcgagctgcgggacgcccatgatcgcgtcgtcgacctgcgtcgtcagcgcgatcatcttctgcagctgcgagatgcctccacggcgctcgacgccgcgcagctcgatgtcggtcgatcccaggtcctgatcgacgcgaacgtgccgtaccagaagggcgaggcgcttcgactggtgcgtgaggagctcggcgacctcgatgagcggatcgcgcagctcgagatcgacgcggaacgcgcgcgggctgtcgccgcgcgggccgaggacacctacctcgccgcgcgcgacgcggcgatggaacgcgggggagctgaggccgagcatctgcagcagcggctcgacgacgcccggcgtgccgctcgtgacgcgggcgaacggtgggagaccctcgcgcgtcagctcgcgacggtgggcatcgagcatgcgcccgagaccgccgaggagttcacggagctccgcgcagccatcgatcgcgaactcggcgaggcgacgagcgcgacaggcgccacgcatccgcagcatgaacgactcaccgtggcgaagcgcgagctgcgccggatcgacggggagatcgacgcgctgcgcacgagcggcacgaccgtgccgcgggggctgctcgaggcccggcgtcagatcgcggccggcgtgggcgtaccggcgtcggctctgccgttcgcggccgagctgctcgaggtcaggcctgagttcgacgcctgggcgggcgcgatcgagcgggtgctccgtccgcttgctctcacgatgctggtgcggccggagcatctcccggccgtgcggcgctgggtcgacgcgaacgagatcgcggtgcgcctggtgttcgaggaagccggcggatcggcgggcccgccgcggcccgccgcgagcagcacctcgctcgtcaaccgtgtgcgcgtggcccagggcccgttcggcacctggctctcggcgcggttgtcggagcagttcgactacgcgtgcgtcgagaccccggacgggatggacgagcatgtccgggccgtcacgatcaacggccagatcaagtcgtcccgcacccgctacgagaaggacgaccgggtgaggatccgtgatcgggccgcgtgggtgctgggcgatcgcgccgcgaagctggaggcgctgatcgccttgcgcgcaacggcagatgccgaggtgaccgccgcacagcgggatgtcgaccgcgccgaggagcgccgggcgttcgaggagcgccggcgcggggcgctcgcgacgctgcgggaggcctcctggcacagcgtcgatcggtcgggcgccgccatggctgtcgccgcgctcgagcagagactcgcagagctcacgaaggccgatggcgcgctgcgcgacgcgatcgtcgtgtgccaggccgccgagagggatcgagatgaggcctccgccatcgaccgcgccgcgcaggtcgcgctcgatgcgtcccgggcggcgcgggccgccgccgctgaggacgaggccggcctcatggcggagttcgatgccgggctcgtggagcaggtcggcgagcagacccgtgcggagctcgcccggaggttccgcgcggtgaagcggacgctcacgcggcgcgagctggcggagatcggccagcgagtcggcggtgtgctgatcgccgagcgggatgccgcgatcggtcgggccacgcacgccggcaacgacgtgacccgactcgcggcgcagttcatcgatcggtggccggaggcatcggccgagaggatcgccgccatcgacgaccgcggcggcttcatcgacatgctcgaccgcatcctcgccaacggcctgcccgagcaggagacgcgcttccggactctgctgagggatcgctcgcgcgacctgatcggggacctgcgcggcgagatcctgggagccacgcgcgcgatccaggatcggatcgacagcgtgaatgccgcgctgcgccgttccgcgttcgacgagggacgctatctccggctccaggttcggcaggtccacagcgcgacggtcaagcgcttcctcgccgagctgaaggacatcgccgacgacagctggaccgacgaggacgacgcgtcggctgaacgccgcttcgccctcctggccgagctgatgcgacggttcgggtcgagcgaccacatcgaccgtcgctggtacgcggagtgtctcgacacccgcctgcatgccacgttccgggcgcacgaggtcgacgagcacgaccgcgtgcacgccacgtacgattcgggtgccgcgatgtcgggcgggcagcagcagaagctcgtcgtgttctgccttgcggccgcgctgcgctaccagctcgcggatcccgatgcgccgttctcccgctacggcacgatcgtgctcgacgaggcgttcgacaaggccgacagcggctacacgaagatggcgttgaacgtgttcgtggagttcggcttccagatgatcctcgccacgccgcagaagctgctgcgaacgatcgagccgtacgtgggggccgcgacctccgtcgagaaccccacccggcggcgcagcgtgctctcgcaggtcgactggcgaggtcgacggtga

SEQ ID NO: 47958 - DNA, 1068 bp, Microbacterium sp. Root53
gtgctcactgtgcccctcaggcctccgagcgaacgggaggcgcgggcggaccaggcggcggcgcagtcgtgggcacgcgagtggctcacgtggcccgtctcggacggggcggacgtcgagtgggcgtcgcgcgagtggcgcacggtgggccggcagcgccttccggtgcgtctgcacctgcgcgatccggacgcagtcgcggcgttcgtcggcggccgggccgccgcggagtggacgcgcttgagggatcgagcggcgacgatccgggatcacctgcacggcgcggatccggcggcgctcgcgaccgcgatccgtcggcatgccgcgacgctcatcggctacggcgaccgcgagttcgaccaggtcctggcggcggcggcatgggtgatcggcgagcacgtgcgcggactgcgcccgcggcagcttcccatccgcggcgtcgacagcaagtggttcggggcgcaccgctcggtggtgagcgcgctcgcggcgacgagcggcgtcgacgatctgggcatcgtggacgcagaccccctggtgcgcgtgcgggtgctcgatccgtcgctgcttcccggtggtccgctcgatttcgctgctccggtggcgcagctgcaactgctcgccctggccccgcgcggcgcgttcgtcttcgagaatctcgagtcggtgctggcgatgccggcgtggcccggagcgatcgcgatccacggatcgggatatgccgtcggacggctccgggacgtgccgtggctggcgcgaacgcccgtcgtgtactggggcgacgtggattcgaacggcttcgccatcctccaccagctgagggcacaccatgacgacgtccggtcggtgctgatggacgaggagacgctgcgcgcgcattccgacctgtgggtggtcgaatcgcagcctgcccgggggcgattcgctcacctcacggagtccgaggagcggactctggcggcgcttcgagctgccggggatgtgcgcctcgaacaggagcgcgtgccctggcagacggcggtggaggcgctgtcggtggcctgggccggactgccgtcggtgccgtga

SEQ ID NO: 47959 - DNA, 1431 bp, Lysobacter sp. Root604
atgggtttcgcattggacgccaactttccgccacccctattcgatcgtctgccgccggctctgtttaggccgctggcggcagcgaacaatcgacgctattggataattctgtgccgccttatcgaggagatgtggggcgacggcggccgatcgcccggcgaagaggcgccgagggcggtggtggtgagaaccatcgagacgtttctagccgccgacgatccttgggaggaagagctcgagacgccggtggcgaaccgcgcacacaatatcgccgatgtgctggtaggcagcggttggctggcccaaaggcgccgtggtctggtcgacatgattacggtccgtccggtgattgcccagttctatgtcgttctgtgcgagttcgcctatcacgagcccgaatttattggcagcaaggttcgatcgattctgctcaatcttcgtgcggtggattccggcgaggcctctggcgatcagtacgtggaggccgccaaacaggctaagcgctgcatggcgcatatcgccaacacgggctgccgcgttcaggatttgatggaggctttgctgaagcgcacgtcggcacgggacttcgtgcatggtttcttcgaggaatacatagaaaaggtattcatcgcggactacagcgaactgcgcacgcgcgaccaccctttgcagtaccgctccgccatcatcgcactgacccttcaattccagcacgatccagaaaaatccgctgctttgatcgattggtatcaagagaagctagctgccggtgacagagtgaaggccgagaccttgtatgagcgcgacacgcgcctgttactgcgcttgcgcgatgtggatgatcagctgaggcgcctggatgaggaaatccgcgacgccaaccaaagagcagtgacctttatcgagtacaagcttcgtgcacccaagcagctggacaagctcattgccaaggcgttgcgttcgatcgatgggatagaagagggggcgatcgctctaccggcggcgccccgcgggcggcatgcctccgagtggggcctggccaggccgaggcagcttgcacggccttcggtctcgaccgatgtcgagcgtacgcctccgacgatcgaggagctggcgatggaagcactgcgcaggcggatggccgagagccgtatggtcaagcctgtccacttggccaattacgttggtaaacatctttctggtaggggatcggtgtcttccgacgatctaacgattacgtccattaacgatctttgctgctatcagcgtctgctactgatcgcctcgcgcggcgactgtccgccggccatgcgtcgttcagatccacaactgcagatgctcaagcgcgtctggatttctttcgacgacgggatcacatgcaacgcctatatggagcaccgtcggttcaatatccaactggagcccgcctga

SEQ ID NO: 47960 - DNA, 600 bp, Lysobacter sp. Root604
atggccaactgggagcgactggccgagcaaagccaggattacactgtcggggacttccagcaggccggctaccggctggtaatggaacaggttctctatgccgccgatagacgcagccgcgtcgcttacgatttgatcgtcaagcatctggcgacttatcgagagctgctaggaaagctaggaattgtggtggtgcacaacccgcacatgtcctatctagtggccacgcctaaccaatatgtggccgagaagatgcggctatccgagactcgcctggcgcttgtgttgaggcgattgtacgacgataagatccatgcgaccgagatcgtcgcaggcgaggccttcgtcgaactcatcgaactcgaacgtgcctacaaagacctgctatcgcgcgagcttcccgacaaggccgagctaagggagctgttgcgggccattaagcgctacgggctggtcaagttcgaggaggcagacgacgaccagccgttccagatcgtaattcggccgggcatcgtcgatgtgctgggtgagacagcgctgctgcagttggccaatcatgcgcccgtcgtgggtggggaggacgacgatgaagcagcttga

SEQ ID NO: 47961 - DNA, 3426 bp, Lysobacter sp. Root604
atgaagcagcttgaagcgatcggtctgattcagttcttcctttacgagcgcaaagaccttgagcttggctggaacacggccttccttggtccgaacggaacgggcaagacggctttgcttgatgccttgcagatcgtcttgctggccgcagacagcaatcggacgcacttcaacgcttccggtgagggtaagaagcgcgcccgcggcctccgcgactactgtcttggcatctatggacaaaccgaagccgagcgctaccgggccggggccaacacctatatcaacctagtcttccgcgatgccgagagcggtgtgccggtgaccgcaggcgtctccttggccgcacaggcggataacccggaggtcgccttcaacggtttgtacattctgcccggcgtcgcgctggataccggcgcgcacgttgagcgagaaggggggcgggaaaccatcttgccttggcgtaggtttcagcacgttgccggcgacctgtgccgattggccgggacatccgcattcttcaccgcgaatcgcgaagagttctctcggcgcctgtacgtcgagcatttggcttccccgggcgagaagccgaatgtacgcgccatccgatcggccttcgcgcgatcgcttaagctcaacaaggacgtaaccgatcttagcgagacgctccgcgaccacctgattgagcaacgcttcactaacgtgcgccagtttcgcgcccgtctggatcagtttcgacacgtacgcgagctgatccgacagattaccgagcggatcgagcgggttacggcagtgacgaagggttatgcggtggtccagcgcgagcgtaccgcacagtcgaatctcgaatgtctgcaggctgtctacgagaccgagcgtgtcggcgagaagctggcggagaacgaagatcgcatcgaggcgctcgccaaggatctagaagccgcgaccctagcattggagcgagccgagctggaggttcgcgaagccgatgccgcgcgtgagcgtgcattgatggctcggagcctagatccggacttccagaagcaagcagggcacgcggagcgtctgacagacctcgagactagctggaaggataagcgggaggcattgacctcgacactcgaaatcgcgatcgcggcggtggcgctcgccggcaagctaccggaaatggccgacgaacgcggcgtattcgaggatgcggtgacacagctgctgtctctgaaggaagcagcgactgcggggcaactgccaccggctgaggacattttgtctgtgacccggctgctggccgagatccatgggctggtgctcaaggcctcgtcatcagcggacctcgacttgcgagcggcccgcgacctgcgtcgagataccaagatggcgttggatcgggcccagcgcggtctaactgctctgcgcgaaccgacgttggccctacagcgcatgctcgcggatgctgggatacacgcgacgcccgtgtgcgatctggtatcggttacggaccctgagtggcagccggcgctcgaagcctatctcgcgactcacgtcgacgcattgttggtaccgcgcgagcaggagcttgcggcaatcgatctatataaagggctgaaaggcgcgcagcgcgtatatcgagtgaagttggcgctgccttcgcgtggccggccctggcaggcgcctggcggcggcaagtatgctgcgtcattgatagccggcgagagccgcgaagcggtctggtacctgcagggtgaactgggcaggttgtcgttggccagcagcagccaggagctgcaggcgggcacgaaagcgctgtccaaggagggcatggttagctcaggcggtggtgtggaacggctgctgctgccgccccagaacgagctgaaaatcggtcgcagcgactcggacgctttgcgccatcgagcggaactggcgctacgagaggctgaaatccaactgcagagcaccgagcagcgtgccaggcaattgcaggcggcgtttccgcgtctggctccgtacgccgaagccgaggacgttcgcgtacggctggaaggcctgttctccgcggctcgtgagaacggccgagtcgtcgatgagcttcgcatgcgactggcggcctcgcagaccgatcaacttgcgaacctccaggcatcgcttgaggcggccggccgcttagcctcgggcgcgcgcgatgccgaaaagcattgggtcggccgggtggctgagctgaaggcccaacatgaggtcgcgacgaattcaggaaagaatctgattcaacaactggaagtggtgcgagctcgcgaaactgcgtgccgacaacagccgctatacgatgccaacgaggtcgagcgccatcgagtccgttatgacgagcgcttcgaagaagatatggatgccaggcttcatgcttgtgccgaggcgattcggagcgcaggaacgaaagctgacaacgccgatcgcgacgcctggcgggacttcagccagtacgtagccgacttccagctgcagaatcacgatatttccagcaaccaatggcagcgggcgtatcagtacgcgcttgaggataaacgtcgtttagaagagatggagttggccgagcgccttgcgcaggccgaggaagcgtatgacgctgccgtaaaggtttttcgcaccgacgttgcccagacattgttggaggggttcgacgcgataggagagcagatcaacaacctcaaccaagtgctaaaggccgcgccggagttttcaaacggcgagcggtatcagttcaagtacaagccggttgatcagcaccgggccctctacgatttcctcaagcgtgtccgcgaacagggtgatgcggaagaggggattttcggagggtcgggcaaggtgccggaggagttcaggtccctagtcgaaggcgacgcaaactcggaactcttactggaaagcagtccgctgaacgaccaccgccgcttcttcagctacgacgtagagatatatcatgatggaaagtcgatgggctggctcagcaagcgcttcgggccgggttcaggaggcgagcaccgtactcccttgtatgtcatcttcggcgccgcgcttgcggccgcgtacggcaaggcccgtggtgcgcaaaccactggcggcatcatcatgctcgatgaggctttcgagaagatggacgcgcagaacgtgcgggcaaccgccgagtacctgaacgcccttggcctgcaactgatcatggcagggccagagaccgaccagccgaaaatgtcgtccttcctgaatgtctattacgacatggcgaggttcgggtcgcgaaccgtgcaaatgacaaagaacgtcgttatggatgaggccagggagctgctccagagcgacaacttcctgctgcatcccgagttgcttgagcgcgagaaggaagcgttggcggagtcggaagatgtccctcgcggatga

SEQ ID NO: 47962 - DNA, 1179 bp, Lysobacter sp. Root604
atgtccctcgcggatgacgtcctcttccgtttactgaagcgcggcgagagcgcctcgcttcgtgcgtccggtcgtgcgatccgagagcggttccaggcccctgcatcagggtactggcgtctgtctctcgatcagcgcgatcattgccatgagcggttgcgtgcggcagaaaaggccggtggtatcgagttgaaatgggccggtcagggcggagacgacaggccgatcgagctcgtgcagttgcacgatacggagaggttggcggcattcctcggcgttaatagtatggcggccgcagtggcgagtgcggccgaggttctggcaccttggcgcaagcgcatactacgagttgacgagctgcttgatcgttggtcgcacctgaagaatgtgcgtggtctgtccacggtggccgcgacagaatttgccgatgcgctgcgggtgatggactctctggaagagcggcagggagaggatcagatcgtccgcacgcttagtgcgcagctgttcggagattcaaagcgcatcgaacagttggagcgacacttggacgtgctgacaggggagtcgatcacctcaccggctcggcattggagcgaggtgttcggaaggttggggttggtgaaggagccgcagccattcctcgttgccggcacaggagcgctggaactcgtcgggggcgaggtttgtccgatcgtgaggccgtttgtgggagtatcgaacaaggccgtgctcggctacaaaggcagcccatgctgggtgctcacgatcgagaaccttacgacattccacgccgccagccagttgctcgatggtaggggagcgctaattctgtacacggccgggatgccgtcgccgacctggacctcggcctactcacgaatactggcatcgttgcctgagtcggtcttgacgtaccactggggcgacattgacgtgggtggttttcgtatcgcggcctatatcaagcagaagtgcatcggaagtcggcgtttccgcccctggctgatggacgcgagtcggctggtatcggtggcgcggggcgctccggaagcggagtcgacgagagctctcatggccaagcatgctgccagtgcagggtgggcttcgctttctgagtccatgatgccggtttgtatagagcaggagcagattaaagtggctgttccagggctcgagtag

SEQ ID NO: 47963 - DNA, 1485 bp, Nocardioides sp. Root614
ttgtcgttgcgccaatacagccccgcctggcgtctcctaggtgccgataacgctccgctcatcatcggatttctcgaaagcgcgttcctgtctggcaacgtccgacgactccccgcgcaccagattcgcgacctcctcgacgaccacctcgaagcagtgcgcgcgatctcgttggagggtgcgtacccgaagacggccgacgcgtatctggccgactggtccgacgcccgcgcagggtggctccgccgctactacccagcaggcaccgatgtcgcccactacgagccgacctctcctgtggagactgtcgcggcattcgtccgcgggctcggccctcgggagttcctaggcacggcgagccgcattctgaccgtccgcgaccttctccgccagatcgccggcggagccggcgtcgacccagacgtccgcctggcagcgctaaaacggcagcgcgatgagctcgacgaacagatcgccgccgttagagctggcgaggacgtcggcctcgacgagacagccgtccgcgagcgataccaacaggcgctagccaccgcccgagagctcctgggagacctccgtcaggtcgaagaaaacttccgagccctcgaccgcgacgttcgcctccgggcaacgacttggaacggtccccgcggcgagtttctggagagcgtcttcggaaccacgaccgaaatcggtgactccgaccaaggtcgttcctgggctgcgttctgggcacacctgctcgcacccaaggaccaagctgagcttgacgaactcttgaccgtgctcgccgacattccagcactcagcggtgacagcggggccatcggcacggtcttgaagactgacctctttgtcgccgctgaggcagcccagcgcacagtggcctcgctgtcgtcgcagcttcgcaggttcttggacgagcagacgtgggctgagggccgcctcattcacgcgagcatccgcaacaccctcacgctggcgctcgccgcacgcgaccaactgctcaaagccccgggggccgacatcacctcgttgagggccgacatctcccttccgctcgagcgtcctctatacacaccccgcgccgctgccgaacttcatacagtcgttgagcttccgagcgacacggaggagctcgacgatctagaggatctgctcgaggtaacctcagtggacctcgaccacctccgcaatcgcattcacgaagtcgtagctcggcgcgccgggaacgcgaccctgcgccaggtcgtcgacactcacccgattgccgacggcctcgctgaactcgtcggctatctgcgcattgccgagactgaacccggcacctacatcgaccctggccacaccgaacaggtttcttgggacacagaccctggagccacgcgccgcgcaaccgtgccgctggtcgtgttcggtgaggctgacgacgccgaggaagacgaacctgtgaccacggtgagacccggaggcggtgactcataa

SEQ ID NO: 47964 - DNA, 651 bp, Nocardioides sp. Root614
atggcgacaccagagatctcaatcgcgctcgcgcatcttcttcggggcccgattcacgccgaagaccagccggcggcgtggaccaccatctccacgttcactaagcagttgcgcgaccacctcgatgtccttggcctgcggctcgtcatcgacgacaccgagcggtacgcgtacctgcgagcacatgacgagctgcctgacggaatgcctcgcctcattcgccgacacacgcttacgttcagttcgagcgttctgctggtcatgctgcggcaacaactggctaccgctgaaagcgatgggcagatgccgcgcctcgtgatcaccggtaccgacatggtcgagatgctccgcctgtaccggcacgacgacttgacccgggaccagatcaacggcgacatcagcgtcctcgacaagctcggctacatccgcacactccgtggccaggacgacacttgggaagttcgccgcatcatcaaggccatcgttaccggtgagtggatcaatacctacggtcaggaactcctcgcagccatcacagccatcgaaggcaaggacgaatcgaacgaccacggcgttgacggcgacgatgcacgggatggtgcgccagcagacgcggcgctgcccgaagcatccgcaccaaagggcgcctga

SEQ ID NO: 47965 - DNA, 3486 bp, Nocardioides sp. Root614
atgcacgggatggtgcgccagcagacgcggcgctgcccgaagcatccgcaccaaagggcgcctgacgtggccatcatcgaaagcgggcaaacgcagctcgacacggaatccctcgagaccaacgatctagagggggtgcgcctggccgagtttcagatcctcaactggggcaccttcgacggacaagtcgcacgactcccgatgtacggccaaaacgctctcctgaccggccaagtcgggtccgggaaatccaccattgtcgacgccgtcaccaccctcttcgcacaagccagtcgagtcactttcaaccgcgctgccggcgcagagtctcgtgaacgaactgtcacgagctatgtcctcggccaccatcgaaacacttacgacgaaatcaccggcacacagaagccggaagcacttcggaccccgaagaccgcgttcagcgtcatcctcgctcggttcacaggcgtaccgacgagcgccaccaacacatgcacagcaggcgtcatctattggttcagcgacggcgccagcgtgcccaaccgcttttacttcaccagtccggccgccatcgacatcgcggaccacctcatcggtcaccgaaccatgcgcgatgttcgcgctgcgctccgagatctcgacgccaaggtcgaagacaccttcaccaactacgcgcgcaacctgtgccgcgcgctcggcaccagccgacccgccttcgatctcctcgtccaaaccatctccatgaagcaggtcggcaacctcaccgagttcgtgcgcgaccacatgcttgaagcaagcgacgtcgacgagctcatcaccagaatcctcgcccattacgcggatctcgtcaggtcccacgaactcgtacaagatgcacgcaggcagctcgacaagctcgctcccgtcgtcgaacacgccaaccggttcgaccgagccgacgaacgcatcaccctgcagagcgcagcgctgcgcgccgtcccccaagttgtcgccggccgacgtatcgatcttctgaccatggaaatcggagttctcgacgaagaactaccgaagctcgaccacagcctcatccggctggcgaaggagctccagaagcgcgaaggcgagtacctccagctcgagatcgccgtcgcgaacgaagggggtgccgagctcagcgaagcggagcatggcatctccaacgccaaagcgcgcctcacgagcacccggatcgcagcggccgagatgcaggagttggctgcaacggccagtgttcaagcgccagagactgccgctgaccaccccgccttcaccaggctgctcacgcagcatctggagcagctaacagtcgacgaagtcgcggcgaacgagcaggtcttctcagcgcgaaccaatcgcgaccacgcccagcaagacgtcgaagcgctcgaacgcgagctccaacagaccggaacccgtccgtcgaatgtcccggaggccgaagaccgtatccgcgaacgcgtcgcgcagggcgtcgggatcgacccggccgagctgccgttcattgccgaactcgtcatggtcgcccctgagcacgccgcctgggaacttgcagccgagcgactcgtccggggcttcgcactctccatgctcgtcccgacggagcactaccctgccgtggcttcatgggtcgacgagaacaacctccgcggcaagctcgattactacccagtcgccgatgacgtccgcacccctcggcccgcagccgagggcaccatcgcagcgtgccttcgagtcaggcctgaccactggatggccgcttgggtggctggagaacttgcccggcgtttcacccatctactgctcgaggaccccacccagctccgaactcactccagagcagtcactgtcgccggccagatcaaggaacgcgaccggcacaccaaggatgaccgcggcaccggccgccgaagctacgttctcggctgggacacagccgcccgccgcgacgccatcatcgaagatcttgcagtcaagaagcctcagttgggcgagctagacgcagagctgggggagcggcacaaccgggcccggagtctgcgtgaacgtcaatacgcgaccaaacagctcacggctcgtttcagcgaccccgacaccatcgacgtcgcatcagcagtcagggctctcgtcgaagccgaacagctcttggccgacctcaaggagatggccaaggacctcgccgcgctcacggacaggcgcgacaaggcactggaactggttgacgcgctcaaggaacgcgaaggtcgactccgcgaccgtcgcggtggcgcccgtgaacgtcgaagccaataccagcggcaactcgacgccgcacacgccgagatgacgggcgcgctccgcgtcgcgctcaccgatgaagttcaggtggcattggacgaggccctcgcgcgcgccggccaagaacccgcccaggttgtcgacgtccaagcgtgggcaacaaaactgactgccgacattcaaggacgcatcgactccgcaacagcgacgcgtgaacggtcgggtcgcgaccttgtcggcgcaatgaaggacttcgctggcttgtgggaagccctcgtcaccgagctcgatccaacacaggtcgtgtctcgggacgggttccgggagctgaaggaccgcatcgagaacgatgatctgccgcgcttcgagaagaacttccgggagcaactcgaaacgaacgcaatccacgaactcgtcgcgttcgccaagttcctcgagcgtgaggagaaaagcatgactggtcgcatcgagaccatcaaccaggcgctcaacgacatcgactaccaccccggcacgtacatccggctcgaaccagatccgaccccagacccgaccgtccgtgagttcaggggccaactccggaacatcacccaaggcgccctgctcggcgacgatgacacctacgccgagacccgattcctactggtcaaggatcttctcgaccggttcgcgggacgggaaggttcgaccacccaggacaaggcctggaccgaccgcgtcaccgacgtccgcaactggttcacattcgctgccgccgagcgccgccgaggcgacggtgacgccctcgttgagcactacaccgactccggcggtaagtccggcggccagaaggagaaactcgcctacaccgtcttggctgcggcgctgtcgtatcagtatggcctcgccagtggaaaccgcgatgcgttccgtttcgtgatgattgacgaagccttcggccgcgggtccgacgaatcgaccaggttcgggctcgagcttttcacgcgcctcgggctccaactcatggtcgtcaccccgctgcagaagatcgaggcgatcgaacctcatgtgaaggccgtcgggtacgtccgcgctggagaccccaggagccgactcctttcgctgaccatcgaagagctccgcaagaagcgtgaactttggcgtcgagcctcccgtgccggcgacgcgttcacggtggtcgcggaggacgcgtga

SEQ ID NO: 47966 - DNA, 1215 bp, Nocardioides sp. Root614
gtgagatccgactgggcaacgcctgcaacggttaccgacgccgtgcgccggaagtgggatagcggccagttgctcgcagcgctccacgccgccccgcacgaccagactcggctgttcccgctgcgagttcggctcccacgtcctgatcgcgacgaactgtcgaacgacttcaaggctgccacggcctgggcgagaagacttcaggacgctgccatcgccaacggatggacactcgacacccggcggacgaacgtccctgggctcggtatgcaaccggtcccctacgccgccatcgtgccgagcggcgaggttgctcttgcgctcctcagcagtgccgaacgcaagcaggcccaagtattcgcatcagccatcgccgtgaccgagtgccacccggtcatcgcagacgcggcccgtgcagttgcgctccagcgcccgcatgacgtcgttgcggccggcgacgcctgggctcttctcctctcggccgccctatgggtcgccgacaaccctcgccccggcgtatacgtccgcgagataccggttgccgggatgcacaccaaggtggtcgaaaccaaccgagccctcttcggccggctcctcgaaaccacgaccaacccggcctcggtcccggtcggcgcgaagaccatggaggagaagtacggattccgggtgccacagcgacgagtccgtatccgcggcccgcgacacgtcctcggcatgcaggccggcccgggagacgcagacgtgacctggccgatccccgacctcggagcgttcattccgtcgtccgacgtcaccgaggttgtagtcgttgagaaccagacatcgttccttgtcgtaccggacgcaccgaatcgtctggtcatctggggcgcggggtacggcgccgacgagctcgtcgcgtccttaccgtggctagcgcacgtgcggcttcactactggggcgatatcgacactcatgggttcgccattctggacgctgtccggtgcgccgttgagcacacggagtcagttctcatggatgtcgagacgctgacggcccaccgtgacttctacgtcacggaagccagacagtccacgcgagaactgaacaacctcacaccgaatgagcgcagggtgctcgacggtctgcggatcggggcatggggtccacgcgttcgccttgaacaggagttcattcggttcgaccgggttcgggccgcgttccaacaaccctga

SEQ ID NO: 47967 - DNA, 1446 bp, Pseudoxanthomonas sp. Root65
atgacccagccgccgtcgttgttccccctgctgcccggcgggctgttcggcccgctcgcctcggccaaccgcgagcactactggctgctgctgtgccggctgttcgacgaattcttcgggccggatgcgccggtgccgccgagcatggggttccagcgtcgcgagatcaccgcggcgctggagcgctacctgctggccgacgacccgtgggaagacgaggacggccagactccggacacgccgctgccggtgcgggtcaacagcatctacgagcgcttccgcagcacgggatggctgcggcaggaacgcatcggcgcgcgcgagatggtcaccatgccgccggtcgtgcaccagttcctctcgctgctggtggaattcgccgagcacggcccgaccttcgtctcggccaagatgcgctcgatcgaacaccagctgcagcaggtggccgacggcagggcgtccggcgatgccctggacgaagccgccgaccaggcacggcgactgctggtgtcgctgtcgtcgatgagcctgcaggtccgcgacctgatgccggaactgagcaaggccgaatccaccgcgcagttcgcacgccagtggttcgagcgctatgtcagcgcattcttcatcggcgactacgccgaactgcacaaaggcgaccatccgctggcgcgacgcagcgcgatcctgtcggtggcgcagcagatcgagaccggcgagcgccgcaccgcgctgcaagcgtggtatcgcgaacacgtcggcggtggcgatgacgcgcgcggcgaccagcgcttcgcgcgcagcctgcgccggctgcgcgaactcgatcgcatcgacgaatacctgggccggctggacgacgacatccgccaggccaaccggcgtgcgctggccttcctcgactaccggttgcgtgcgccggacaagctggacacgctgttgcgccgcgcctgccgcggcgtgcagcacgcaccggaagctgcgctgcgtttgccggtggcgccgggcgcgctgatggacgcggcgcgcctgcgcccgccgcggcagaagccgcagtcgatcccgcgcagcgccaacgccacccagccccccacccccgaacaactggcccggctcagcctgctgcggcggatgaaacgcgcgcgactggtcaatgccgacgacatggcgcgctacatcggcacgcacctggacaaccgcgacgaggtcgagtccggcgcgttctccatcgccagcatcgaagacctgcgcgcctaccagaccctgctcacgctcgccctgcgcagccatcgcaccggcggcctgcggcgcgaagacccgctgggtcgcctgttgcgcggctgccgcgtcgagttgctcgacgccggcgggcgcgacgacaacggctacctgcgcgcgccgcgcttcgtcgtgcgccgcatcggccagccttcacggaaaaccgcatga

SEQ ID NO: 47968 - DNA, 642 bp, Pseudoxanthomonas sp. Root65
atgaaacgcagctggaccaccctcagccaactctccaacggcgtctacgccgtgcaggatttcgaacgcgccgcctaccggctggtggtggagcaggtgctgtacgccagcgaccgcagcacgcgcctggcctaccacctggtggaagatcactacgacgatttcgtcgccgcgctggcgccgctgggcatccgcctggagcgcaacgcgcactaccgctacgtggtggcgctgcccgcgcatgccgagggcgtgccggtgacgctggccgaaacgctgttgctgctggtgctgcggcagcgctacgacgaggcgatgcggcagggcctggtggaggacgaaggcgtcgtcaccgtggagctgcccgaacttcaggaggcctaccaggcgctcgccggacggccgatgcccgaggtcggcgcactgcgcgaactggcgcgcacgctcaagcgctggggcacgtgccggctggtggaatcggaacccgacgatccgcagccgttccacctgcatgtgcggcccgccatcgtcgagatcgtcggcgagcagtggctgcaacgcctggaccagcacaaccgcgacgacgatgccgacgcggccgaccacgacgacgtcacggaggacggcgatgcagcagcttga

SEQ ID NO: 47969 - DNA, 3429 bp, Pseudoxanthomonas sp. Root65
atgcagcagcttgagcgcgtacacctggtgcagttcttcctgttcgaggcgcagaccctggaactggatgccaccaccgccatcatcgcgcccaacggcgccggcaagagcgcgttgctggacgcgctgcagatcgtgctgctgggcggcgaccgcagccgcatccgcttcaacgcgcaggccggcggcagccaccgcgcgcgcaccatccgcgactactgcctgggcgtgttccgcagcggcgatgacgggcgcaagcggcgtaccgcgaccacctacatctcgctggtgttccgcgacaccgacaccggcgacgtcctgaccgccggcatcgcgctcggcgcgtcggtggacgagcccgaccaccgcctgcatggcctctatctgctgccgggcgtggcactggagctggcggaccacgtggagcaggtcaggggcaaggagctgccgctggcgtggacgacgttccgcgagatggcgctgcgccgctgcaaggccgccggcggacaacccgaactgcatacggtggccgagcgcttcgtcaaggacctgctgctgcgcttgcgcgcttcgcccacggccaatcccgacatcaatgcctaccgcaaggcgttcctcaacgcgctcaacctgcagcgcgtggaagacgtggacctgttcgtgcgcacgctggtcgccgaggaccggcctaccgatatcgcccgcttccgcgccctgctggaaagtttccgccagatccgcgaccgcatcgaacaggtgcgccagcgcatcgatgccgccgaaggcgtcgaacagcagtacaaccgcatcgcggcgcaggccgtgcgtgccgcgtcctaccgcgcactcgcggcggagtacgcgcgcgatctgtacggcgagcagctggaacaggccgaaggcgcggtgaccacggcggaagacgcgctggccgctacgcgtcgccgcctcgtggatacgcgtgccgagcgcgacatcctgcgcgacgaacagtcacgcgcccatgaccgcctgcagggcagcaccggttatggcgaacaggcgcaactggacgaactggccaaccgcgaccgcgaacgcctggggcaggtgagcaaggagctgctgcgcgagatcggtttcgtgcgcgaacagttccgccagctcgatgcgctcgcgctcgacggcatcgacgccgtcgcgttgcagtccgcgcgtgccgactgggatgattggcatgcgacgctttcggcgctcccggacggagatgctctgccgtggacgccggaggacctgttcgcgcgcgtccgccaggcgctgcgcgcgaccgcgccgttgcgcgaacaggtcgaccaccatgcccgccagttgcatgccgcccacgacaaggcgcgtgatgcgctggccaccgcacgccagaaccagaagcggttggcggccggccaggcggagctgcacgccgacaccgtgcggctgatgagctatctgcgcgaggctggcatcgatgcccgcccggtctgcgacctggtgcgcgtggccgaccccgcatggcagcccgccatcgaggcctacctgcgcagcaacgtcgaggcgctgctgatccccggcgaggacgaggagcgcgcggtcaagctgtatcgcagcctgtccggcggacgctcggtctatggtgtgaaactggcgctgtccagccaggcacgcgatgcgcgcaacaaggacgcagcagtcggcagcgtcgccgcgctgctggaaggcgtcaacgccgacgcgctggcgttcctgcgccggcaactcggcgaactgcgctgtgtggaaaccgaggccgagctggtgcgcagtcgccagggtctgacccgcgacggcctgctcgcgcgcggcggcagcatcgagcgccttcgcctgccggccgcaagcgatctgcgcatcggcgcgtcggacaaccgtgcccgcctgcgcgtgctgcacgaggaaatcgaaaaagccgaacgcgacgtgcgcgaaatcgagccgcgcctgcgccgcgtcgacgacagccagcgcggactcgcacggctggccgatgccgatgcggtggcacaggcgctgcacgaacgcgcgctcgaacaccggcaggtggctgggcgctaccgtaccgcgcaggaaaaccgcctggcttcgctggacccggacctgctccgcctgtccgacgccgtgcgcgaactcgcggcgcaactcggcgagtgcgaggcccgcaccgatgccctggtcgggcaggaagcggtcgcggtggccgacctcgaccgcagccgtcgcctgctcgcaggcctgcgccagcaggaagaactcgtcgcccgccgcgcggtggaagccttcaaggaccccgatgtcgatcccaacctgatcgaacgacaccgcgacgagctcgacagcaaggtcgagtcgctggaagagcgcggcaagacctgcgagcggcgcgccgacgagagcgaccggcagctaagcaagctgctgcctgaggcctggagcgcactggcgcagtacgcgcgcgatcacggcctgggcgtggacttcgacgccagcgcctggcgaccggcgctgacgctgctgcgccgcgaactgactcagctgcgcgacaccgacctggtgcgctacgaaggcgaagcgcgccaggcctacgacacggccgtggagaccttccgcgccagcgtggccgccgcgctcaacgacaacttcatccgcctgcgccagcagatcgccacgctcaaccgcaccctgcgcagcagcccgccgttctccaacaacgagcgctaccagttccattacgaggtggtgccggagttccgcgagctggagcgcttcatccgtcgcgcggtagatgtcggcggcgaggacaccctgttcggtaccgccggtgaggtgccggcggcgttccgcgagctgatcgaggacggcgccgccgcgcgcaccgccacttcgccgctggacgactaccgccgctttttccgcttcgaggtgcagatccgccaggacgacgccgtgatcggcacgctcagcgaacgcatgcgctcgggctccggcggcgaacaccgcgcgccgctgtacgtgatcgccggtgcggcgctggccgcggcctatggcaagaacgaagcgcatgcgggcggcatgggcctgatccttctggacgaattcggcgacaagatcgacgcgcagaacgcgcgcgccaccaccaactacctgcgctcgctcggcctgcaactggtgctggccgcgcccgacaccgcgcagggcacgctcagcggcgtgctggacagctatatcgaactgttccgcgacggcgacctgctgcaggccgagcgcatcgaagtgcaggcagccgcgcgcgccctgctgctgtccgaccagttcgacctgcatccggaactgctggccgaggagaccgcccgcatcgaaaggcagcaggcgccggtgtga

SEQ ID NO: 47970 - DNA, 1227 bp, Pseudoxanthomonas sp. Root65
gtgagcgatccgcggcgcgtgctggagcggctgctgcgcaagggcgagcgcgcccggctgcgcggcgatgccgctcccgcctcgttaccgatgaccgaagccagcgcgcgcgactacctgtcgctgcgcacgctggtcgaacgcgagaccttccatgcgcaggtggccctggccgagcgcgccggcgccatcgccgtgcagcgcgaccgccaccgcggcgatggcgaacacctgctgcggctcacggtgaccgacctccaggccctggcggaccacctgggcctgcccttgctggacagccgcgtgcgcgaagccgccaccgtgctgtcgccgtggttgccgctgttcccggtgctcgccgaggtactggaggcgtggcgtggcgaccgcaaggtgcggggccacgggccggaagcggcgcacgacctggccgatgccgcactggcggtgcaggcccgcctcgccgacgacgcccacgagcgcatcctgcgccgcgagagcgcgcgcctgttcgccggccgtccgcaggccagcaagcggctggaacagctcacgccctggctggacctgctgagcggcggcgcgctggtggcggacggggtggtggagaaggagcacgtctgggctgcgctgggcttgcggcgcgaaccgcagccgctgctgctggccggcaccggcacgctgctgctggacggcggcgtggagttgccgctcgccaccgccttcctcggcgtgccggttgacgccgtgcagggcgtgcgcacctcggccacctgcctgctcagtgtggagaacctagccagcttccatgacgcggcgcgcgcaacgggcgcagatcggaccctgctgctctacaccggcggcatgccgtcgccggcctggcgccgcgcctacgcccggctgctgggctcgctgccggacgatctgccggtgtggcattggggcgacatcgacgagggcggcttccgcattgccgccgtgctcgcggaaacggccgccgccagcggacatcgcctgcagccgtggcggatgtcgccgacggacggagatcgcgtggacggtcagcaggggcacgtgccgacgcccgccgtcctcgccgcgatgtgtcgatgggccgaacgcgcgggctgggacggcgtcgccctcgccctgcgtgcgcacccgctgtgccgggagcaggaagccctgcctgccgaattgccgcacgccaccgaccctccaccctga

SEQ ID NO: 47971 - DNA, 1485 bp, Nocardioides sp. Root682; identical to SEQ ID NO: 47963

SEQ ID NO: 47972 - DNA, 651 bp, Nocardioides sp. Root682; identical to SEQ ID NO: 47964

SEQ ID NO: 47973 - DNA, 3486 bp, Nocardioides sp. Root682; identical to SEQ ID NO: 47965

SEQ ID NO: 47974 - DNA, 1215 bp, Nocardioides sp. Root682; identical to SEQ ID NO: 47966

SEQ ID NO: 47975 - DNA, 1524 bp, Devosia sp. Root685
atgatcttcggtacgctgcatccaaacattttcatgctgttcgcgggcgagaaccgcaggctctacgaagaagtccttcttcgtatctacgacgactgcttcggttctgacctgctttttcctaccaggaacgaactcgtcggcatcgcctatgacgtgctggcatcccatccggaactctggcacgacgaagggaacctcgtcaccctcgatcaggtgtcgtcccgggggcgcaggctgcgtacccgcaaacgcgccgaggtggacagggaggctacgcaagaggccatggtgcgggcccgccacatctacgcccgactggttgacacgggctggctggaagaatcccgctatggcatgcgcgtgaccgtcgacatgccgtcctcggccatgcgtcttgcggactttctctctaccctacggcaaggaggctccgaacagcttggcggactgatcgtcgaagtgcggaacgccctcgacgccgtcagggtgagcgccgcccacaacgccctgggattgcacaaggccgccaaggatgcggtgggtttcggtcgctatctgcgcagcgttctttcctccctacgcgagatcgagaggcatgtgcttgccagcaacgacttgagcgagcgtctacaacacttcttcgaggatttcgtggaccgtatcctgctcaaggactacgcggcgatttcgaccaccgcgcacccgtaccgctttcgctatgccatcctcgactccattcaacgcctcgaggattctcctgtggacatcgatagtctcgccgcggcctactcggattccggcatcgccgcaggacgcgatggcgcacgtgacctggtgttcgacgacctttaccgcatacgtcgcgtactggggcagatagacgaggccttcctgcgcatccagcagcaaagggcgagactggaggtgcggttgcgcaacaccgtccgctacgccggacggcgcgccgatgctttcctcaggttgagcgagaaactcgcgatcgacctcgaccgtctgatcgagcaccgcaagggggtacggagagatctgtcggttccggggttcctgcagccggtggtcggcccatattccgcggggctactggcgagaccgcggggcgatcgaccggtcgttgatacggaatcggtcactgtggcagagcccgagcctatccatctcctgcgtcggcagctcgagcgcgactatctggaccggataaccatcgtgcctgaaaaggtgctttccttcctcgatatccgggtctcggaatcggtggttttcgcccgcgatctgggcatcgcggatctcgacgatttcctcgctttcgaggccttgcgacgagcggcccgcggcatgctgaacggtcagtatcccgatgcgctgtcgcggcggttgaagggggtctacgaattccgggcgatcccggaaagcagggtcgacaacgattggcttgactgcgaggatttttccatccgccggatcgggacgctcgggatgacggaggtagcacgtgctggctga

SEQ ID NO: 47976 - DNA, 609 bp, Devosia sp. Root685
atggaccgcgtcacgcagaccatacaccatctgctgcggcatcagttcctgcacaccgaggaccgtggatctccgcccatgctcgagatcctgaggcgtcctgcggtggtcgcgccgatcgagcgcttcttcgatactgccggctatcgtctcgttatccgcgagagcgaggggtgggccgggatatttcccgatgtcgagcgggtcggccatccccgtatgagcgtcaacgagacgatggtgctgctggtactcgcgcggcagtggcaggaaggcgttcaggacggcaatgtcggcgactacggcagcgtcctgacgacgctcaacgaggcatatgacgggtataccgatcttgtgtcccgatcccgtcgccaggctttgcgagtggaggatttccgagacgccgtccaggacctcgggcggagggcagtcgtgaagctgcacgtcttcgacgacgaggggcaggaccaggagctggttatccgtcccatcgtcagcctgctcgcgggcgaagagttcctggtttcgctcggggccttcctcggccagaatccggtgcccgccgacgatcggacaggaccggaagaaacagtggaggaggagcgatga

SEQ ID NO: 47977 - DNA, 3477 bp, Devosia sp. Root685
atgatccagctcaccggtatctccctagtgcactggcacctgttctcggtggcggacatcgccttttccggcaacaccgccgtgctcggcaagaacgcgaccggaaagtccacgctcatagacttgatccaggccgtgatgaccggcggctccgcctcgttctataagttcaaccgttccgcaggcgagggtggcgggcgatccgaccgtaccctgcgcagctattgcctggggcaaaccgatcagggcgtctccctgcgccggcaaggcgtgagccatctcgttctcaacttcggtggcgcaggtctcgagcgcccgatcgcgttgggtctgtgcatagaggtggcggagaacgaggatgtcgcccgcgtcgtcggtcgatatgtcgccaccggcgtgtccatcgactcgacgatgttcctcgaccgcgaaggtgatcaaacccgcccctcgtcctggccgacgttaaaggggaggttggaaacggaatgcagggcttccggtggcgaactgttcgagcaccaatcaacctcggcccctaagttcatccgcgaatacatgcgtgtcctgttcaccggcagacgtgtcccggaacccgagcggttcatcaaggccttcatcatggcgttgtctttcgaggacatgcggtcggtggaagacttcgtctgcaactacctgctccaacgcgacgacgtcgatatcgcggaactcagggggtcagtccagcgctaccaacagatccaggccgatatcgccgaattggaccggaaactggctgcgcttgtgcccattcgagaagagatcgagcgactggcctccctgctggagcaggaggacactgccgaatgcatgcgccggctcgccgagttgctcgacgttgccaaggaacactaccgccttctgggcctgaggcgaaggaaggccgacgagaaaagacgtctcgacgacgagatggcccgcctcggcgaggaggtgatatcctgcacggcggaactcgagagcgtcagggcgcagatcgccacgagcggtgtcgaagccaagcggcatcagctcaagacggaaatcgacctcgacaccgcccagcacgacaagctggtcctccgccttcgcgagcggcatgcacccgtcgccgccgcactcaagttgctcgacatccgcgaggcgatacagtctttgggcctcggactcggaggcctgctggacgatctcctgcgcatcagggaagagggggccggattggtcccgcccgcatggccccggaaccccggcctgatggagcagctggtcgcttcggcggcggcaaccgccatcgaccgcctggacagggtggcggcaaagcgcgacgacaccgtcgcgctgcgcgtcgagagcgcccgtcgggctgccgaactgggaacccgcctcgccgagagccgaaaggggcgcctctcgctcaaccgtagtgtgactggcctcatggaagtgctgcgcgagcgtggcatgcagccgagggccgtatcccaggtgctcgacctgtcggacgagcgctggcggctggctgccgaggcactgctcggcaaggatcgcgagaccatcatcgtcgatcccgaacatgccgaggaagcggtcaccctgctccggcgatcgaggtcggaattcccgggctgcaggattgccaacacccgaaagctgcaacactcatcccacatgcccccgccgggttcgttggcttcggtattcaccggcgacgacgcgatcgccatggcgttcgtgacgttccgtctcggtacggtcaggctggcagggtctcaggccgaactgatggccgacggacgcgccgtgatggccgatggcacctactacgatggcctcgtggtcgagatacgcagtgcgggagaattcaagatcggcaaggtggccgccagcctcatggcgggtgtgcttgaaaaggagttcgccgacgaaagcgctgtaacgagagtgcatcaggcgaacgaaagcctcttggtcgacgtacattcgcgcctccagcggctcggcacaacgttcgaagaggaggacgcgctggagcggctcgccatcgcgcttgccgacatcgacgcgcgccgcgacgaagcctgggagagacttgaccgggtcgacaagttggtggatcccgaactcgacgcttcccgtcaacggcttgtcgccaggatcgctgacctgcgggaggagagggaaaccaaccagaaggctctcggtagcctggaaacggaattggggcagcttgccaggatgctgcacggcgcgcaggagatgcgtggctcgtggtggtccgtaaagcaccgtctgcgtctgttcagggagcgcgtgaggtcggttgcgctcttcagtcgtctacgtcccaaatatcccgaacttcgtggcgccaaggcagatctcgccgtagcccgtgatctcgaggttatcctgaagcgtctagcgagcgagcgccaaggctccgaggccgtcattcgggacaatgtctcggattatctctacaagttcggcgtgcaaagacccttcgacgcgaactccaatatcttcgggcagatcaagccgtggctgatacagacgctcgagatactcgagggcaacgacctcgtccgctaccggcgtcaggccgacgaggccgccgagcggatcaccttctttttccgcacttccttcgtccaggagatcaacagcaggttccgggacctcgaacgcgagatcgacgacgtgaggctggctctgcgcagcaagcaattgcatggcgaggtctattcgcttcatgccctcgtaaaacccgagttcaggcagctctacgatctggctcgcgccagcgagaccgatgacaagatcctctccttgctcttttcggaccaggagatggatcctcgctacgcggaggtcgtgggtcaggtggaacgcctcctccgcgacgagtcctcgggtttcgaacgctaccaggactaccggaactactacaccttcgagttgcgcatgcgggacgtcgacaacggtcacgagacgacctacgaccggcgccgcaacgtggccagcggggcggagcgtcaggttcccttctacgtgatcatcggcgccgccctgtcgagcatctaccacgggacccgccggaccgaggacctgaggggcttgggcctggccgtgttcgacgaggccttcagcaagatggacggccagaaccaacggaccatgctgcaattctacaacgagatcgggctgcaggtgctaatcgccgcgccgacggagaagagggccgtggtctacgagaacctcgacagcgtcgtcgacgtctaccgtttcggcaatgccgccgaggccgaggtgtccaagctgaagccgcgcgtccgtgacgccatgtgggaagccaatcccgaccatctgacggacgagcagttgctgctccgcctggcggaaacggtcaaagacgcggccgacctgccgggggccgacgaggatgaggcggttcactga

SEQ ID NO: 47978 - DNA, 1203 bp, Devosia sp. Root685
atgaggcggttcactgacatcgtcgcgctggtcgacgacttgctctcccgtgtcgaggagcggggcgaggcacgaaggctactggcttatccaggagatttccggagcgtcgccgaggaggacgctttccttgcggggctacgatcgctcgaggtggacggtgccctcagggcgaagcgggcacgcgtcgacggcgtgaataccttggttcatgtcaccttgggtgatctcgacaagctgtatgccttccgcaaacggacgccggcagcggcgatgtcgcggtccgcactacggcccgtccgcgatatgccggaattgccggatgccgctcccacggtcttggacgccatcgaggcgtcctggtcgcggaacgtggcgtggtccggtctccggcaaggcgaagtcgacgacctcgtcgccgccatcaagcttgccgcggccctcggtcgtctgcgcggacaggcgggtgaattcgtttcggtggactaccggacgttctcccggcgcaacaccggcgacagtaaggccctggaaaggagaacccggctcgtcgtcgaactattccggcgattctttcccgagatcgaggccgaccgcgggctggaggacgcggaccttctcgcaagcctgggggttgagcggttcgcgcagccgctgctgcttggcggcaccctcgccatcgacggcgcgcccctacccgcgaccccgttcttcggactgcctgcggaccaggtccggcgcctcaccgtcgaaaaggcctcctatgtgctgctggtggagaactacgcatcgttcgtcaggcattgccgcgaggtgaatggccactcgggcggattgatcatctataccggcggcttccccgcacgcgcggtcttgggcgccatcgtatcgctaatcagccagtcggtatgccctgtcttccattggggtgacatcgatctcggggggctcaggatatttgcccatctcgaacgtagcctcgccggcgtcggtataaccctccttcctcatctcatggatccggcggtgctcgacaagcatggaagctccgccgatagaagcatgacgccgctgcccgcccatctgacgacgagcttgatcgggccgttgtggaccttcatggcgggcctgacccgaccggtcgaactggaacaggaagaactggatccggccatgcccgggcaagccgatgcagccgcttga

SEQ ID NO: 47979 - DNA, 1524 bp, Nocardioides sp. Root151
atgagcgagatcgccggtgagctggcgcgggtcaagggggcgttcgaccagcccaccctgaccctgctccaccagcgccaggcgcccgtggtgatcacgatcttccgggccgcgttcggacgcaacaacaagccgatccccaccgcccgcctgcatgcccaggtcgaggagcacctcgcccagatccgcctgaccggcgagtccctggtgcccgaggggagcggacgcgacctctgccagaagtggatgcgcggtcagtggctggtgcgcgcgctcgacgaacgcggtcacgaggtctacacgctcacctcccacgcgcagcaggcactcgagctggtcaagggcctggcccgcgaccgggccacgctgagcgagcatcgcatcgccaccatcctcggcacggtccggcggttcaacgccgaggccaaccccgatcgcaccgcgcgggtctccctgctcaacgaggagattgccaggctcagcgccgagcgcgaccggctcgtcgacggcgcagagatggtcagcgccaccgaggactacatgctcgaggggttcaccgagctccagtcgttgatctccgcgctgccgagcgacttcgcccgggtcgaggagcggttcgccggcatccgtgccgagatcctggccgccttccgcgccgaggaccgtccacccggcgacgtgatcgacgactacctggcccgcgccgacgcgctgatgaccgcgacccacgagggccgggccttcgagggcgccttcgggctgctccgcgacgacgccctggtcgcccagctccgcgaagacctcaccgcgctgcttgagcacccgatctccgaccggatcctcgccgagtccgaccgggccgagctgcgcggcaccgtcaagctggtccgcgacgggctcgaccgggtgctcacccagcggtcgagggtgaccgcgacgctcaaggaatacatcgtctcccacgacgccgcccgtgaccgcgagctcgagcagacgctgcgccaggtggagtccgagctgatgacctggatggccaccaccggcccgcgggccacccacgacgtgccactgctgccgttgcgcgccggcatcgaccaccttcgcgagcgcttccacgacccggccgacgaccggctgcccgacccgatcgagccggtcgaccccgacgacgcgaggtcgccgtcgctggccgagctgatggcccagggcgggccgcagctgccgtcgctgcggcagcgcctcgacgacgcactctccgacctgctgcccgccgccactctcggcgaggtcttcgaccggctcgagccctcgttgcgccgaccggtggagatctacggactgctccacctggccgccgaccgcggctggaccaccgacgacgtcgtcgagacctgggccacggtccgccacgacgggtcgcgacgaaccttcgccgtgccgcggatgccgctgcccgaccccgacctcgacgcacaccgcacccagcagagccgcacccagcagaacagtgagacccccgcatga

SEQ ID NO: 47980 - DNA, 795 bp, Nocardioides sp. Root151
atgagcaccgacgtcgacctcaaccggccggagccggaagacgcgctcgaaccggacgacgccctcgagcacgacccggcgtacgacgactcggtctcgctcttcgagggcgacgaaggcggtctcgagcactcccaacgccaggccctcgtcgtgctgctcaagcagcggttcatcagcgctcgcacccacccacgtgactggcaggtgctggtcgagcacgagcgggtgctccgctcacgcctcaacgacgtgttcctcgacctgatggttgaccgcgagcgcgaggtcgcctggaagcgccaggccgtccccgagaccggcggccggttcccgaccctgctccacgacaccggctggtcgcgcgaggagacgctggtgctggtgcacgtgcgcgaccggctgcgcgccgggctggccagtggcgacacccgggtcttcgtcgaccgcgacgacatcctcgaccacgtggccagcttccgacccgcgcacgccacggacgagtcgggcgacaccaagcgcgcccagaacgccgtccagagcgtcgtgaagtccggtctcctgatcggtgccaccggtgacgaacggttcgagatcagcgaggcggtggagccgctgctcccgcttgagctgctccaggagctcctgtccgcgctccgctccgccaacgacaccaccccagaacccgaggagcccgccgacctcttcgacgaggacggtgctgacacagacggtgccggcaaggaccgtgccgacaaggacggggccgacgccgacgaggagcgcgacgcatga

SEQ ID NO: 47981 - DNA, 3483 bp, Nocardioides sp. Root151
atgagcaccgaccagatcaacgagcacgagctcggcggcgacgaggtcgacgaggcctccgacgggctcttcgcccgacaggtggtcgacaccccggccgacgacaccgtccagtggcgggcggcccttctccagctggtcaactggggaggcttcggcggcctgacgacggtgccgctgcgcggtgacaccacgatgatctccggggcctccggcgtcgggaagagcacgatcctcgacgcctacaccgcgttgatgatgccctccgacaccaagttcaacggcgcctccaacgacgcggtcagcgggcgcgcccgcggtgtcggccagcgcaacctgctctcctaccttcgtggcgccgtcgacgtgatcgacgaccccaggaccggccgaccggtcgagaagctgctgcgcggcaagggcgccgacacctggggtgcggtcgcgatgacgttcgtcaacgaccagggcggccggttcaccgcgctgcgcacctactacgtgccgcgtcgcgccacccggtcgagcgacgtgcagatgcagctggccacccacgagggggcgctcaccctcgacaccctcgaggtcgccgtccccgagcgcttccacgccaacaccttgaagaagctcctccccggcattcgcgtgcaccgcacctacgccgagttctccgccgtcctgcacgcccgcctcggcatcggcgcgaacggcgatggtgccaaggcactgcgcctgctctcacgcatccaggccggcaaccaggtgcgcagcgtcgacgagctctacaaggagatggtgctcgagcgtcccgcgacgtacgccgccgcggaccgcgccatcgagcacttcgacgacctcgacgcggcgtactccgcgatgcgcaccgaagaggagaagctcgacctcctcggcccgatcaccgagctgcacgcgcgcaaggtcgcggccacccggcgccagtcccagctagactcctacggcgtcaccctcggcggcgacaccccgctgcgactgtggctcctgcgcactcaccatcgcctgctcgaggcggcagtcgccgccaaccgcgacgcgcgtacgacgaacgcggacgacctgtcccagacgtcgtcggccgaggccgccctggtcgccgacctcgagaacgccaaggactcccaccgcgccgccggtggaaccacgctccagaacctcgccctgtcgatcgagcaggagcaggtggtccgcgacgaccgcgccggccggcgcgccgtgttgcaggagcgcctgctgccgctggtcgacgtggccgacccgcatgcagtcagcgtcgagaccgcgctcgagtccgatgccggcttcggcgccctgcagcagcaggcccgtgagtggctggccggctggcaggaccaggcggccagcctcaagcgtgagcgtgacatcgcccgcgacggactcttcccggtcaagcagcggcaggccgagctgcgcgaggagcgtgcctcgctgcagagtcgggccggccgcatgccgtcccgcatgcatgagatgcgtgaagaggtggccctggccagcgggctcggcatcgacgagctcccgttcgtggccgagctggtcgacgtcgcccccgacgagtcgcggtggcgcaccgcggtcgagaccgtcctcggcggcaccgcccgcctcatgctggtgccgatcgaccggctcaaggacttctcctcggccatcgacgggctccggctgcgtggccggctgaccttcgagggcgtcgagctcgacctgcccgacaccggtccggccgaccccgagcgcgtcgccggcaagctgctcttcaaggactcgccgttctccggctgggtgcaggcccacctcggtgagccgtcgcgcaacgccctgtgcgtcgagaccgccgacggcctcgccggtggcggcttccgggtgactctcgccggccagacccgcaacggtcgtcgcggtgcccacggacgcgccgacacccgcaacatcatcggtttctccaacgaggacgcgctctccgagatcgactccgagctcgccgccctcgaggagaagctgcaggccttcgacgccgacgtggccgagctcgaccgccagggccgcgtgctggagcaggtccgcacggcctacgacacgatccgcgcggcgcgcttcgacgacatcgacgtcgcgggcagcgacgagcgcattgccgagctcggtcatcggcgagccgagatcctgcgcgccgacgacaagctgcacgtgctccagggccagatcgacgacctgtccgaccgactggagcaggcccgcaagaagcggttcgtgctcgaggagcgccacaagcgcctggccgcggagcatgccgagctggtcgactccgaagacctggtcaacgaccgcctcgaggtgatggaccgcaacggcacggtgacgctcaccgaggagcaggacgcggcgttggccgccgacttcgccgcggccgcgacgcccgacgaccccgacgacctcgaccgcttcccggtcacgtcgcagcggttggccgagcgactgcgcgacgcggtgggggagaccgagaccgagatcaaccgggtcgacgacgagctcggtgcgatcttccggatgtacaagctcaagtgggagtcgccgaacctcgcggcgacccccgactcgtacgccgactacgcccgcatcctcgacgacatccgcggcaccggcctggcccaacggcgcaccgagtggcgccgccgcctcaccgagtggagtggccaggacctcgtgccgctcgtgggcgcgatggccgcctccatcgaagagatcgaggaccggctcgagccgatcaacgcgatcctgcggcggctcgagttcggggcgtccggcgaccgactgcgcatccgactgcggcggctctcacccgcccacgtgcaggtcttcatgaaggacctccgcacgctctcctccggtgtgacggccgagcctgacgaggccgacctcgagaagcggttcctcgacctgagccggttcatgcgccagctgcgcaggccggtcccgggtggcgatccggtcaccgatcgcgaccgcctgctcgacgtacgccggcacgtggagatcagcgccgagcgctatgaccaccacaccggcgagctgcgggcgacgtaccgcacgctgggggagaagagcggcggcgagagccaggagctggtcgcgttcatcgtcggctcggcgctgcggttccggctcggcgacgagatgcgctcccggccccggttcgcgccggtcttcctcgacgagggcttcgtgaaggccgactccgagttcgccggccgcgccgtccaggcgtggaagggcctcggcttccagctgatcatcggtgtgcccctcgacaaggtcaccggtctcgaaccgcacatggacgagctgctggcgatcaccaagagcaccacgacctaccagtcgtggatcactccgatcaccgacgcggagcagactcccgctggttga

SEQ ID NO: 47982 - DNA, 1455 bp, Arthrobacter sp. Soil736
atgtcagctctcgcctccgcgcttgcctacaagcgcctcctcgatgacaacgcgacgctcagaatgcttcggaccgatcaagtggcggtctcggctgccctcctttcggagcatctcgggtccccgggcatccgtctgacttccgaggacctgtatgaggtgatcgatgccgatctcgaggagcttcgcccgcatttcgatctgcccaagaccgccaaggcgtactgtgacgactggcggaatgcgtcatttctcatccggcgtcccgcgaccgaagcgcgcggagagacgtacgagctctcctcagatgccttgagcgcgattcgcgtcctggaccaactcgaaactccccgatcaacgctcacagagtcacggctggtaagcttggcggctggcttacgacagctcgccgtcgacaccgaccccgacgccacacggcggctcgaggcgctccaccaggagcgcgagcgcatagacgccgaaattgcacgcatccgcgacggagagttcgccgtcctcgatgagcggcgcgcgctcgaacgcgtcaccgatatcctgctgcaagctcaggatcttcctgccgatttcgcccgggtgcgcgcccgattcgagcagctcaaccatgagttgagggtcagcatcgtcaataccgacgacacgcagagcaccgtgcttgacgatgtcttccgaggtgtcgacctgattgagtcgtccgacgaaggccgcaccttcactgcgttctccgccctcattcgtgaccccgagcgttctgcagcgttcgacacggatgttgcggctgtcctcgatcgcgacttcgcggatcggctcgccccggaggcaaggcgggtattgcgcacgctggtccgcgagctgaaggccggcagtcgcgaggtgcacggggtgctcaccgagttcgcgcgcgggctgcggcgctacgttcactcacaggagttccagcgcgatcgcgcgctccgcggggtgctgcaggaggcgctggccgctgcggtcgccgcgagcaagaggatccgcccgtacgccgacaccggcatcgaggttgagctctcggccatgcgcctcttcagcgtgggcgaaatgatcgccgacgacccctccgaattcgacaccggggcgaggctcgccgacgacgaacccggcatcatcgacttcgaaaagctggcggccattgcccgtgagagcgagatcgacttcgctgagctgatacgcaatgtgaacgagctggtagcagggtcggcgcccatgaccgtttccgagatcctcgccttccgcccggccacacagggactcgcgagcatcatcggcctgctctcactcgccacccggcacggacaggtgcggcgcggcgaaaccgagcgcctgacatggcagggggccgacgggatacgtcgacacgccgacgtcgacacgcacattttcacggagaggatcgaagggtga

SEQ ID NO: 47983 - DNA, 651 bp, Arthrobacter sp. Soil736
gtgaccaccgagcaggagcatggttctcaagaagtggggctgtggagcggtgacatcggaacgctccacgagcaatcccggcgagccctgctggagatcctcaagggtccctatctatcgggccgccaacgcccgcaactatgggccgctctgatcgctgacgaacgtgcagtacgatcccagctgcacaatctgttcctcgaactcgtcatcgatcgggtcgacgaattcgccttcgcccgcaaagtgcgcacgacagagattgacgttccgagcgcgctgcgcaccgagcgactgaccttcctcgacacagccatgctgctcgtgctgcgccagctgctgctggcagcgccaggcgagcgccgcgtgatcgtcgggcaggacgaggtctacgcgcgcctcgcggtctatcgcgacggcgacgagggggcgtacctgcgcaacctcaacggcgcctgggggcggatgagggacaagttccgcgtcgtccacgcccttggcgacaaccgagccgagatctcgccggtggtcaagttcatcatcgacgaggaacaggtgcacgcactcgccgatgtctaccggcgcgtggcaggggccgatgacgcggagacagcagcgacatccatcaccgacgagacggttgctccatga

SEQ ID NO: 47984 - DNA, 3396 bp, Arthrobacter sp. Soil736
atgagtgagacatcacctgccactcccgaagttacggcgcccgtcgctcccggacagtggcgcctcgccgaggtgcaactggccaattggggcaccttcgacggggcgatctatcgcgtcccgatcgcccgcaagggacacctgatgaccggcccgtccggttccggcaagtcctccctcctcgacgccatcgccgcggtgcccacacccgacaagtggctgcgtttgaaccaggccgcgcaaggcgacggcacccgcgccgaccagcgcaccatcgtcagctacgtgcgcggggcgtggtcgcgcacgaccgacgagaacgaggatcgcgtcgtcagcgcatacctgcggccgggcgcgacctggagcggcatcgtgctgcggtacgagaacggagtcgatcggcccgtgtcactctgccgcctgttcttcctccgcggcactgcgatggcctccgccgacatcgccgacctctgcctcctcgaacgctcggcggtcgacctgcgagacctcgagcccttcacgcgctcgggcatcgaaacgcgcaaggtgcaggcgaactggcccgacgccgtcgtcacgtcgaacagaagccatggccggttctacgcccgcatgcgctcactgttcggcatcgcccacgagagcgccctgcaactgctgcacaagacgcagtcggccaagagtatcgacagcctcgaccagctcttccgtgactacatgctggaacggcccgccacctacgacctcgccgacaccgccgtcgctcagttcggcgagctgcgagacgctcacgagcatgtcgtgcagctacggcagcggcgcgaccacctcactgagctgcgcgcacactccgatgcgtacgacagggccaacaacgctgccgatgccgcccgctccatggccgactcggtggtcccctaccagaagcaccagagcctccgccttgccctggccgaacacggtgcagttggcgagcaactcgtgagcctgagggccgacgccgagcgggcggacgggtcgtaccgacgtgccgacgaagacgcagacctcgcccagcggcgcgccctcgagctcggcggcgacgaggccgaacatctccagcaccgtatccggacagcgcaggatgcggaacgggcgaccagacagcggtgggacgccctcgaatgccagctcaccgaggccggggtcgcgcacacaccgacaaccgcggcggagttcgccgagctcatggccgagatcgaccgcaccctgcagtctccctccacctcgaccggaccgagccacgcgcagcaggagcgcttcttcatcgcgcgagccgcgaaggaccgcatcgagacggcgatccgtacgctgcgcatgagcggaacgaccgtgcccgacaacctcatcggcatccgccgagcaatctccaccgagacggggctgccggtcacggctctccccttcgccgccgagatcatcgaggtgcgacccacgttcgctgaatggaccggagcgatcgagcgggtgctccgcccgttcgccctcacaatgctggtgcgcagcgagcacctccctgccgtgcgacggtgggcagaagcgcaccgcgtcaacgcccgcctcgtcttcgaggaagtctcctcggagattcccccgccccggccagcgcgaagcagcctgtccctcgtgaaccggatctccgtcgcacctgggccgttcgccgagtgggtcgctggccagctgtcagagcggttcgactacgcgtgcgtcgacagccccgacgagcttgacgaccatacccgagcggtcacggtcaacggccaggtcaagtcctcccgcacgcggtacgagaaagacgaccgcgtcaagatcgacgagcgaggctattgggtgcttggcgaccgcgagtcaaagctcgaagcactcatcgagcagctgcgcggcgcggaacgcgagtattcccaggccgagaccgacgtcgatcgcgccgagaaggaacgcaacagcgatctggagcgccgagcaacgctcaaggcagtgcgggggcagatgtggcatgacattgaccgggatgctgcggcggcggcgatcgccgacctgcagcggcgcctcaacgacctgacccgcgaagacggcgggctgcgcgacgccgtcggtgcggcgcagaccgcacgggaagctcgcgagaccgccgcgaaggcccttcaggacgccgagctcagtctccgccaggccacggcgaagcacgaagaactcggcacagccatccgggatctggaagaagccatcgccacaggaggcgtccaggatctcgacgagcacaccacggccgcgctcggccgccgattccgcgaggtccagcgcagcatcacgcggcagaacatcgccgaggtcggccaggaggtcatccgccggctgcagcaacagcgggacaaggatctggaggctgcgcgcacgtccggcaacgatgtggcgcgcctggccgcccagttcaacgaacgctggtcggcggcagcggcagcggcagacttgtcgccgacgacagctgaccgccgcgcctacctcgaggtgctggacagcatcgtcgcccacggcctgcccgagcacgagtccaacttcctgcgcctgctgagagaacggtcccgcgacatgatcggcgagctcgtcagtgacattctgggggcgccgcgggagatcgaggaacgcgtcgcgcccgtgaacgcgtctttgaaacggtcagagttcgacgagggtcgctacctgaagctgcgcgtcaaagtgcggcgcagcgagacggtcacccgcttcatcgccgacctgcggtccatctcggaaggcggatgggcggacaacgacctcgaatccgccgaagaacgtttcgccaccctcgcggacatcatgcggcgcttcgcctccagcgaccacgtcgaccgcagctggaagcgccagtgcctcgacacgcggcagcacgtgaccttcctggccgaagagatcgacgcccacggaagggtgcacgccacctacgattcgggagcggcgatgtcgggcggccagcagcagaaactcgtcatcttctgcctcgcggcagccctgcggtaccagctcgccgaccccgacgatgagttcccccgctacggaaccatcgtgctcgacgaggcgttcgacaaagccgacacacgctacacccgcatggcgctggacatcttcgtcgagttcggcttccaactcatactcgcgaccccgcagaagctcctccagaccatcgagccgtacgttggtgccgcgacctccatcgagaacccgacccgccgacggacagccatcgcgaacgtgccgtggcgacaggacgccgcaagcgacgtcacaaccgccggaaacgcggacggcgaggcaacctcagaggccgcccaatga

SEQ ID NO: 47985 - DNA, 1185 bp, Arthrobacter sp. Soil736
atgatcaccgtcgcccaggcacgcgatacagctcgtgcgcgactgcaggccaaactcggcgagtggggatcagccggcgaccgagcatcgaccggggcgctcctgtctatcgcgctgaaaccgccgaccgaacgggagatgctcaacgacgaggccgccgcggagaactgggccaaggactgggccgcccttccactcggcaacggcgccaccgtcgactgggaggtgcgcgcctggcgcagcatcggccggcagcgcgtgccggtacggcttcggctggccaccctcgacgatgtcgccgagttcgccggcggggagcccgcgcgagcgtggtcgcgactgcgcacccgcgcagcaatcctgcgcgagcggttcggcgacactgatccgatcaacacggtgatccgccgacacaccgagaccctgatccagttcgacgagtcccgcttcgccacggtggttgaagccgtcgcatggttggtccgccatccggtcacgggccttcgaccccgtcagctgccgatccgcggcgtcgacaccaaatggttcaccgcacatcgcagcatcgtctcgtccctctacgccgcaacgacggcctccaccgacctcggcatcgtcaacaccgacaagctcgtccgggtccgggtcctcgacgaggcgctggcgatcggcggcatcatcgacttcgccgctcccgtgtcccagctcaacgtcctgtcgttctctcccgctgccgtcctcgtgtacgagaacctcgagaccatcctcgcgatgccgctgtggccggatgccatcgccgtccacggttccggctacgccgtcgatgtcgtcggccgactgccttgggtgcagcaatcgccaatcctctactggggcgacctagactcgaatggcttcgcgatcctgcaccgcctgcgatcgtcgcatccggacgtaacatccgtcctgatggacgagagcaccctgctcgaccaccgcgacctctgggtacaagaaccgacgcctaaccgcggaaccttcgacacactgaccggcagcgagcagcgagccctcaaacgcctgcgtgacgaaggggatgtgcgtctggaacaggaacgcatcccgtggcagaccgcgctgaaatcgctgcagacggcatgggaaatgatcgctgaacgaagccagtggaaaatcaattccgattga

SEQ ID NO: 47986 - DNA, 1443 bp, Arthrobacter sp. Soil736
atggactactacgcaatcaacgccctgcgtgagaaccactcaggctggtccctgctccgcgcccagaacgcgcctctcgcagtctcgtttttcatggcggcgttcaccgggcccaaccagcggaacctggggcgccagcagctcatcgacggcctggatgaccttctcttcgggctgcgggatgcctatggggaggacaggttcccgcggccggcatcagagtacctcgacgactgggccgcccccgaaaaagcctggctgcggaagtactacgtgcccggccaggatgaaccccgctacgacctcactcccgtcgcggaggacgtggtgcgctgggtggagaacctgcgcggccgcgacttcgtggccacgcagtcccggctcaccagcatcttcgccgtcctcaaacagctggtgcagcagtcagagacggatcccgaggtgcggcttgccgaactgcagcgccagcgcgacggcatcgacgccgaaatggagcgcatccgcggcggcaacatccgggtcatgaccgcacccgaggccctcgaccacttccagcagctcaccgctctggccaaggacctcctctccgacttccgcgaggtcgaacagaacttccggaagctggaccggcaggtgcgggaacagatcgccacctgggacggcagccagggcgagctgctcgcgacgatcttcgccaaccagcaggacatcagcagctcgctgcagggccgcactttccagggcttctgggattatctgatgtcgccgcagtcccgcaaagaactccaggatctgctggagcgggccacccggatcgaggcgctgtccgggatggacaacctccacgccgtcaccaacctccatcaggactggcttcccgccgtcgagcagacccaggccacggtccgccagctctcccagcagatgcgccgcctcctcgatgacaaggtattcctggagaacaagcgcatcatgcagctgatccggagcatcgagtccggcgctctcggcacccgcgcagagccgccgtcgggcgttttcatggacgttgccgccccgtccgtggacgtcgccctgccctttgaacggcccatgtatgaaccgagccagcgggtgatggtggatgacgaagtggtcgccgccgacgactcgggcatggacgccggtgcgctcttcaaccagttccatgtggaccgtgagcggctccaggccaacatcgacgccgtcctggccagcgcggaacaggccaccctcgcggagatcaccggcgcgtatccgctctcgcagggcctggcggaagtggtggcctattaccagctcgccaccgaatcggaatgggcggacatcaacccggaggtcacccagcaggtgtcctggcagctcccggacggcacagtccgcgaagccaccgtcgaacagatcatctttggaaggcccgcatga

SEQ ID NO: 47987 - DNA, 648 bp, Arthrobacter sp. Soil736
atgaaccccgccgaagcaccggagacccgcacgcccgaggagcttcccgccgtcgtgacccgtctcttcaaaggcgtggtgtacgccgaaacggatgaaaagatctggcaatcgctgctcggactggccagccatgtccgggactacgtggccgtgctgggcctggacctgatcctcgacgaatccgagggctacgccttcctgaagtcccgcgaggatcccgacggcacactcccgcggctcatcccccggcgccagctcaccttcgatgtcagcctgctgctggcattgttgcgcggccggatgctggagttcgacaccaacagcagcgagctgcgcctcatcatgaccgagcaggacatcgcggacatggtgtcggtcttcttgcccgaatccagcaacgaggcccgcatcctggaccggctcagcgccaacatcaagaaggtggtggagctcggcttcctgcggagattgcgtaaccagccgggcacctatgaggtggcccgcatcctcaaggcctacgtggacgcgcaatggctggaggagttcgacgcgcggctggcggactaccgggccacgctcaccaaagaaccgctcgccgcggcacggggcgccgcaccgctggccaccgaaacggagtcaccatga

SEQ ID NO: 47988 - DNA, 1317 bp, Arthrobacter sp. Soil736
gtgccggctgagtcatcgccgtggaccacgctggcaatgctccgggctcagtcgttgaaggcctggaacagcggatcgctgctgcgggagctgctggaaccgtccggcgtctatccgcggcgtcgatctttgaagcgaccgacggcggctgaactactcaaggactatgcggccgctcaggcgtgggccacccaactcgtcgcaggcgctggcaagtattcgctggaaacagccgaagtggggcgcacgacgatcgggtcgaaccggattccgtcggcggctgtatttgcttcggtcgaagatgagatggcctttgtcagcaagacccgggacgcggtccggttccgcgagcttgctgcagggctgtgcgatctggacccggcgctacgccgctgggcgctgaagcgtccgcagcagctgctaggcctgggcgaggcggcgctgacggcagccagggtggcgctctggctccgcgaccatcctgcaccgggcatctacgtgcggcagctcagccttcccggggtgcacacgaaattcatcgagggtcaccggagggtcatcgacgagatggcggcggtgctggcggctggaggggccgggtctgagccggcggaggcaagggcgcctgaggatgacggcggcgtggtcgaagtcgaggccgctgatgatgcatcggaatcagcggaggctccctcggtgccggaggctggcgatgcggtgctggggaacggctcggcacgcactccggcagcccgcttcgcggcgcggcacggattcctgcatccgcccgagctcgtgcggtttcggctcttggatgcagacaggccactactcggtgaagggcgggacatcacggtcacggcggaggctttcagtttgctccgtttgcctgttcagactgtcatcgtcaccgagaacctcgtcaactttctggccctgcccgagcggcctggcactttggcgctcttcggtgccgggtatggtttctcggccctgcgggacgcagcctggcttcaggactgcgaggtcctgtactggggcgacctggacacccacggcttccacatcctcgaccagctgcgggcagcgcatcctcacgtgacgagcgtcctcatggatgaggccacgctgatggcgcaccgggacgtctggggtagtgaaccgaagcaatcccgggcagagctggccaggctttccgcggaggagtccgaactgtacgaagcttttcgcaatgacacctacggaccagcagtccgcctcgaacaggaactgatccgctgggactgggctctcgaccgactcctccctggtggttga

SEQ ID NO: 47989 - DNA, 1458 bp, Arthrobacter sp. Soil764
gtgccccgctccgccaggtcatccgctgacgccatcagcgcccggctccgggacctcgaactcctcaccaagggacccgcatgggctctgacgcgttcggcgccctgggtgatcgccgtactccaggcttccttcacccgcacccggccgcaggttccgctcgaggaattccatgccgacgtcgactccttccttgaggagctccggcgccaggatcccggcctgggaggaggggccaacggaaaggccttcggggacgagtggacccggcggcagttcctgacccggcggaaccagtcaggccagattgtctacgaggccacggagccagcggcgcgtgtgctcgccttcctggacagcctctccagcgagcgctccacgctgaacggttcacggctgggcacgctgctgggggacgtggaaaagctcgccaacgagaccaaccccgaccagagcgcacggctcgaagccctggaagaggaaatcgaagagcggcagcagctgatccaggacatcagcacgggcgggttcgacggcctgcttgatgacgacgaagccgtggaggccgccgggaacatcctggacctggccgccagcctacccgctgactacaagaagatgcgtgaccggatcgaggaactggtgggcgggctgcgcaaccagatcatcgaggagtcgctgaccaagggcgcgaccatggcccaggtcctggaggcggacaagcggctccgccaaagcccggagggcaggacgttccggtcctttaccgccttcctggaggacccgcagcagcaggtgaggttccggtcggccatcggggaggtcctgagccgccagttcgccgacgacctctcgccggacgaccgggagacgctcaagaacctggtggccgaactccgccagcagcacagccagatccagcgcatttacggcaagctcagcgagagcctcaacacctacgtccagagcgacgacttccgccagtcagtccggctgcggcaggtcctgcgcgaggctgaacaggccatccggtccctgccctatgaacgcgaacggccaggactggttccaggcccggtcctgtacaacgcagggtttgagtcgctgtccatggtgaagctctttgacccggacgagttcgcggcgccgccccggctggccgatcccatcgccttcaccgattcggaccgggtgcgctcgccgaggacgggaaaggccaggccggacatagtccggtccgcgatggcgggggctgcgaccctggccgatgcctggcagcagctgccgccggaagagcagcacatcaacaccatccgcgcgctcctgtcggaggccctgcacgccggggcggacttcaaccgcagcgcctgggatggcctggacttcgaacagatcgacggctccacccgcagggcctacctgcccgtggttacgctcgcaaaggattcagatgactga

SEQ ID NO: 47990 - DNA, 870 bp, Arthrobacter sp. Soil764
atgactgaggaaatcacgacgacggccgttgaccccatcgacaacacggaagacaacgcggtggttgagtccttcgaagccagggcgggggcgtcatcgggtgccgggcgccccaatccggcggtcatcactccccgcgacaccttcgttgacggcgccgccctcttccccggcgacaccggcgtgctgtccatgaaagtgcgccaggccctggtgaagctcttgaagggcccgtacatcgatggcggccgggacgaaaagctctggacggtgctgctggacaaccaagtgatcctgcgcagccgcctgtccgagctgttcctgaccctccaactggaccacgagcggaagatcgcggtgctgcgtcccgtggatccggacatcatcggagggagcgcacggtccagcatcctgcgccagcagcgtgccctcagccgggtggaaaccatcgtgctgctccggctccgactgctgctggaccggcacgtcacagcccagaccgaccccaccatcacccgcgaggaaatcacggacctcgtggcgcactaccagcccgccggccagcaggacgccctccgcgactcggacgtggtgacccgtgccatcactaagctcctggcccgccagctcctgctccccaccggcctggacgacgtctacaccatctccaacgccctgcccctggccctgccattcgaaaacatcggcgacatcccggcccacatcgaagccctggtggcggcaagcagtgatcccaccggtaccgaggcaatgcttgacctggacgcggacagtggtgccgaggacgacgacgccgatgccgccccggctgcggagtcaaaggcgacaaagaccgaggtgaccaagtga

SEQ ID NO: 47991 - DNA, 3474 bp, Arthrobacter sp. Soil764
gtgacgatcgcaagcatgctccccttgggcgacgtgactaacccggggcagatgcggcttgccttggtgcaggtggtcaactggggcacgttccacggggcccacaccatgcatgtggaccgggacggaaccctgctgacgggcaactcgggcgtgggaaagtcgacgttgtttgacgcgatgctgcgggtgttcgatgcccggccgcggtccaatgaggcggctgcgcagcgttctggcggtgccgtggaggacaaacggacgacgttcacctacatgcgcggcaaggtgggggacaaggccgtgggggagggctcggcgagtgctttccagcgcccgggggccacctggtccgccgtcgccctgacgttcgacaacgccgccggcacgcggctgacggtgtccgcgctgttcgacctgcccaagaacggcacggagtcgagcgtggggcggttctacctgatcgacaacgtgccgctggacctggaagcggtggagggcatcgcggacaaacgcttcaccaagggcgcgctcgaggccacgttcccgcacgcccaggtcttcgacgtgcacaaggccttcgccgagcggttccgccggctgctggggatcagctcggaccaggccctgcccctgctgcgcgtgatccaggccggcaaggggctgggcggcagcgtcaacaccttcttccgggaccaggtgctcgatgctccggcaaccctggccgccgccgatgacgtggtggaggagttcagcaacctgatgtccatccgccagcggctggaggatgtccggcagcagcgcgaccagttggcaccggtgccgggactgaaccgcgagtatgcgcagtccctcctggatgcgaaccggctgcgggacctagtgggcgaggagttcgaggcgtaccggcagcagctcgccgttacggtccaccaaaagacgctggtccgtttccgtgagctggcgcaggcgaaggccaaggagctcggcgccgagcgtgcggtccgcgacaacctggccaaggaactgcggcagctcgaaaccgactacaacaaccagggcggcaacgcgatttcggcgattgagcagtcgctggagaacgcccgcgttggcctcaagctgcggaggcaggttgaggaggcggcccagcaggcactggccgacgccgggctgcagcttgagtggagcgccgccggctgggagcaggcccacgaacaggcggcagcacggtcgaccgagttgaaggatgattcgcaggccctgcaggagctgcggttcgaggccttcgacgcccacgccggccgcaaacgggagctggcggctgccgagcaggagctcgtctcgttgaagacgcgcaagtccctgctgccgccgtcgagcattgaaaaccgcgccgccatcgccgccgcaaccggcgtcccggaagaccgcatgcccttcgccggcgaactcatggaccttgccgaaggcgaggaacggtggcgccccgccgccgaacgcgcgctccgcagcctggccaccaccctgctggttcccggtgagcacttcggtgccgtcacccgctacctcaatgaccacagcgtccgtggcgcgctgcgggcggtggacgtctccaagccgctcgccggcggtgcgctcgccgtggaggacgtgcgcgacggcgacctgctcaccaagctggacatcctcgcctcaggtgcggcggccgaagccggtgaatgggtccgcgagcggatcgccctggacttcgcctatcagtgcgtggaggacccggacgagctggcagcgctggacaaaggcctgagcctgggcggcgtggtcaagcgcaaccggcacaccgtggagaaggacgaccgcttcacaagccgccaggattatgtcctgggcttcgacaatgccgccaaactggaactcgtggccggccaggtggaggacctccggcaggaagtggccaaggccgcggaactggcgcaaagccgcgaggattcacaccagggcatgagccgccagctcgacgcgctgcgacggattgcggaagacgaccgcccctgggaacaggtgtctgcctcggtggcggcggacgacctgacccggattgagcagcggctcaaggacgccctcgccgcgcaggcagacctggagccgctgcgggccaccatcgaggaggtccggcaaaagcaccagtccagcaccgagtccgccgcggtcctccaaagtgaatacaaggcactggaccgccagctcacggctgcggattcgctgctggaagccgcgcgtgaccgcctggcccaggcgccgccgtcggacgctaccgtgaccgcgctggagccgtacttcgcggagttcggcgacgtgaccgaaatgcacgagctggacaacctggccaaccgggtccggaccgccctgctgggcgaactgcacgcggctgaatcacgtgggcaggccacggcggagcggctcacccgcatcttcgaaggcttcgtgcgggagtggggcagcgccatctcggccgaccacggcaccagtatcggcgcggccagtgaattcgaggcccgctaccacgcgatcgtgaacgacggcctgcccgcgcaggaggcggagttccggctgttcttcaaccagcgcacgcacgagtccttcagtaccctgctgcacctgctggacgaggagcgccgctccatcaccagccgcatcctgcccctcaacggcatcctctcccaggtgaacttccatgagggcagctacctggaactggatatcaagcagacgctgccgcccaccgccaagcagttcaaggacgccatccagaacgctttgaaggcgcgtcacacccggcccgccaggtcggacggatccagggcggaggggccggacagtgatgatgccgagctcaccgcccgctacaaaaccctggaaaccctggtcaagaggcttggatcgcaggcgcccgaggaccggcggtggcgcgcggaggtgctggacgtccgcggccacctgttcatccagtgcaaggagcaccgcgaagcaaccgccccggttgcaggaaaaaagaagggcggcgccaaaaagaccgaggtgttcatgcacgcggacaccggctccatgtccggcggcgagcggcagcggttcaccgcgttcatcatggccgcggccctgagctaccagctgggtatcgccgagcaggggttcaccacttacggcaccgtgatgatggacgaggcctttgtgcttgcctccgaggagttcgccggtgccggcatcaaggcgctgcacgaattcggcttccagctgctgctggctgcccccgaaaacgtgatcgacctttcccggcacctgggctccgtcaccgagatcctgagggaccgccgcaccaaccgctcgggtgttctgacggcgccggtcatccggccgaggccgggcgaagaaggggcctggcggtccgaggcgaacccggtggacatcgtgctgcgctga

SEQ ID NO: 47992 - DNA, 1443 bp, Arthrobacter sp. Soil764
atggacttctacgccatcaactccctgcgggacaaccatgcaggctggtcgctcctccgcgcccagaacgccccgctggccctggcgttcttcatggctgccttcaccgggcccaaccagcgcaacctgggccggcaggaactcatcgacgtcctggatgacgtgctgttcgggctgcgggacagcgaaggcgaagacagattcccccggtccgcaggcgaatacctggacgattgggcggcggacgagcgcaaatggctgcggaagtactacgtcccgggcgaggacgagccgcattacgacctcacagcggctgcagaggacgtggtccgctgggtggagacactccgcggccgggatttcgtggctacccagtcccggctgaccagcatctttgccgtgctcaagcagctggtacagcagtcggaaacagacccggaggtcaggctggcggaactgcagcgccagcgggatgggatcgacgccgagatgcagcggatcagggacggcaacattcgcgtcatgaccgccccggaggccctggaccacctgcagcagctcaccgccctggcccgggacctcctgtccgatttccgcgaagtcgagcagaacttccggaagctcgaccggcaggtgcgcgagcagatcgccacgtgggtgggcactcagggcgaactgctcgaatcgatcttcgacaaccagcaggacatcagcagctccctgcagggccgcaccttccagggcttctgggactacctcatgtcaccgacgatgcgatcggaactgcaggacctgctgcaccgggccacccagattgaagcgctggccggcagcgacagcctgcatgccgtggccaatctgcaccaggactggctgcccgccgtcgaacagacccaggccaccgtccgccagctctcccagcagatgcgccggctgctcgatgacaaggtgttcctcgaaaacaagcgcatcatgcagctgatcagaagcatcgaatccgccgcgctgggcacccgggaggcaccgccgtcgggcgctttcatggagattgaggcgccctccgtggacgtggtgctgccgttcgaacggccgctgtacgagcccagccgcaaggtgacagttgaggacagcgtggagaacgccgaggacctggacgtggatgcgggcgccctgttcaaccagttctttgtggacaaggaacgcctgaaggccaacatcgatgccgtgctggctgaggccgaccaggcaaccctcgtggaaattaccgagaagcacccgctctcccaagggctggccgaagtggtggcctactaccagctggccaccgagtcggactgggccaccatcaatccagagcagtcccagcacctgtcctggcggctgccggacggcagtgtccgcgaagccaccatcgaacagatcatcttcggaaggccggcatga

SEQ ID NO: 47993 - DNA, 642 bp, Arthrobacter sp. Soil764
atgaaccccgccactgatacggaaacccgcacgcccgaggaacttcccgccgtcgtcacccggatgttcaagggcgttctgaatgcggaggacgacgagaaggtgtggcagtccctgctcggcctgacctcgcaggtgcgcgattacgtctccgtgctgggcctggacctggtcctcgatgaggccgaaggctacgcgttcctccgctccaaggacgatccggacagcacgctcccacggctcatcgcacgccgcacgttgacattcaacgtcagcctgctgctggccctgctccgccgccggatgatggagttcgacatcaacagcagcgaagtccggctcatcatgacggggcaggaaatcgcggacatggtggcggtcttcctgccggagtccagcaacgaggccaaggtcctggaccggctgggcacggacatcaagaaggtggtggagctcggtttcctccgcaggctcaaggggcagcaggacaccttcgaggtggcgagaatcctcaaggcgtacgtggatgcgcagtggcttgaggagttcgacgcgcggctgtccgactacaaggcaacactcgccggcgagccgctggccggcgagcgccaggcagcaccagccgttggggagggcaagtga

SEQ ID NO: 47994 - DNA, 762 bp, Arthrobacter sp. Soil764
atggacctgggcgcggacctgcaggagagcttgttcagcctggacgagacagcggacgacgccggcactccgccaggattccggctacaccgtttggagttgctcaactggggcacattccaccagggcgtgcgcacgttccggctggacggggccaacagcctgctcaccggcgacatcggttccggcaagtccacggtggtggatgcgatcaccacgttgctgctgcccgcgcacaagatcgagtacaacaaggcagccggggcgcagaagaaggaacggtcgctcacctcctacgtccgcggcttccacaaaagcgcccggagcaccggcggggagtactcgaagccggtggccctgcgcgggaccggccagctgaccgtggtgctgggtgtcttccgcaacgccgtgctgggcaagtgggttactttgggcatcaccttgtgggccgcgcaggaggccgggacgcccaaccggttttactcgctcgccgaagccgagcagtccatcgccgcggacttcagcagcttcggccaggacccgctgaagctgaagaagaagctccgggcagcaggcgcagctgtccatgacacctttgacccgtattctgcggcgtttaaacggcacttcgggatcagcggcaaccaggccatggagctgttccaccgcaccgtgtccatgaagcaggtggaaaacatacctcgttcgtgcgcagcaacatgctcgaggaggacgacgttgccgcccggatcaccaacctga

SEQ ID NO: 47995 - DNA, 1515 bp, Nocardioides sp. Soil774
atgagcgagatcgccggcgagctggcgcgggtcaagggggccttcgcgcagccgactctcaccctgctccaccagcggcaggcgcccgtggtcatcacgatcttccgcgccgccttcggacgcaacaaccgcccgatccccaccgcgcgcctccacacgcaggtcgaggagcacctcgccggcatccgcgccgcgggggagaccgacctgccgacgggcaccgggcgcgacatctgccagcggtggatgcgcgggcagtggctggtgcgctcgctcgacgagcagggccacgaggtctacacgctgacctcccacgcgcagcaggcgctcgagctggtgaagaacctcagccgcgaccgggccacgctcagcgagcaccgcatcgccacgatcctcggcaccgtacgccgcttcaactccgaggcgaaccccgaccgcacctcgcgcgtgagcatcctcaacgaggagatcgcgcggctgcgcgcggagcgtgaccgcctcgtcgacggcgcggagatggtgggtgccaccgaggactacatgcacgagggcttcaccgagctgctgtcgctgatctccgcgctgcccagcgacttcgcccgggtggaggagcgcttcggagcgatccgcggcgagatcctggcggcgttccgcgccgaggaccgcccggccggggaggtgatcgacgcgtacctcgcgcgcgccgacgcgctgatgaccgccacccacgagggccgcgccttcgagggtgccttcgcgctgctgcgcgacgacgcgatggtcacccagctgcgcgacgacctcaccgcgctgctcgagcacccgctctccgaccggctgctcagcgacgccgaccgcgccgagctgcgcggcaccgtgagcctggtgcgcgagggcctggaccgggtgctgtcgcagcgctcgcgggtcaccgcgacgctcaaggagtacatcgtctcccacgacgccgtgcgcgaccgcgagctcgagcagacgctgcgccaggtcgagtccgagctcatgacgtggatggccacgacgggtccccgcgcggtgcacgccgtcccgctgctgccggcccgcgcgtcggtggagcacctgcgcgagcgcttccacgacccggccgacgacgtgctgcccgagcggatcaggcccgccgaccccgccgacgcgcccccggtctcgctcgacgagctcatcgcgcacggcggcccgcagctcgacgcgctgcgccagcggctcgacgccacgcgcacggacctcgcgcccgcgcagtccctcggcgagctcttcgactcactcgagccgtcgctgcggcgccccgtggagatcttcggcctgctccacctcgccgccgacctcgcccgcgaggacggcgtacgaaccccgtcggacgagcccaccgagtcctacgtcgccgtgcgccacgacggcagtcgccgcatcttcgccgtgccccgcgtggcgctgcccgaccccgacctcgacccccagcagcaggaggcccgcgcatga

SEQ ID NO: 47996 - DNA, 792 bp, Nocardioides sp. Soil774
atgagcgtggacaccgacctcgacctcgcgcccgacctcgacgaggaccccgacgagcaggaggacctcgcctcggtctcgctctgggagggcgacgagggcggcctcgagcacgcccagcggcacgcgctggtcaccctgctcaagcagcgcttcatcagcgcgcgcacccaccctcgcgactggcgcgtgctggtcgagcacgagcgcgtcatccgcggccggctcaacgacctgttcctcgacctgctcctcgaccgctcccgcgaggtggcttggaagcggcaggcgacgtcggagaccgggagccgcttccccaccctgctctacgacgcggcctggacgcgcgaggagacgctcgtgctggtgcacctgcgcgacaggctgcgcgccggccttgccggtggcgactcgcgcgtctacgtcgaccgcgacgacgtcgtcgactacatcgagagcttccgtcccgcccacgccaccgacgaggcgggtgacgagaagcgcgctcgcaacgcggtgaccagcatcgtcaaggcaggcctcctgatcggcgcaccgggcgacgagcgctacgagatcagcgaggccgtcgagccgctgctgccgctcgagctgctccaggagctgctcgaggcgctgcgccgggccaacggcggcgagccggaggcggcacccgagggcgacctcttcgccgaggggcccgagggagtcgacgcggacgacgacgaggcagaggcggcgtacgacgccgacgcaccggtcgccgggcagcacggacaggggcaggcatga

SEQ ID NO: 47997 - DNA, 3447 bp, Nocardioides sp. Soil774
atgagcatcgacgaggcgcgtcccgagaccggcgccgaggggctcttctccgagcacagcgtcgcgacgccggccgacgacacgatgcagtggcgtgccgccctgctccagctggtcaactggggtggcttcggcggcctgaccaccgtggcgctgcgcggtgacgcgacgatgatctccggggcctcgggcgtcggcaagagcacgatcctcgacgcctacaccgcgctgatgatgccgtcggacaccaagttcaacggcgcctccaacgacgccgtcgccggccgcgcgcgcagcctgggccagcgcaacctgctgtcctacctgcggggtgccgtcgacgtcatcgacgacccccgcaccggccgtccggtcgagcagctgctccgcggacgcggcagcgacacgtggggcgcggtggcgatgacgttcgtcaacgaccgcggcggtcagttcaccgtgctgcgcacctactacgtgccgcgtcgcgcgacccgctccggggaggtgcagatgcagctcgtcacccacgacggaccgctgccgctcgacaccctcgaggtggcggtcgccgagcgcttccacgccaacaccctcaagaagctctatccaggcgtgcgggtgcaccggacgtacgccgagttcgccgccgtgctgcacgcccgcctcggcatcggcgccaacggcgacggcgcgaaggcgctgcggctgctggcgcggatccagtcgggcaaccaggtccgcagcgtcgacgagctctacaaggagatggtgctcgagcgaccggcgacctacgccgcggccgaccgggccatcgagcacttcgacgacctcgacgccgcgcacgccgccatgcgcaccgagcagcacaagctcgagctcctcgagccgatcaccggcgtccacgagcgcaaggtgcaggccgcgaagcgcctcgccgagctcgactccttcggcgtcacccgcacgggcgacaccccgctgcgcacgtggctgctgcaggagcacctgcgcctgatctccgccgcggtgacgaccaaccgcgccgaccgtgcggccaccgccgacgcgctcgccgcgaccaccgcggccgagcgcgcgctggtggccgacgtcgacaccgcgcaggaggcccaccgcgccgcgggcgggtcgagcctccagtcgctcgcgctgtcgctcgagcaggagaaggtggtccgcgacgaccgcgcgagccggcgtacggtcctgcacgagcgcctgctgcccctcatcgacgtctccgacgcgagcgcgcccgacgtggactccgcgctgatgtcggccgagtcgttcgccgtgctccagatgcacgcgcggcagtggctcgcggggtgggagcgcgagcaggagcggatcaagcgcgagcgcgacggcgcccgcgaccggcgctacccgctcagccaccgccaggccgagctgcgccgcgagcgcggctcgctggagagccacaagggccgggtcggtgcccgcatgcacgagctgcgcgccgaggtggcgcgggcgtccgggctgggcgaggacgagctgccctacgtcgccgagctggtcgacctcgcgccggaggagtcgcgctggcgcaccgccgtcgagacggtgctcggggccagcgcgcgcacgatgctggtgccgctggaccggctcgaccacttctcccgctccatcgacggcctgcacctgcgcggccgtctggtcttcgagggcgtcgagctcgacctgcccgacctcggacccgccgaccccgaacgggtcgccggcaagctgctcttcaaggactcgccgttctccggctgggtgcaggcgcacgtcgccgagcccgcccgcaacgcactctgtgtcgaggacgccgccgacctcgacggtggcagcttccgcgtcaccctcgccggccagacgcgcaacggtcgccggggtgcgcacggccgcggcgactcccgcaacatcattggcttctccaacaccgaggcgctcgacgagatcgacgccgagctcgcctcgatctcctccgacctcgacgccatcgacgccgaggtcagcgagctcgaccggcgctcggccgtgctcgagcaccagcgcgcggcgtacgacgcggtggcggtcgcccgcttcgacgacctcgacgtcgacgccagcgagcggcgcctggccgacctcgaggcgcgacgcagcgagatcctcggtgccgacgaccagctgcaggtgctggagcgccagatcgaggacctcaccggtcggctcgagtcgacgcgccgggtgcgcttcggcctggaggagcgccagcgcgagctcaacgagcggcacggccgcctcgtcgacgacgaggacctcgtcaacgaccgcctggaggcggccggcccgctcgcgctgaccgacgagcagcaggcggcgctcgccgaggacttccgctccgcggccgccccgggcgaccccgacgacctcgagcgcttcaccgagacctcgcagcgcctcgccgagcggctgcgcgaggccgtcggcgacgccgaggacgagctgcgccgcgccgacgacgagctggcggcgacgttccgcgcctacaagctgcagtgggagtcgcccaacctgggcgccaccgccgactcctacggcgactacgcccgcatcctcgaggagatccgcggcaccggcctggcgggccggcgcgcggagtggcgccgccgcctgaccgagtggagcgggcaggacctggtgccgctgctcggcgcgatggcggcctcggtggaggacatcgaggaccgcctcgagccgatcaacgcgatcctgcgccggctggagttcggcggcgccggcgaccggctccggatccggctgcgccgcctctcgcccgcgcacgtgcaggtgttcctgcgcgacctgcgcgcgctcaccgcccgctctgcgcccgacgccgacgaggccgacctcgagcagcgcttcgccgagctcagccgcttcatggagcagctgcgcaggccccagggcggcgacgcgaccggcacgacgagcgagcgcgaccgcctgctcgacgtacgtcgtcacgtcgaggtcagtgccgagcgctacgactcgctgaccggcgagctgcgcgcgacctaccgcacgctgggggagaagagcggcggcgagagccaggagctggtggcgttcatcgtcggctccgcgctgcgcttccgcctcggcgacgagatgcgctcgcgtccgcgcttcgcgccggtcttcctcgacgagggcttcgtcaaggccgactccgagttcgccgggcgcgcggtgcgggcctggaagggcctcggcttccagctcgtcatcggcgtgccgctcgacaaggtcaccgggctcgagccgcacatggacgagctgctggcgatcacgaagaacagcaccacccaccagtcgtggatcacctcgatcaccgatgcgggggcgcggtag

SEQ ID NO: 47998 - DNA, 1428 bp, Mycobacterium sp. Soil538
gtggacgaccacggggggcgatcggccgctgacctgctcgagctgaaccgcgacctgcagacttcgccgaccgtcaggctgttggccgccaccaacctgagcctgtactcggcgctgatggaccgtcacctctcggccggggtggtcgccgagaccgagctggtggtccggctcgagcgcgacctcgtcgacctcggcgacgaccagtccgggctcgggctgatcaaagcgtgggccagccagggctggctgcaccgcatcgtggatgaacgcaccgaccagaacgtctgctacctgacccaggacgcgcgccgcgcgctggacttcctgcgcggcatgcgccgccaggacacgatcgccaccggcggatccatcaacggcatcgccggccgcctccgccacgtggcgctcaaggtcggcaacgatcccgcccgcatccgcaagcacatcgagcgcgagatcgaggcgctgcaccgcgaactcgacgaactcgacgccggcgagcgcccggaatccgacgtcaccgacgcctatgacgaggcccgggcgatcgctctgcagatggaacgcctcatcaccgacatcggtcagtacgggacgatgatcgagcaggccaccgccgccctcgacgagcccatcgacagcaacgtcgagtaccgcgaccgccagcggcagatgtacgccgactaccaggcggcgtgggattcgcagggccgcgacagccaccgcgcgttcctgcggatgatcaacgatcccgaccagcgcgccgagttcgaggccgacgtggccgccgtcgccgaggcactgccccacctcgacccggcgctgcgcgcggtgatggccgggttcttcgagctcgtcggccaccagatcgacgaggtcgaacgcatccagcagcgctgcgcccagcgggtcaaacggttcaccgcgttcggcaccctcgagcagagccgcggcgtggcccgtcagctcaacgaggccatcggcgcggcccgcacgctgctcaagacctcgctcaccgattcgcggctggacctcgaactgcccctggcccgccacgcgatcagctccgtcggcgccctcagcttcaagatcggcgacctgtcgaatcccaagcccgccaagcccgccggcggcgaggtcgacctggccagcttcgccgcgctcaccacgcaggtcgatgcggccgcgatggcggagatgatcaacaccgcactgcccctgtcgctttcgcaggcggtggccaagctcgacaacgcctacctcggccacgtcatcgtgctttggtcgtgggcgctcaagcagccgaacgacgacaccggcacgtcgacaaccgtccggttccgctccctggacggccgggaccgcgaaatagccgttcccgagctgtctttcaccgaaccgatcaccgcaggagtggcctcgtga

SEQ ID NO: 47999 - DNA, 702 bp, Mycobacterium sp. Soil538
gtgagcaccgatacagaggccgactttgccgccttttcgcagctaccccaggtcgaccagagcgcgcggcccccgcaccagcgccggccccggttcgacggtgacgtgtccgaactgcccgaccgcgcctgctgggcgctgcagcacctgctcacccggcgctacatcagcgccgaatccgacagcgacatctacgcctgggtgctcgaatacagccagcagctgtcggtccggctgtccgaactggacctgctgctgcgagtggtggatgccggacttggaaacgacggagtcgcgttcgtcgagcaggcccgctacgaatccgccaagggcatcaagcttctgcggcgtgagccgctgggcacctacgactcgatcctcgcgctgcacctggcgcagatgatgcgggcctcgggcgggcagagcgtgctgatttcccgcgaggagatgcacggactgttctccggggtgctcaacgacgtcgaccgcgacgcggtcacgttcgccgggcgcatcgacgccgcgatcgcccgcctggccggtctggagatcctgcggcgcagccgcgacgacgaggacagctacaccgtcagcccggtcatcaccgcggtgatgaccgccagcgtgatcaccgaactgcagcaacagttcgagctgctggccaacggcggaacgagcccgcaggagaccgaccttgactga

SEQ ID NO: 48000 - DNA, 3366 bp, Mycobacterium sp. Soil538
ttgactgaacagttccacctgtcccggctgcaggtcatcaactggggcgtgttcgacgggtaccactcgattccgttcagcgagggcggggcactgatcgccggcgcctcgggcagtggaaaatcctcactgctggatgccatttcactcggcttcctgccgttcaaccgacggaacttcaacgcctcgggcgacaacaccgccgccgggtcgagcgcgggcaggcgcaccgtcgacaagtacgtacgcggggcgtggggccagcgcagcgacggcggcaccagccgggtgatgtatctgcgcggcgacgggaccgcgtggtcggcggtcgcggtcacctatgccagcgactccggtcgcaccgtgacgggcctggtgctcaagtggctgaccggcgagtcgcgcaacgactcatcgagccggttcgtgctcggcgacggcgacctcggcatcgaggacgtctgcaaccgctgggcggcaggccgtttcgacaccggggtgttcaagggcgacggctggcggttcaccaccaaggttgaatcgcagtatctcgcgcagctgtacgcgaccatcggcatccgcgcctccgacgccgctcagcagctgctcggcaaggcgaagtcgctgaagagcgtcggcggcctggagcagttcgtccgcgagttcatgctcgacgagcccgacagcctggcgcggctgcccgaggcgctcaagcagatcgatccgctggtcgaggcccgcgaactgctggcggtggcgcagaagaagcgcaagatcctcggcgacatcgagaagatccagcagcgctacgcctcggagtcgaccgatctgggcatcatcgacctcgtcgacctgccgatggtgcgcgcctacaccgatcacgtccggctcgcacagtgcccggcgcagatcgcgcagctggacaccaccgtcgaccagctcgacaacgagtacgaggacgtcacccgcgcgctgaatctggccaaggcggaagcggattcgctcaatgcgcagatcagcggcaccagcgcgaacatcgggccgctgcagagccaggtgaccgccgcggagaccgaggccgagcaggtgtcgcgccgccgcggcgcgtacgaggacatgctcgccgcacaggacctcgaggtacccgacaccgccgacgatttctggaacctgcgggaagaccttctggcccaggccaccgagctgctggccaaggtcgaacgccaccgcgaggcgtcgaccgatgcggagtacgcgcagaaggcggcccgcatcgcgcgcgacgacgccgccaaggagctcaagcgcgtcgagcacgtcgggtcggcgctgccggagttcgcgctgatgatgcgcgaacagatctgtgccgcagtcggtgtcgacgccgccgcgctgccctacatcgccgagctgatggatctgcggccggaccagacgcggtggcgcaccgcggtggagaaggtgctgcgcggtgtcgggttgcggctgatggtgcccgatcagcactggacggcggtgctgcagttcgtcaacgagaccaacatgcgggggcggctggcgctgcaccatgtgcgggccaagatgctgggcgccgatccggtggatccggaaccgaacacgttggcgggcaagctgttcgccgtcgactccgcgcatccgtgcgcggccgaggccgtcgacgtcgtggcagccgccggcgaccacatctgcgtcgacacaccggaggtgttcgcgcggttccgccgcgcggtcaccgacaccgggctgtacaaggactccgaccggctggcgatcaaggacgaccggcgcccgctcaagcagtcggagtacctgtaccagggcgacgtgtcggcgaagatcaacgcgctgacggtggacctggccgcggccgaggagacctaccagaaggcgcgccgcaccgccgacgacatcgccgcgcagcgccagcagtggcgcgaccgcgcggcggcgtgcaaggcgatctgcgagcagttcccgcagtggagtcagatcgacaccgagaccgccgacgggcacgccgatcggctgcgtgagcagtacgagttgctgctggccgacaaccccgacatcgaggcgctcaatgcgcgcgccgacgaatgctggtcgcagatccagaaattgatgacgcggcgcggcgcgatccagacccgccgcgacgacctggacgcccgccggacgcggctgctcgagctctcggaacggctgtcgccggcgttcgtgtcggagccgctgaccgagctgctgggccgctacgccggtcaggtgccggtcgggctcgagctgctcgatcctgagccgcaccgcgacgcgctgttctctgcgatcaagaaggagcgcgaacagctgcgggagagccggcgccgctcctacgacgaattggcccgcatcctcaacacgttcgacaccgcgttccccgacgcgatcccgaacgacagcgacaacttcgacgagcgggtgcacgactacgtcgcgctgtgcaggcacatcgacgagcgcgagctgcccgaggcctacgagcggatgatgcggctggtcaccgagcaggcgccggatgcgatcctgacgctgcaccgagtggccgagcaggaggcgcggcgcatcgccgagcagatcgagcgcgtcaacaccggtctgggcgccgtggagttcaaccgcggcacccggctgacgctgcgggccaccccgcgcagcctgaccgcggtgtcggagttgacggagatcgtgcgggccatctcgcgccgcatcgccgaagtgggactcggcgacaagcaggcgatcctcgaccagtacgccgacatcctgcggctgcgcaaccggctggcgtcgacggcgcccgaggacaaggcgtggacgcgcgacgcgctcgacgttcgcaaccggtttacgttcgactgcgcggagtgggacgtggcgtccgacgaactgatccgcacgcacagcaatgccggcgacaactccggcggcgagcaggagaagctgatggcgttctgcctggcgggtgcgctcagcttcaacctggccagccccgagagccgggacaaccggccggtgttcgcgcagctgatgctcgacgaggcgttctccaagtccgacccgcagttcgcccagcaggcgctgcaggcgttccgcaagttcggtttccagttggtgatcgtcgcgaccgtacagaacgcgacgacgatccagccctacatcgacagcgtggtgatggtcagcaagaccgaggcgacgggccgcaacgcgcggccggtggcgacggtcgccacccggtcgatcgaggagttcaccgaattgcgtcaccagatgcgggcggacgcgaagatccccgcgctggcgcgctga

SEQ ID NO: 48001 - DNA, 1458 bp, Arthrobacter sp. Soil761
gtgccccgctccgccaggtcatccgctgacgccatcagcgcccggctccgggacctcgaactcctcaccaaggggcccgcgtgggcactgacgcgttcggcgccctgggtgatcgccgtgctccaggcttccttcacccgcacccggccgcaggtgccgctcgaggaattccatgccgacgtcgactccttccttgaggagctccggcgccaggatccgggcctgggcggaggggccagcggaaaggcgttcggggatgagtggacccggcggcagttcctgacccggcggaaccagtcaggccagatcgtctacgaggccaccgagcctgcagcacgcgtgctcgccttccttgacagcctttccagcgagcggtccacgttgaacggttcccggctgggcaccctgctgggggacgtggaaaagctcgccaacgagaccaacccggaccaaagtgcgcgcctcgaagccctggaagaggaaatcgaagagcggcagcagctgatccaggacatcagcacgggcgacttcgacggcctgcttgacgacgacgaggccgtggaggccgccggaaacatcctggacctggccgccagtttgcccgcggactacaaaaagatgcgcgaccggatcgaggaactggtgggcggactgcgcaaccagatcatcgaggagtcgctgaccaagggcgccaccatggcccaggtcctggaggcggacaagcggctccgccaaagcccggagggcaggacgttccggtcctttaccgccttcctggaggacccgcagcagcaattgcggttccggtccgcgattggggaggtcctgagccgccagttcgcggatgacctgtcacctgacgaccgggagacactgaagaacctggtggccgagctccggcagcagcacagccagatccagcgcatctacggcaagctcagcgaaagcctgaacacgtacgtccagagcgacgacttccgccagtcggtccggctccggaaggtcctgcgtgaggcagaacaggccatccgttcactcccgtacgagcgtgaacggcccggcctggttcccggccccgtcctgtacaacgcagggtttgagtcactgtccatggtgaagctcttcgaccccgacgagttcgcggcaccacccaggctggccgatcccatcgcgtttaccgactcggaccgggtgcgctcgccgcggacgggcaaggccaggcccgacgtcgtccggtccgccatggctggggctgccacgctcgccgacgcctggcagcagctgccgcccgaagagcagcacatcaacaccatccgcgcactgctgtccgaggccctgcacgccggggccgacttcaaccgcagcacctgggatggcctggacttcgaacagatagacggctccacccgcagggcctacctgcccgtggttacgctcgcaaaggatccacatgactga

SEQ ID NO: 48002 - DNA, 813 bp, Arthrobacter sp. Soil761
atgactgaagtttcaaacgctgagggcccagagctgatcgaagaccagccgcgcggcgaaggggcggtggcggcaccgggcgttgagcgccccttcgcagtgtccccgcgcgacaccttcgtcgacggcgctgccctgttccccggcgataccggcgtcctgtccatgaaagtgcgccaggccctggtgaagctgttgaagggcccgtacatcgacggcggccgggacgaaaagctctggacggtactgctggacaaccaggtgatcctgcgcagccgcctgtccgagctgttcctgaccctgcagctggaccacgagcggaaaatcgcggtccttcgccccgtggacccggacgtcatcggcgggagcgcccggtccagcatcctgcgccagcagcgtgccctcagccgggtggaaaccattgtgctgctccggctccgcctgctgctggaccggcacgtcacggcccagaccgaccccaccatcacccgcgaggagatcacggacctggtggcgcactaccagcccgccggccagcaggacgccctgcgcgactccgatgtggtcacccgtgccatcaccaagctcctggcccgccagctcctgctccccactggactggacgacgtctacaccatctccaacgccctgcccctggccctgccgttcgaaaacatcggcgacatcccggcccacatcgaagccctcgtagccgcctcggctgaccaatcaggaacggagccgctcctggacctggaggacacagccgccgcggagacgaacggaaccacgtccgaggaggatgaccagtga

SEQ ID NO: 48003 - DNA, 3474 bp, Arthrobacter sp. Soil761
gtgaccatcgcaagcatgctcccgctgggggatgtcaccaacccgggccagatgcggcttgcgttggtgcaggtggtcaactgggggacgttccatggagcgcacaccatgcatgttgaccggaacggaaccctgctgaccggtaactcgggcgtgggtaaatccacgctgttcgacgcgatgctgcgggtcttcgatgcgcggccgcggtcaaacgaggcggcggcgcagcggtcgggcggtgccgtggaggacaagcggaccaccttcacgtacatgcgcggcaaggtgggggacaaggcggtgggggagggctcggcgagtgcgttccagcgcccgggtgccacctggtccgccgtcgccctgaccttcgacaacgccgccgggacgcgggtgacggtgtcggcgctgttcgacctgcccaagaacggcacggagtccagcgtgggccggttctacctgatcgacaacgtgcccctggaccttgaggcggttgagggcatcgccgacaaacggttcaccaagggcgcgcttgaggcgatcttcccgcacgcccaggtcttcgacgtgcacaaggcgttcgcggagcggttccgccggctgctgggaatcaactcggaccaggccctgcccctgctgcgcgtcatccaggccggcaagggcctgggcggcagcgtcaacaccttcttccgcgaccaggtgctggatgccccggcaacccttgccgccgccgatgacgtggtggaggagttcagcaacctgatgtccatccgccagcggctggaggatgtccggcagcagcgcgaccagctggcgccggtgccgggactgaaccgcgaatatgcgcagtcgctgctggacgcgaaccggctgcgggagctggtgggtggggagttcgaggcgtacaggcagcagctcgccgtcaccgtgcaccagaagacgctggtccgtttccgcgagctggcgcaggcgaaggcgaaggaactcggcgccgagcgtgcggtccgcgacaacctggccaaggaactgcggcagctggaaaccgagtacaacaaccagggcggcaacgcgatttccgcgattgagcagtcgctggagaacgcccgggttggcctgaagctgcggcgccaggtggaggaggcggcgcagcaggcattggccgacgccgggctgcagcttgagtggagcgcggccggctgggagcaggcacacgagcaggcggcggcacggtcggccgagctgaaggatgattcgcaggctctgcaggagctgcggttcgaggccttcgacgcccacgccagccgcaagcgggagctggcggctgccgagcaggaactcgtgtcgttgaagacgcgcaagtccctgctgccgccgtcgagcattgaaaaccgtgccgccatcgccgctgccaccggtattgcggaagaccgcatgccctttgccggcgagctcatggacctcgcagacggcgaggaacggtggcgccccgctgccgagcgtgcgctccgcagcctggccaccaccctgctggtgcccggtgagcacttcggcgccgtcacccgctacctgaatgaccacaacgtccgcggcgcgctgcgggcagtggacgtctccaagccgctcgccggcggcgcgctcgctgtggaggacgtgcgcgacggcgacctgctcaccaagctggatatcctcgagtccggcgcggcggccgaagccggcgggtgggtccgtgagcgcatcgcgctggactttgcctacccctgcgtggaggacccggacgagctggcagccctggacaagggcctgagcctgggcggcgtggtcaagcggaaccgccacacggtggagaaggacgaccgcttcaccagccgccaggactacgtcctgggcttcgacaatgccgccaagctggaactcgtggccggccaggtggaggacctccggcaggaagtggccaaggccgccgaactggcgcagagccgcgaggactcgcaccagggcatgagccgccagctcgacgccctgcgccggattgccgaagacgaccggccctgggaacaggtgtccgcggccgttgctgccgatgagctcaccaggatcgagcagcggctcaaggacgcacttgccgcgcaggcggacctggagcccctgcgcgccaccatcgaggaggtccggcaaaagcaccagaccagcaccgagtccgcggccgtcctgcaaagcgaatacaaggcattggaccgccagctcacggctgcggattcactgctggaagcggcgcgtgaccgcctggcccaggcgccgccgtcggacgctaccgtgacggcgctggaaccgtactttgcggaattcggcgacgttaccgaaatgcacgagctggacaaccttgccaaccgcgtccggaccaccctgctgggcgaactgcacactgctgaatcacgggggcaagggacagccgagcggctcacccggattttcgaaggcttcgtccgggagtggggcagcgccatttcggcggaccacggcaccagcatcggcgcggccagcgaattcgaagcccgctaccatgccatcgtcaacgacggcctgccggcgcaggaggcggagttccggcagttcttcaaccagcgcacgcacgaatccttcagcaccctgctgcacctgctggacgaggaacgccgctccatcaccagccgcatcctgcccctcaacggcatcctctcccaggtgaacttccatgagggcagttacttggagctggatatcaagcagacgctgccgcccactgccaagcagttcaaggacgccatccagaacgccttgaaggcccgccacgctcggccggccaggacggacgccgccaggggggaggggccggacggtgacgacgccgagctcaccgcgcgctacaagtccctggagaccctggtcaagaggcttggctcgcaggcgccggaagaccggcggtggcgggcggaggtgctcgacgtccgcggccacctgttcatccagtgcaaggagcaccgggaagtggccggcccggcggctggcaaaaagaagggcggcggcacgaagaccgaggtcttcatgcacgcagacaccggttccatgtccggcggcgagcggcagcggttcaccgcgttcatcatggccgcggccctgagctaccagctggggatcgccgatcagggcttcaccacctacggcaccgtgatgatggacgaagcgttcgtgctcgcctccgaggaattcgccggcgccggcatcaaggccctccacgaattcgggttccagctgctgctggccgccccggaaaacgtcatcgatctgtcccggcacctgggctccgtcaccgagatcctccgtgaccgccgcaccaaccgctccggcgtcctcacggccccggtgatccggccgcgtccgggggaggaaggagcctggcgctccgaggcaaacccggtggatatcgtcctgcgctga

SEQ ID NO: 48004 - DNA, 1461 bp, Arthrobacter sp. Soil762
gtgcccccctccgccaggtcatccgctgacgcgatcagtgcccggctccgggacctcgaaatcctcacaaagggacccgcctgggccctgacgcgctcggcgccctgggtgatcgcggtgctgcaggcatcctttacccgcacccgtccgcagcttccgctcgaggagttccacgccgacgtcgactccttccttgagcagctccggcgccaggagtccgggccgggtggtgccgtcatcggcacgtcgtccggcaggaactacgcggacgagtggacacgaaagcacttcctgacgcgccggaaccagtcggggcagatcgtttacgaggtgaccgagccggccgcccgcgtgctcgccttcctggacagcctctccagcgagcggtccacgctgaacggttcccggctgggcacgctcctgggcgacgtggagaagctggccaatgagaccaatccggaccagagtgcccggctggaatccttggaggacgagatcggggaacggcagcagctgatccgggacatcagctccggcgactttgacggcctgctggacgacgacgaagcggtggaagccgccgggaacatcctggacctggccgccagcctgcccgccgactacaaaaagatgcgcgaccgcatcgaggaactggtgggcgagctgcgcaaccagatcatcgaggagtcgctgagcaagggtgccaccatggcgcaggtgctcgacgccgacaagcggctgcggcagagccccgagggcaggaccttccgctccttcacagcgttcctggaagacccgcagcagcaggtccggttccgctcggcgatcggcgaagtcctcagccggcagttcgccgacgacctttcgccggaggaccgggaaacgctcaagaacctggtggccgagctccgccaccagcacagccagatccagcggatttacggcaagctcagcgaaagcctgaacacctacgtccagagcgacgacttccgccagtccgtccgtctccggaaggtcctgcgggaggccgagcaggccatcaggtccttgccgtatgaacgcgaacggccgggactggtccgcggtccggtgctgttcaacgccgggttcgaatcgctggccatggtcaagctctacgaccctgacgagttcgccgtcccgcccaagctggctgaccccatcgccttcagcgactcagaccgcgtgcgctcgccgaggacgggcaaagcacgtcccgacgctatccgggccgccgtggccggcgcgtccaccctggccgaggcctgggtccagctgccgccggaggaacagcacatcaactccatccgcgcactcctctcgcacgccctccaggaaggcgcggcctttgaccgcgacgcctgggatggcctggactacgaacagatcgacggcaccacccgcacggcgtacctgccggtggtcaccctcaagaaggattga

SEQ ID NO: 48005 - DNA, 801 bp, Arthrobacter sp. Soil762
atggggagcgagaccgagacccccgggatttcgatgagctcaatcacccggggcgccggagtcacgccccgggacacgtttgtggacggcgcggccctgtttcccggcgacaccggcgttctcccgatgaaggtgcgtcaggcgctggtcaagctgctcaagggcccgtacgtcgacggcggccgcgacgagaaactgtggaccacgctgctggacaaccagatcatcctgcgcagccgcctgtccgagctgttcctgaccctgcagctggaccacgagcgcaagatcgccgtccttcgcccggtggatcctgaggccatcggcggcagcagccggtcgagcattctgcgccaacagcgtgcgctgagccgggtggagaccatcgtgctgctccgcctgcggatgctgctggaccgccacgtcaccgcccagaccgatgccaccatcacccgtgaggaaatcgccgacctcgtggcccactaccagcccgccggccagcaggacgcgctgcgggattcggacgtggtcacccgggccatcaccaagctcctggcccgccaactgctcctcaccaccggcctggacgacgtctacaccatctccaacgctctcccgcttgccctccccttcgaaaacatcggcgacatccccgcccaaatcgaagccctggtagcagccaccgcagaccccacaggcacagaagcactgatagagctcgacggcgacagttccgcagatgacgacggtggagacggcgacggcgcggttgcctcgaccaccgaaacggaggaagccaagtga

SEQ ID NO: 48006 - DNA, 3480 bp, Arthrobacter sp. Soil762
gtgagcatcgcaaccatgctgccgatgggcgagctcacgaaccccggccagatgcgcctcgccttggtgcaggtggtcaactggggcacgttccacggggcgcacacgatgcacgtggaccggaacggaaccctgctgacgggcaactcgggcgtgggcaagtccacgctgtttgacgccatgctgcgcgtattcgatgcccggccgcgctccaacgaggccgcggcccagcgtgccggcggtgctgtggaggacaagaggaccaccttcacgtacatgcgcggcaaggtgggcgacaaggccgttggcgaaggctcggccagtgcgttccagcgacccggtgccacctggtccgccgtcgccctgacgtttgataacgccgcgggcacccgcatcacggtgtccgcactgttcgacctgcccaaaaacggcacggagtccagcgttgggcgtttctacgtgatcgacagcaagccgctggacctgccggccatcgaggacatcgcggacaagcgcttcaccaaggctgcgctggagaccatcttcccggacgcccagatcttcgatgtccacaaggccttcgcggagcgtttccgccggctcctcggcatcagttcggaccaggctctgcccctgctgcgcgtgatccaggccggcaagggcctgggcggcagcgtcaataccttcttccgcgaccaggtcctggacgcccccgctaccctcgccgcggccgatgacgtggtggaggaattcagcaacctcatgtccatccggcagcggctggaggacgtgcggcagcagcgggaccagctggcccccgtgcccggcctgaacaaggaatacgcgcagtcgctcctggacgcgaaccggctccgtgagctgtcgggcgaggagttcgaagcctataagcagcagctcgccgtcacagtgcaccagaaaacactggcccggttcaaggagctggcccaggcgaaagccaaggagctgggcgcggaacgctcggtccgcgacgggctggccaaggaactgcgccagctggagaccgattacaacaaccagggcggcaacgcgatctccgcgatcgagcagtcgctggacaacgccaaggtgggtctgcggctccgcgaacaggtggaggaagcggcccgcaaggccctttccgacgccggcctgcagctggagtggaccgctgaaggttgggaacaggcccacgagcaggctgccgtcaggtcggccgagctcaaggacgactcccaggccctgcaggagctccgcttcgaagccttcgacggccacgccaccaaaaagcgtgagctggcggcggcccagcaggagctgctgtcgctgaagacgcgcaagtccctgctgccgccgtcgagcattgaaaaccgggcggcaatcgctgcggccaccggcgttcctgaggaccggatgccgttcggcggcgagctgatggacctcgccgaaggggaggaacagtggcggcccgccgcggagcgcgcgctccggaacctcgccaccacgttgctggtccccggcgaacatttcgccgcagtcacccgctacctgaacgacaacaaagtccgtggcgccctgcgcgcggtggacgtgtccaagccgctcgcgggcggcgcgctggccgtggaggacgtgcgcgacggcgacttcctcaccaagctggatatcctcgccagcggcgcggtggcggacgccggggaatggatccgggagcggatcgccctcgatttcgcctacccgtgcgtcgaggaccccgacgagctggccaccctggacaagggcctgagcctgggaggtgtggtcaaacgcaatcggcacacggtggagaaggacgaccgtttcaccagccgccaggactacgtgctcgggttcgacaacgccgccaagctggaactcgtggccgcccaggtggaggacctgcagcaggagctcgccaaggccgccgagctggcccagagccgtgaagagtcgcatcagggcatgagccggcagctcgatgccctccgacgaatcgcggaggaccaccggccctgggaacaggtgtccgctgccgtcgccgccgatgaactcacccggattgaacagcggctcaaggatgccctcgcggcccaggccgacctggaaccgctgcgggccaacatcgaaacggcgcggcagaaacaccaggccagcactgaagccgcagcagtcctgcagagcgaatacaaggctctggaccggcaaatgagcgccgccgattcgctgctggaagccgcgcgtgcccgcctggagcagacgccgccgtcggacgccaccgtcactgcgctggaaccgtacttcaccgacttcggcgacgtcagcgagatgcatgagctggacaacctggccaaccgcgtccggacggcgctgctcggggagctgcacgccgccgagacgcgcgggcagtcaacctccgagcggctgacccggatcttcgagggctttgtgcgcgagtggggctccgcgatctccgcggaccacggcacctccatcggtgcggcaggggagttcgaaggccgctaccacgccatcatcagcgacggcctgcccgcccaggagtccgagttccggcaattcttcaaccagcgcacgcacgaatcgttcagcacgctgctacacctgctggacgaggagcggcggtccatcaccagccgcatcctgccgctcaacggcatcctgtccgaggtcaacttccatgagggcagcttcctggaactggacatcaagcagaccctgccggccacggccaagcaattcaaggacgctatccagaacgcgctgaaggcccggcacactcggcccgcccgcgccggatccggcccggaaagcgggggaggcgacgacgccgagctcaccgcccggtacaagaccctcgaaacgctcgtaaagcggctcggctcgcccaccccggaagaccggcgctggcgcgccgaagtgctggatgtccgcgggcacctgttcatccagtgcaaggagcaccgtgaggtgaccggttcgccgtcaggcggcaagagcgccaggaagtccggcggcaagcggaccgacgtttacatgcacgcggacaccggctccatgtccggcggcgagcggcagcgtttcaccgcgttcatcatggcagcggcgctgagctaccagctgggcatcgccgagcaggggttcaccacgtacggcaccgtgatgatggacgaggcgtttgtgctggcgtcggaggagttcgccggcgccgggatcaaggcgctgcacgagttcggattccagctgctgctggccgccccggagaacgtgatcgacctgtcccggcacctgggctccgtgacggagatcctgcgggacaagcgcaccaaccggtccggcgtgctcaccgccccggtgatccggcccagtcccggcgcggaaggtcagtggcggtccgaggcgaacccggtggacatcgtgctccgctga

SEQ ID NO: 48007 - DNA, 1443 bp, Arthrobacter sp. Soil762
atggatttctacgccatcaacgcactgcgtgagaaccacgcggggtggtccctgctccgcgcccagaacgccccgctggccgtcagcttcttcatcaaggccttcaccgggcctaaccaacgggacatcggccggcaggagctcattgaccacctcgatgatgtcctgttcggcctccgtgaagtcttcggcgaggacaagtacccccgcccggccggtgagtacctggacgagtgggcggccccggaacgggcctggctgcggaaatactacgtcccgggccaggatgagccgcgttacgatctcacggccgccgccgaggacgtggtccgctgggtggagagcctgagcgggcgggacttcgtggccacccaatccaggctgaccagcatcttcgccgtgcttaaagccctggtccagcagtccgaaaccgatccggaggtcaggctcgccgagctccagcgccagcgggacgggatcgacgccgagatgcagcggatcaaggacggcaacatccgcgtgatgactgcgccggaagccctggaccacttccagcagctgaccaccctggccaaggacctgctctccgatttccgtgaggtggagcagaatttccggaagctggaccggcaggtccgtgagcagatcgccacgtgggacggcacccagggcgagctgcttgcctcgatcttcgccaaccagcaggacatcagcggctccctccagggccgcacattccagggcttctgggactacctgatgtccccgcagctgcgcaccgaactgcgggacctgctgcagcgggccacccagatcgacgccctcgccaaactcgacaacctgcacgccgtgaccaacctgcaccaggactggctgcccgccgtcgagcagacccaggccactgtccggcagctctcgcagcagatgcgccggctcctggacgacaaggtgttcctggagaacaagcgcatcatgcagctcgtccggagcatcgaatccggcgcgctgggcacccgggaggtgccgccgtcgggcgtctttatggagatcgccgctcagtccgtcgaggtcgcgctccccttcgagcggccgctgtatgagccgagccggcggatcatggtggacgacgtcgtggtggcggcaaacgatgcagaagtggatgccggcgccctcttcagccagttccacgtggacacggagcgcctgaagtccaatatcgacgacgtccttgccggcgccgggcaggccaccctcggcgaagtagcggccgcgcatccgctctcccaggggctggccgaaatcgtggcctactaccagctcgccaccgaatcggactgggcctccatcaacccggacgagtcacagcaattgtcctggcagctcccggacggcaacatccgggaagccaccgttgaacagatcatcttcgtgaggccggcatga

SEQ ID NO: 48008 - DNA, 624 bp, Arthrobacter sp. Soil762
atgaccaccaccgacgcagctgaaacacacacgccggaggaacttcccggcgtcgtcaccaagctcttcaaaggcgtggtctacgccgagacggacgagaagatctggcagtcgctgctgggcctgtcctcccatgcccgcgactacgtggccgtcctgggccttgacctgatcctggacgagtccgagggctacgcgttcctgaaatcccgcgaggacccggacggcacattgccgcggctgatcccccgccgcccgctcaccttcaacgtcagcctcctcctggcactgctccgcggccggatgctcgaattcgacaccaacagcagcgaactgcgcctcatcatgaccgagcaggacatcgcggacatggtggccgtcttcctgcccgaatccagcaacgaggcgcggatcctggaccagctcggcaccaacatcaagaaggtggtggagctgggcttcctgcggaaactgcgcggccaggcaggcacgtacgaagtagcacggatcctgaaggcctacgtggatgcccagtggctggaggaattcgacgcacggctcgctgactaccgcgcctcgctcagcggagccgtcaccggcagtaaggaagaggaccgcatatga

SEQ ID NO: 48009 - DNA, 3393 bp, Arthrobacter sp. Soil762
gtgacagacgagcaggagatgctgttcagcctggatgaaaaagcggacgacgccggcactcccccgggcttccggctgcaccgtctggagctgctcaactggggcacgttccaccaggaggtacggacgttccggttggacggttcgaacagcctgctgaccggcgacatcggctccgggaagtccaccgtggtggatgccatcaccacgttgctgctgccggccaacaggatcgagtacaacaaggccgcgggtgcgcagaagaaggaacgcacgctgatgtcgtatgtgcggggtttccacaagagcacgcgcagcgccggcggcgagtactccaagcccgttgcgctgcgcgggaccggcaaactcaccgtggtcctgggcgtcttccacaacgccgtcctgggcaaatccatcaccctggccatcaccctctgggccacccaggaggccggccagcccaaccgcttctactcgctggtggagggcgagcagtccatcgccggggacttcgccaacttcggccaggaccccgcgaagctgaagaagcagctccgggccgcgggtgcgtccctccatgaaacgttcgacccgtatgcggcggcgttcaagcggcagttcggcatcagcggaaaccaggccatggagctgttccaccgcacggtgtccatgaagcaggtggagaacatcaccaacttcgtgcgcaccaacatgcttgaggaagacgacgtcgaggcccggatcggcaacctcatccaccacttcgacgatctcaagaaggcccacgacgccgtcctgcgcgccaaggaccagatcgccctgctcacccccatcaccgagggcgccgcccagcacaccgccctgagccgggacgacgaattcgcccgccaacagcgggaccagctgcatccctggttcacggaccggaaactgcagctgagcatcgaacaccagacggaactacagaacaccggcctccggctgcaggaggacagcggcaaactggccaccgaaatcactcagctccgcctggacctggccgccgtgaaggaagatatccgcggcaacggcggcggccggctggccgccatcgaggcggaggccgcgcggttgggcgaggagtcccggtcgcagcgggttcgcttcgaaaaatacgccgaagccgcggcagagctcggtcttcaggcaccggcggaccgcgtccagttcgacgccaaccgggcccggctcgccgacgtcgaaaaggacctcgccgccgcagccaacgaagtgcaggacacccgcaccgaactgaccatgacacgcacggtactcaccggccgcgccagcgacatcgccgcggagctgaccagcctgcaggcgcgtcccaacctgctgccgcgcccccaggtggagctccgccgtcggctgtgcgatgggaccggcatccaggaatccgagctgccgtacgccggtgagctgctgcgcgtccgcgacggtgaagcggcttgggaaggcgccgccgaacgcacgctgcgcggctttgcactgtccctgctggtgccgtcggagcactacgcggcggtgagcggctgggtggacggcaacaacctgcgcggccggctggtgtacctcaagatcggcgaatcgtacacgccgaagccggccgaggcgggcacgctggcgacgaagatcgctatcaaacaggggacgccgttccgcaatttcctgctcgatgagctcagcagccgcttcgactatttctgctgcgacacgctggaggacttccgccgccgttccaaggcgctcaccgcgaacggccagctcaagggcggccgcgggcggcacgagaaggatgaccggcaggagctctcggaccgccggaactacgtcctgggctgggacaacctggacaagatcagccgtttccgtgccgagcaggacgaggtgcagggccagctcagcgtggtggccggccagctgacccgggtaaacgattcgctgggcgccatcggccggcagaaccagcagttgggcatcatcggtgcggtatcggacttcgccgagctcagctggcagctcaccgcacgccgcatcgaggagctcaaggcggagaaggcccggctggagtccaccagcgatgtgcttcgggagctgaccgcgaaggaagccgagctcaccggaaagctggatcgcctgcaggttcgggccgatgatgtccagcggcggatcggctccaacgagggcgccgccaaggacatcgtggaggcgatcgaggactgccgcgaggtcctgcacgagaccccgttgacggacgacgtcggcgtgctggccgccgtcgcaaggctcgccgctgcggaactcgccggtaagccgcttacgtacaagaacaccggcaccgtggaaagtgccgtccggaacgggctgaccgattcgattgacgcgctgtccaagcagatcgcccgggccgccgagaagactgtccggctgatggccgagttccggaacaagtacccgaacgagaccacggagatcgatgccgccctggagtccgccgtcgacttcggcaaactgctggagcagctggtcggcaacgatcttccgcgctttgaggcccacttcaaggaatccctgaaccagaacaccatccacgaggtggtggcgttcaacgcgttcctggacagccgccggcaggacatcgtgaaccggatcggcgaaatcaacctctccttggccgggattgagtacaacaccggccggcacatccagctggagcaccagaacagcaccgacctcgacgtgcggcagttcggcctggacctgcgggcctgttcggaggggaccatcggcgacgatgaccaatactccgagcagaagtacctgcaggtggcgcgcctgatcgagcggttccggggccgggacggctacaccaccctcgacgagcgctggaccgccaaggtcacggacgtccggaactggttcacgttctccgcctcggaaaaatggaccgaaaccggcgaggaatttgaacacttcacggattcgggcggcaagtccggcgggcagaaggagaagctcgcctacacgattctcgccgccgccctggcgttccagttcgggctggcgtccggcaagggtgccggtaaaaacgccggcagtggccgcagtttccggttcgtggtcattgatgaggcgttcggccgcggctccgacgagtcggcccggtacgggctggagctgttccagcggatgaagctgcagctgctgatcgtcactcccctgcagaagatccatgtgatcgagccctttgtctcccatgtggggttcgtggccaacaccaacggcgacgattcgcagctgcggaacatgaccattcaggagtatcgggacgagcgggcccggcgtgccgggtga

SEQ ID NO: 48010 - DNA, 1290 bp, Arthrobacter sp. Soil762
gtgccgggtgacgggctttcggcttccgctcctggccgggcacaggcgggtcgggcacagggctggaccacactggctgacctgcgggcgcagtcgctgaaggcctggggcagcggtgcgttgctccgcgaggtactggaacccaacggactgcacccccgccgtcgtccattgaaacgtccgacggcggcgacgctccggagtgactacgctgcggcgagtgcgtgggcggctgagttgttcgccgctgtgggtccgttcagcctggaaaccgcagaggtggggcgcaccacggtgggggccaaccagcttccggcggcggcggtcttcgccactgtggaggatgagatcgcgtttgcgggcaaggccaaggaggcggcacggttcgtggagctcgcagggagtctggcatcggttcacccgtccttccgcgggtgggcgctgaagcggccgctcaagctgctggaactcggggccgacgccctgaccgcagcccgggtggccctatggctgcgggacaatcccgagcccggcatctatgtgcggcagctgagccttcccggtgtacacaccaagttcatcgagaaccacagggcggtgatcagcgagctggccatggtggtgcaggctcattccgtgagcgccgctgttgaatccgtagagcctctcccagacgtgcccgcagagcccggctcactgctggggctgatgccggcccgtacgcccgcggcacgcttcgccgcgggacacggattcctgcatccgccggagctggtcaggttccgcctgctggatcctgccgtgccgttgttgggccaggcccgcgatctgaccgtgaccgctgaagccttcagcacgctgagcctaccggtcaccacagtgctgatcacggagaacctggtcaacttcctggccctccccgaccgcccggacacgctggctatttatggcggcggttatggtttctcgtcgctgcgggatgcagggtggctgcgcgaccgcgaggtcctgtactggggcgatctggacacccacgggttccggatcctggaccagctgcgcgcggtccacccgcatgtggtgagcgtgctgatggacgaggccacgctgttggcccaccgcgatgcatgggttaccgagccatcgccgtcgaaggcttcgcttagcaggctgacacctgatgagtccgcactgtacgaaggcctccgcaatgatgccttcgggacggatgtcaggctggagcaagagctgatccgctgggactgggtgctgggccgaatcggcggctga

SEQ ID NO: 48011 - DNA, 1482 bp, Duganella sp. Root198D2; identical to SEQ ID NO: 47923

SEQ ID NO: 48012 - DNA, 684 bp, Duganella sp. Root198D2; identical to SEQ ID NO: 47924

SEQ ID NO: 48013 - DNA, 3348 bp, Duganella sp. Root198D2
atgaacgaccagttccgcatggcgcgcctgcaggtattcaactggggcaccttcagtggtttgcacgatattccgatcagcgagcgcggtttcctgatcgtcggcccgtccggcgcaggcaaatcgaccttgctggatgcgttttccgcactgctggtgccgccgcgctggatcgatttcaacgccgcggcgcgcgaggccgaccgcactgggcgcgatcgcaacctggtcagctacatccgcggcgcctggtctgcgcagagcgatagcgcctccggcgttacgtccacgcgctacctgcgcggcggcaccaccacctggtccgcgattgccctgcactaccacaacagcaacgggcaggatgtagtgttgctccagctgttctggctgcgtgggaacagcaatgccaacaccgatgtcaagcgcatcttcctcgtcctggagcgcccgttcgacctgcgggaactgcaggactttggcagcaccaatttcgatatccgcaagctgaagcaaaccctcccggacgcccacatcaaggatgaattccggccctactgcgagcgcttctgccgcttgcttggcatcgagagtgaaatgacgctgcgcctgctgcacaagacgcagtctgccaagaacgtgggtgacttgaataccttcctgcgcgatttcatgctggacaagccggaaaccttcgaggtggcggaccgcctggtcaacgagttcggcgagctgaacgccgcgcaccagtctgtcgttacggcacgccggcaggtacaaaccctggcgccagcccgcgcgcggcaccaggagatggagtcactgcaactggagcgcaacggtctgaaggagctggaagctggactgaatggctaccgcgaacagatgcgaatgaagctgctggccgggcatatcgaggcattgcgcatcgacgttgaaggcatgtccggccgtgtccagcagttgcgcaattcccaggacaaccgcgaactcgccttgcgcgacctggagctgcaacgcagtgccgccggcggcgaccgcatcgagcagctggaaatcgaacgccgcctggtggaagagcaacgcatcgggcggatggccaagagaaagcaggccgtcgatgcctgcactgcactcgaatggacttttgcgggctcgccggatggcttcgcgctgctggccggccaggcccggcgggaactcgaggaatggcagcagagcgccaccggtgaagaccagttgctggagctgggacgcgcccgcgatgacgtgaagcgcaagcgtgaggaagtacttcaggaactccagtcattgcggcgccagccaagcagcatcccggcacatatgcttgaaatgcgccggcagctggcagccgcgctgggcttgggtcacgacgccctgccctttgccggtgagctgatggaggtcaagccggaggaggcacagtggcgtggcgccatcgaacgcgtgttgcacggcttcgcgctgtccatcctcgtcgacgaggaacattacgcagccttggccaaccacgtcaacgaggccagcctgggccagaagctggtgtatttccgtaccggccgcgccgaacagtcacaggcgcgggcgctgcgggcaagttcgctggtcaccaaactgaatgtaaaaagcggccgctttgcagactggctgcaggccgatttgcggcaacgatttgactacgagtgcgtggagtcgatgcgcgctttccgcgccgcgccggaacgggcgctgacgcgcgaaggacaggtcaagcacaatcgtgcacgccatgagaaggacgacaggaatagcgtcaacgacaggcggtattgggtccttggtttcgataaccgcgagaagctaagcctgtacgaacagcaggaccaggaactccgccagcaacatgagtcgctggaaatccagctgtcagcccttggcaagcagcggcgcgaggccggcgcacgcgtgctgcaatgccataccctcgccaacctccaatggcatgagatcgaagtcgagcccctagtcctgcgcatcggcgcaatcgaacgccagcttgcggccatccgcgacggcaacgccaacctgcaggcgatcgacgatcgcctgcgccagcagcgcgagctggtgaagcaggcggcggcggcactggaggaagagaaggtgtcgctgctggcgcggcagcgcgagatcgatctgcatgaaaagcagcttgccgcggcacagcaggatccttccatcgtccgcccgacgccctaccagcaacagggcctggacgagcgctatcttcgcctgccgcaaccgctggtattgaaggacgtcgaccatgcggaccgggtagttcgcaagggcatttcagacgacatcctgaagcttagcgagcatatcggcgattgcggcaagtttatcgaagcccagttctcagcgttcatcagcaactggcgtgccgattccgatggcctggatgccgcgctggcagctgcaccggacttcttcaccaaactgacgcggcttgagaccgatggcttgccggcccacgaacagcgcttcttcgacttgttgcgcaaccagagtcaccagaacctggcagccttgaacacctacctgagtgatgcgcgcaaggcgattctggcacgcatggaggtggtgaacgagagcttgcggcaggtgccgttcaaccgcaacgaggaacgtacaacctacctgcagatacagccgaaagaccggcaactgccggacgtgcgccagttcaagcaggacattctcgatgcgctcagccacgcgtggcatgacgatccggaagcggcggaagcaaggttcatcgaactgcgccgcctggtggaccgcctctccagccaggatgccgaacagcggcgctggcgcgaatccgtcctggatgttcgcctgcacgtcgaattcatcggcagggagtacgacgaacatggcgtcgaacaggatgtgctcgagagcggcgctggcaaatccggcggccagcgccagaagctggcgactactgttctcgcagctgcgctgcgctaccagcttggcggcagtgaaagcggcgtgccagtctacgcgccggtggtgctggatgaagcctttgacaaggcagacaacgagttcaccgcgctggccatgaatatctttgccaattttggattccagatgatcgttgccacgccgttaaagtctgtaatgaccctggaacccttcattggcggcgcctgttttgtcgcgattcgcgaccggcgtgagtccggaatactgctgattgaatacgatgaagaacaacggaggctgaaactggcctccgacgtacgcgcagaggcctcccttgaagcagccggatga

SEQ ID NO: 48014 - DNA, 1161 bp, Duganella sp. Root198D2; identical to SEQ ID NO: 47926

SEQ ID NO: 48015 - DNA, 1443 bp, Hydrogenophaga sp. Root209
atgtataaatttgtcatgaacctgttcgatcgcctgcccaatggactgttcggtccgctcacagggcgctacaaccgccgagcctgggagttgctggtccggttgtcggagcgcttcttcggcgcggactgcgtgccaccgtatgccgaaggctatctgcacgagcaggtgacgaaggagatagaacgcttcctgcttgacgatcaatgggaggaggagagtgcggatgctgcggcgacaccgatcaacgtgcaggccaaccaatggctggcgaggctggctgagaccggttggctgatcgaggaccgcgttggactacgggtctttgtcagcatgcgcccggtggtggcccgatttttcgatgccttggagcagttcgcgctcgacggccctcaactggtcggcggcagcattcagatgatctacaaccagctgaaggcagctcagtccaatccaagggaacaagcggccggctttcagacggccgcccagtcttgctcgcgactgatcaatagtctgaacgccaccaccttgagggtgagggacctcattcgagatctcacgcaggagcaggccacgcctgtctttgtgaagcgcttcttcagtgagcacatcgaagaactctatgttcgtgacttccgccagatgcgaacggagaatcatccgctgatgctgcgtttcgaaattatcgagctcgttgatacggtcgcgaccacggcgccgtctcgtgaacagctgttggccggctaccgtgcactacccggtgctcgccatgaagcggttgaggacatgttggctcgcgacgtttcgagattccagcgtctactggacgttgagaaattcctggagcggatggaccgcgtcatcgattcggcgacacagcgggcgctggcctatcttggctatcgcctcaaggcgtcggagcggctcgaggacgttttggcggatgctgtcgccagtgcctgccgtttggctgatcagggccaggtcatttccggcaggctgctctccccgtcgccggtggtggcggactaccgcctccggatgcccaacctgccggtggccaaaccagaccggcgcgcgatggtcaagcgcgagatgacgtcgcgcgagcgggctgagctgatgcttcgtcgggccatggtgcgtcaccgggacaccactcccgcggcgatcaggcgttatgtgcaggcgcatgtgcccgtgggcgcggagatcgagggagcccatcttcccgtacacggggtggatgacgcagtggcggtcctggtgttgatgcggctagccgccatcggtcgcgttaacccgaaggcgctgcgcgccaatccgctgctgcggaacctcgatttcgaagcagtcatggatgaaggtggacgggtgaacacagaactattcgaactaccaggattcaaggtgagaaggaggtccaccaatgccgcgtga

SEQ ID NO: 48016 - DNA, 636 bp, Hydrogenophaga sp. Root209
atgccgcgtgattggaatgcccttgcagcaaactccgatggactgtacgagtcgagcgactttaagcacgccatgtaccaactggtcgtccagcagtgcatctatctgcggcagcgcgaccaggctgtcgcctatcgcctaatctcggcgcaccgcgatgcctttgccgaggcagtcgcgttgatggggttgcgcctgggcttcgtcgatcggcacgagctctgctatgtgacacaggatggcggcacgcagagcccgatggacctgcaggagacgctctttctcctgacgttgcgacacgtctaccacacccgtgcaagcgccggcgacctcacgccggatggtgatgcgttgatcgatattgcggagttcgaggaaagctacaagagcttgtgccaccgggatttcgacggccgcgtggacaccctgcgcaccctgttgaagatgtcggcgcggcacggcgtcgcgagggccgtggatgcgcccgaaggggatccgcaaccttttgccatcatgatatggccgggcatcgtcgaagtactgagtgagtacgcgttgaatcggttcggtgccgacctgaaggctcgtgcggtcaatgccgaagcggcgccggcggcgcaggagtccacctcatga

SEQ ID NO: 48017 - DNA, 3390 bp, Hydrogenophaga sp. Root209
atgaagaccctgatcgccgtgcacgtcgtgcagttctcattgtgggattacgagacattccagatcagtccgggcgggaccggattcatcgggcccaacggtgctgggaagacaagcctggtcgatgccgtccagatcgcgatggtcggcgggcacggccagcatctgcacttcaatgcgcaatcggtgcacaaggactctcggtcgatccgggcttatgcgctcggcacgatgcgctctggagaaggcgagcaaggtgtggtgtcgcgcaagcgggacgcggcgctgtcgtacatttcgctggttttccgcggccaggagccgggcgatgtgctcagtgccggcatatgcatacatgcgacaacggttgatcagcgggtgatgggtttgtacgtcttgcccggcgtggagctgaaattagagcaccacctggaagacctgggcgatcgaggcaaagccccgattgattgggaacttttcgccgaattcgggcgctcgcatgttcgctatgccggacgcactcccacgatcacgacgcgtcctgaaacctacatgcaggagttgctgcataacgtccaacagggggtcgatgtacgcaagttcctgcgcgcctttggccacagcatcaatctcaaggctgtcagcagcgtgggagacttcctgcgcggataccttgtcgaagccacaccgatcgacaagcgggggaccctccaacacatcaagacacttcgcagcctgggtcggcagatcgaagacgtgacagcgcaagtggcacggctcgaagtgatcgagaagcgctacgcgaaagtggccggcctgcaccgccagacagccgtcgcccgagcggtcggtctgcaggttcgactggaggccgccgacgagagcgccgccaatctggacgaggaaatcaccgagcttgaaaggcaactggccaaggcccgccaggacctgccgcacctggcgcaaagacaccagacgttgcacgcggcgtatgagagcttgcttgctcggctgggcgccgatcccgaggcccaacaacccgcacaactggagcagttgcgcaaggcacatggcgcgaccgtccaacaggcgcgcaaggaagtggagcgcttggcgctgcagctacgtgaagcgatgctggaaacagcggtggctttggaggcgcggcacgcgcagaaggcgagcgcggtggaagaggagatgaagcgctgggaaggctgggccaaggcaggacacatcgcgaaccaggagcagttgaagactgcgcttgacattctgacggcgtgcgagacgcagttaagcggcgaacgctccctggcccgtcaagaggagcaggacgcgaaggctgcggcgcagtccgccaaggcaaagctgcaggccgtcaaccagggcaagaggatcaccgatggcgatgtggcaacggccgcagccttatttgagcaggccgggatcgcctatgaacccgtggccagcttggtgcaggtgaccgatccacgttggcggggccccatcgagacattcctcggaccccatcggctggcacttgtcgtggaggcagggagggaggatgaggcagtcgatctgatccggcggcagcgggtcaacaacgtcacggtggtgcaaccagagcacttgcgtgcggacatcgaccgtgcagcggcaccagacagcgtcgcggcgctgctggacagcaccaatgcagtcgccttggcttatctgcgcagaattctgggccgcatgaagcgagtggactccaccgagcaactacggcatgaatcgcgcgccatgacggtcgactacatgctcagcgccaatggtggaaccaagcgcattcgtcccctcgatgagcaatcctggatgctcggtgtgaaattgactaacgaggaccgggtcgccgccgtcaatgagagccgcaacgcagctaacgcggagcgcagcgccagtctgtacctcgcccaagtcgaaggggcatatgccaaggttcagtccgccgtgctgcaggtcactcaggtgtcgtatgcggcagctttggcgcaacatgcgtccgcaatgcgggacctgcaagcgacgaccgacccggcggcagtgccagtgtccgagcggcttaaggctctgcgctccgatgtcgaggaggcgcgtgggcaatcggtcgaggccggaaatgcgctgcatgaccacaagcttgccatcaacggcaaggagacgaggctgtccatcttgtctccacagctgagccgagcgcgggatgaccttgcgaaactggaggcatcgcacgcgcaagccatccgcgatccggactgcgaccacgacatcctgccccaggagtacgaccggctgcaggcggcgattctgtcggctgggctcgagcaggcgctagtggagctagagcagcgtgctcgccagttggattccaacatccagacagcgctcggggtagcccgtgacggcttcgtcgatttcatcaatgaatactcaatcggcttagtggacgagcgcagcgactggcgcaaagcccatgcctggatcggacggcacatcaggaagctgaatgattcgacgctgaaggattaccgcaagcaggcagatgatgcacgtgaggcggctgaacaatcgttccagtcggacgtcaaattcaagatgcgcgaggccatccagcgggtcaggcaggagattcgcgacttgaacgcgatcctgcaaacctgccccgccttcaccaatggagagaaataccaattcttggcaaagccctcgccagcgcaccgcgatctgtacgaactcatcgtcgcagcacccgatgcaggcggtgaagatctgtttggacagcagggcgttcaaaacaacctcatggctctgctggaggacagcgaaagcggcaaggaccgaggcaacaatccgctggaggactaccgtttgctgttcaattttgacctgcagatcatccaagacggcaaggtcgtagacctattgagcaagcgaatgggcgtggcttccaacggagagcaccgtgtgcccttctacgtcattgcaggcgctgcgttagcgacggcctaccgtattcggccgggagcctcgcacgtcggtgcgggcttgatgatcctcgacgaggccttctacggtatggatgcccagaacacctatgtgaccgcaaccttcttgaagagcctggggctacagctgatgatggcgggccccgatagcgatgtcggcaagctcgttcccctgatggataactattacgatttggctaggtatggcgcggacgtgtttgccgaacatgtggtcgtaaaagaagcggcgcacgcgttgttttcgagcgatatcccgatgctccatccggaactgatcgatgttgcggaatcgcagctgcttgccgcagcagggggcgggtga

SEQ ID NO: 48018 - DNA, 1242 bp, Hydrogenophaga sp. Root209
atgacggaggatgacgacaagaaggccgggcatggtgcggcgctggcgcgcaaggcgctggagcggctgctggcacgagcggagaacgccgcctcaaaggggccggcgcagacggaccgcgccggtaggtccgtgacgctccccctgtccgagaaatcctttcccgagtacctgcgcctacatcgtcatgccgataaggccgtgtgcaacgccaacctccaactggccgagcgggatggtgcgatcagtattgaatgggacagccgggcgggtgagcgagcgcatgtccagcgcatcgtgttgtgcgacggggctagattagccgagcacctgggtatcgagccgcgctgggacgtggtggcgcaggctgagcgccagttcgaacttcacgtcaccgagcacccggtactaacgcatgtgctcgaagcctggcgcaagggcaatttggttcgcggaactcggcctggcgatgtggcttcatggctcgacgccatccgggtgatggagtcttgcgcgcctaggggcggcgatgacatcgccattcgaaggctgagcgctagtctgtttcgcgacagcaagcgcattgaggcaatctggcccgcgctcgacgccctggtgcagggcgacgccaccatggtgcaaagcgaaatggaggatctgttctccgaacttggactggtcaagtttccgccgactctgcttgtcgccggtaacgcagcagtgatgtacggaaatgaaaccgttagggcatcgcggccatatgtcggctttgcgccttcagtccttcgctcggtacaaatcgatccaggtttcggccagcggctgttgacagtcgagaatctgaccacgttccacgaaatggccgggcaacggccggacgatgccatcgtcatctacacgggcggcatgccgagtccatcgtggaagcgagcctatgccgtgtttctgaaggcgcttgcgccgaccgcgaccctccatcactggggcgacatcgacttgggcggattccgcattgcgtcgcacatcgctaagtgctgcgaacaagaagggcgttcgctccgtttgcatggcatgcgcgctgatgccgtgctacctggcaccgttacccagcgtgaattggcaccctctgcacggcgcgagattctcagggtctgtgaacgctgggggtggggtgaagaagctgcagcgctcggggcgctcgcggtcgagcaggaagcgatggagccatgctggcccgagtga

SEQ ID NO: 48019 - DNA, 1464 bp, Acidovorax sp. Root217
atgtccctggaccatgccaagctagaccagctgctgcaaaaccacccggcctggcggctgctgcggtcagaccacgtggcactggtggccagcttcctgcaccgggtcttcatcacccccaatgtgcgcaccatcgcccaggcggacctgtgcgaagcgctcgaagacgacctgtacctgctgcgtgaacagctgggggagcaggcatttcccagaacggcgctggagtacctgaacgactgggccggcgtggacaagggctggctgcgcaagttctaccgcgcgggctcggatgccccggtgttcgacatgacgccggccagcgagaaagccattgcctggctgggcacgctgaccgaacgcagctttgtgggcacggaatcgcggctgctcaccctgttcgagttgctgcgccagatcagtaccggcacgcagaccgatgtgaacgtgcgcctgctggatctgcagcgccagcgcgatgcaatcgatgcggaaatagcccgcgtgctctccggcaacctgccggtgctgggcgacacggccgtcaaggagcggtttgcccagttcacgcagctgtcacgcgagctgctcgcggactttcgcgaggtggagcagaactttcgcctgctggaccgcacggtgcgcgagcgcatcaccctgtggcggggctcgcggggcgcgttgctggaggacattctgggcgagcgcgacgccattgccgactccgaccagggccgcagtttccgggccttctgggattttctgatgtccagccagcgccagcaggagctgtcggcgatgctggagcaggtcttgcagctggaggccgtggcggccatgcagcccgacatgcgggtgcgccgtgtgcaccacgactggatggaagccggtgagcacacccagcgcaccgtggccctgctttcgcagcagctgcggcgctttctggacgaccagtcctggctggaaaatcgccgcatcatggacctgatgcgcaacatcgaagggcatgcgttgcggttgcgcgatgcaccgccgcaaggcccggcgatgcacctggacaccccgggcatcgacatcgccctgccttttgaacgccccttgcatgcccccggcgtcaagacactgatcgccagcatcgccctgcaggccggagaggccgacatggacgacgccgcgctgtattcgcagatcgtcatcgacaaggcgaagctcgcccagcagatccgccgcgccctgcagcggcagggacagatcaccttgggcgacctgtgccaggcccacccgctgcagcacggcctggccgaactgatcgcctacctgcagctggccagcagcagcttcgcctctgccgtggatgagaccagcaccgaaaccatcacctggagcgccgcgcctggccctgcctctggcgacccgcccagactcaagcgcgcacgcctgccgcgggtcatttttgtaagataa

SEQ ID NO: 48020 - DNA, 651 bp, Acidovorax sp. Root217
atgcaagaagacgcagaagatgccccgcccgcactgccgacgcacgacctctccaccctggtgatcccgctgctcaagggggtcatgtaccaggagggcgacgccaactactggcatgccctgctggggctgcaggcgcgggtgcgcgactacgtgggtgttctggggttggcgctgcacatcgacgaggccgagggctttgcctacctgcgggcgcgcccggagccggaagaacccacggcccccgtgccccgcctggtggcgcgccggccgctgaccttccaggtcagcctcatgctggcgctgctgcgcaagaagctgctcgagttcgacgccgtgggaggggacacccggctggttctgtcccgcgacgagctggtggagatggtgcgcgtgttcctgccccagcacagcaacgaagcgcgcctgatcgaccagatcgacacgcacctgaacaaggtcgtcgaactgggcttcctgcgccgccacaaaagccccgtcggcggccagagcgccgtgtacgaggtgcggcgcatcctcaaggccttcgtggatgcgcagtggctgggtgaattcgacgagcgcctggccgcctaccaggcgcagctggcaagcgcccccatgcaaacggcagaggcccccgatgaatga

SEQ ID NO: 48021 - DNA, 3375 bp, Acidovorax sp. Root217
atgaatgacctgcacgcgcagcacagcgcagagcaagccggcgacgtgcctccaggcgttcggctgcagcggttcgaggtcttcaactggggcaccttcgatggccacgtctggagcctgcaccccggcggcaagaacgccttgctcaccggagacatcggctccggcaaatcgacgctggtggacgccatcaccacgctgctggtcccggcgcagcgcatcgcctacaacaaggccgctggcgcacagggcaaagagcggtccctgcggtcctacgtgctgggccactacaagtccgagcgcaacgaggccagcggcagcgccaagccggtcgcgctgcgcgacaccggcacgtattccgtcatcctcggggtgttccacaacgccgcctatgggcacacggtgacactggcgcaggtgttctggatgaaggagccgcacggccagccagcgcgcttttacgtgtgcgccgagagcgcgctgtccatcacaagcgatttttccgactttggcagcgacatcggcgccctgcgcaagaagctgcgcgccaggggcgccacgctgcacgagagctttccgccctacagcgcctggtttcgccggcgcttcggcatcgacaacgagcaggcgctggagcttttccaccagaccgtctcgatgaagtccgtgggcaatctgacggggttcgtgcgcagccacatgctggagccattcgacatggcaccgcccattgcggcactgatcggccacttcgatgacctgagccgcgcccatgccgccgtgctcaaagcgcacaagcaggtggaactgctcactcccctggtggaggattgcgggcgccacgatgcgcagaccgcacacagcgagggcctgcgggaatgccgcgatgcactcaagccctggtttgcccagcacaagctggtgctgctggaagaacgcattgccaacctcgatgacgagtgggagagccatgacgggcgggttcagcgcctgcaaggccagcgctcggccaagcaggccctggagggcgagttgcgccgcagcatggcggacaacggcggcgaccggctggagcaactggcgcaggagattgccgacaaagaggaccaggcgcaacggcgcaaggccaaggccgacagctacaacgaactggcacgcgccgcaggcctgctgagcatgggcagcgccgccgactttctggcacagcggcaaagcctggccggcatgcagcaactggcgcaggaccgagaggcagccctgcagaacggccagatcgaggatgaagtcgccatggccgaagggcggcgcacccatgagaaattgctcggcgagatcgccagcctgaaggcccggcgcaacaacattccggcccaccacatcgcgttgcgccaccagctgtgcgaggccctgggcctgccagcgcgggcgctgccgttcgcaggcgaactgctgcaggtgcacgaaaccgagcgcgactgggaaggcgcggcagagcgactgctcggaggcttcggcctgtcgctgctggtctcggacagccactacgctgccgtgtccgagtgggtggatgccacccacctcaaggggcggctggtgtactaccgcatccgcgccgggcaacgcagcgacatgcctgcgctgcaccgcgagtccctggtccacaagctgcagatccaccccgacacaccgttctacgactggctggagcgcgagctggcacaccggttcgacgtggcctgctgcaccacgcccgaacagttccgccgggaagcgcacgccctgacacgcaccgggcagatcaagtcccggggcgaacgccatgagaaggacgaccgccaccgcctggatgaccgcagccgctacgtgctgggctgggagaacacgggcaaggtcagcgcgctgcaggcccaggcccggcagctcgaaaaccagctgggcgacgtcggccagcgcattgcgcagcggcagctggagcagcaggcactgaagctgcagatgcgcaacctcacgcagctggatgtgtatgccgattttcgcgatctggactggcagccgctggtggccgacatcgccaggctgcagcacgagcagctggccctgcgcgcggcctccgacctgctgcggcacctgggagagcagcgcgatgcggtgctccaagagctgaagaagatcgaggccgacatggaccaccagcgcgatgcccgcgccaggaccgagcagcggcgctccgacgcccaggcactgcgcagccagacccaggccttgctggcggagcacccgctgtccggcgacgcgcacctgccggcgcaactggaggcgctgcgcgcacaggcacagcttgaccagcgcctgacactggagtcctgcgacgcacgtgagcgcgacctgcgcgactggctgcaaaagaagatcgatgccgaggatctgcagctcaagcgcctgcgcgaacgcatcatccgcgacatgtcggcctacaagaacacctaccccctcgaaacgcaggaggtggacgccagcatcgaggccagccacgagtaccggacgatgctggacaacctgcgtgccgatgacctgccgcgcttcgaggccacgttcaagaacttgctcaacgagaacaccatccatgaggtggccatgttcctgtcgatgctggagagggagcggggaacaattctggaccgcatcggccgcatcaacacatcgctcacgcagatcgactacaaccccggccgcaccatccgcctggaggcgcagacggcgccggacgtggacatacgcgactttcgcaacgacctgcgcgcctgcaccgaaggcggcatcacgggctcggacgatgcgcagtattcggaggccaagtttctgcaggtgcagcgcatcatcgaacgcctgcgggggcgggagggtacgggcgaggcagaccggcgctgggccgccaaggtcaccgacgtgcgcaactggttcgtctttgccgccagcgagcgctggcgcgaggacgacagcgagcacgagcactactccgactctggcggcaagtccggcgggcaaaaggaaaagctggcctacaccatcctggcggccagcctggcctaccagttcgggctgcaatggggcgctgcgcgctcgccccggttccacttcgtcatgatcgacgaggccttcgggcggggctcggacgaatccgcgcagtacggcctgcagctgttcgcgcagctgcaactgcagctgctggtgatcaccccgctgcagaaaatccacaccatcgaacccttcgtctccagcgtgggcttcgtgcacaacgcggatggccggtcctcgcaactgcgcaacctgtccatcgaggaatatcgggcctcccgcccggaggcgggtgaatga

SEQ ID NO: 48022 - DNA, 1194 bp, Acidovorax sp. Root217
atgaactggagccgccccgacgatctgctggcgcagctccagaggctctgggaccgcggcgacctgctggccagcatcgtgccagccgagtcgcacgcattgcagcctgccccgcttttcccgcgccgcctgtcgctgcgcagccccagttcgggcgacatcgccgaccagtttgccagcgtgcgcgcctgggtggcgcaaatcagggcgctaccccattgccgcgtggagatgcgcagctttcgccaccgccttttcggcaccaacgaagttccagaccagatctgggtggacagcctggacgacgccatggcctggctgggaaagcgccgcgacctggcgcatttcaacgccctggtggaaaccacccggcaacaacagcccctgttgctcccatggctggcgcagcgccccctgcaggcgctggcgctgacgcacgactggcagcgcctgctggacgtggtgcagtggctgcagcagcaccctcgccccggcatctatgcacggcagatcgatgtggcgggcgtgcacagcaagtttgtcgaagcacaccgcacggtgctggccgacctgctggacctggcgctgcccgaggacgccatcgaccggggtgcatcgggggcaggcctgttcgaggagcgctacggcctgctgcgaaagcctctgcgcattcgcctgcgcctgctggaccccgccctgcttgcagggccttggggccaggacgtgaccctggacgcagggcccttcgcccagctgcccctggcgggcgcgcgcgtgttcatgaccgagaacgaaaccaacttcctgaccttgccagcgcacccgcgcagcctggtggtttttggcgccgggtatgggtttgacgtgctgcggcaggcgcaatggctggcccactgccccctgcactactggggcgacatcgatacccacggtttcgccatactcgaccagttgcgccaccaatggccccatgcccagtcatttctgatggacaagggcaccttgcaggcccatgcgccgctatggggccaggaaaaccagcccacccggcgcgagctgccccgcctgacagaggccgaagcagccctgtacgacgacttgcgcgacaaccggctgcaagccaacctgcggctggagcaggagcacgtgggatttgggtgggtgcaggcggcgctgcagcggctgcaggactga

SEQ ID NO: 48023 - DNA, 1464 bp, Acidovorax sp. Root219
atgtccctggaccatgccaagctagaccagctgctgcaaaaccacccggcgtggcggctgctgcggtcagaccacgtggcactggtggccagcttcctgcaccgggtcttcatcacccccaatgtgcgcaccatcgcccaggcggacctgtgcgaagcgctcgaagacgacctgtacctgctgcgcgaacagctgggggagcaggcatttcccagaacggcaatggagtacctgaacgactgggccggcgtggacaagggctggctgcgcaagttctaccgcgcgggctcggatgccccggtgttcgacatgacgccggccagcgagaaagccattgcctggctgggcacgctgaccgaacgcagcttcgtgggcacggaatcgcggctgctcaccctgttcgagctgctgcgccagatcagtaccggcacgcagaccaatgtgaacgtgcgcctgctggatctgcagcgccagcgcgatgcaatcgacgcggaaatagcccaggtgctgtccggcaacctgccggtgctcggcgacacggcagtcaaggagcggtttgcccagttcacgcagctgtcacgcgagctgctcgcggactttcgcgaggtggagcagaactttcgcctgctggaccgcacggtgcgcgagcgcatcaccctctggcggggctcgcggggcgctttgctggaggacattctgggcgagcgcgacgccattgccgactccgaccagggccgcagtttccgggccttctgggattttctgatgtccagccagcgccagcaggagctgtcggcgatgctggagcaggtcttgcagctggaggccgtggcggccatgcagcccgacatgcgggtgcgccgtgtgcaccacgactggatggaagccggcgagcacacccagcgcaccgtggccctgctttcgcagcagctgcggcgctttctggacgaccagtcctggctggaaaatcgccgcatcatggaccttatgcgcaacatcgaagggcatgcgttgcggttgcgcgatgcgccgccgcaaggcccggcgatgcacctggacaccccgggcatcgacatcgccctgccctttgaacgtcccttgcatgcccccggcgtcaagaccctgatcgccagcattgccctgcaggccggagaggccgacatggacgacgccgcgctgtattcgcagatcgtcatcgacaaggcgaagctcgcccaacagatccgccgcgcgctgcagcggcagggccagatcaccttgggcgacctgtgccaggcccacccgctgcagcacggcctggccgaactgatcgcctacctgcagctggccagcagcagcttcgcctctgccgtggatgagaccagcaccgaaaccatcacctggagcgccgcgcctggccctgcctctggcgacccgcccagactcaagcgcgcacgcctgccacgggtcatttttgtaaggtaa

SEQ ID NO: 48024 - DNA, 651 bp, Acidovorax sp. Root219
atgcaagaagacgcagaagatgccccgcccgcactgccgacgcacgacctctccaccctggtgatcccgctgctcaagggggtcatgtaccaggagggcgataccaactactggcatgccctgctggggctgcaggcgcgggtgcgcgactacgtgggcgtgctggggttggcgctgcacatcgacgaggccgagggctttgcctacctgcgggcgcgcccggagccggaagaacctacggcccccgtgccccgcctggtagcacgccggccgctgaccttccaggtcagcctcatgctggcactgctgcgcaagaaactgctcgagttcgacgccgtgggaggggacacccggctggttatgtcccgcgacgagctggtggagatggtgcgcgtgttcctgccccagcacagcaacgaagcgcgcctgatcgaccagatcgacacgcacctgaacaaggtcgtcgaactgggcttcctgcgccgccacaaaagccccgtcggcggccagagcgccgtgtacgaggtgcggcgcatcctcaaggccttcgtggatgcgcagtggctgggtgaattcgacgagcgcctggccgcctaccaggcgcagctggcaagtgcccccatgcaagcggcagaggcctccgatgaatga

SEQ ID NO: 48025 - DNA, 3375 bp, Acidovorax sp. Root219
atgaatgacctgcacgcacagcacagcgcagagcaagccggcgacgtgcctccaggcgttcggctgcagcggttcgaggtcttcaactggggcaccttcgatggccacgtctggagcctgcaccccggcggcaagaacgccttgctcaccggagacatcggctccggcaaatcgacgctggtggacgccatcaccacgcttctggtcccggcgcagcgcatcgcctacaacaaggccgctggcgcacagggcaaagagcggtccctgcggtcctacgtgctgggccactacaagtccgagcgcaacgaggccagcggcagcgccaagccggtcgcgctgcgagacaccggcacgtattccgtcatcctcggggtgttccacaacgccgcctatgggcacacggtgacactggcgcaggtgttctggatgaaggagccgcacggccagccggcgcgcttttacgtgtgcgccgagagcgcgctgtccatcaccagcgatttttccgactttggcagcgacatcggtgccctgcgcaagaagctgcgcgccaggggcgccacgctgcacgagagctttccgccctacagcgcctggtttcgccggcgctttggcatcgacaacgagcaggcgctggagcttttccaccagacggtatcgatgaagtccgtgggcaatctgacggggttcgtgcgcagccacatgctggagccattcgacatggcaccgcccattgcggcactgatcggccacttcgatgacctgagccgcgcccatgccgccgtgctcaaagcgcacaagcaggtggaactgctcactcccctggtggaggattgcgggcgccacgatgcgcagaccgcacacagcgagggcctgcgggaatgccgcgatgcactcaagccctggtttgcccagcacaagctggtgctgctggaagaacgcattgccaacctcgatgacgagtgggagagccatgacgggcgggttcagcgcctgcaaggccagcgctcggccaagcaggccctggagggcgagttgcgccgcagcatggcggacaacggcggcgaccggctggagcaactggcgcaggagattgccgacaaagaggaccaggcgcaacggcgcaaggccaaggccgacagctacaacgagctggcacgcgccgcaggcctgctgagcatgggcagcgccgccgactttctggcacagcggcaaagcctggccggcatgcagcaactggcccaggaccgggaagcagccctgcagaacagccagatcgaggatgaagtcgccatggccgaagggcgacgcaaccacgggcaactgctcggcgagattgccagcctgaaggcccggcgcaacaacattccggcccaccacatcgcgttgcgccaccagctgtgcgaggccctgggcctgccagcgcgggcgctgccgttcgcaggcgaactgctgcaggtgcacgaaaccgagcgcgactgggaaggcgcggcagagcggctgctcggcggcttcggcctgtcgctgctggtctcggacagccattacgctgccgtgtccgaatgggtcgatgccacccacctcaagggacggctggtgtactaccgcatccgcgccgggcaacgcagcgacatgcccgcgctgcaccgcgagtccctggtccacaagctgcagatccaccccgacacaccgttctacgactggctggagcgcgagctggcacaccggttcgacgtggcctgctgcaccacgcccgaacagttccgccgggaagcgcacgccctgacacgcaccgggcagatcaagtcccggggcgaacgccatgagaaggacgaccgccaccgcctggatgaccgcagccgctacgtgctgggctgggagaacacgggcaaggtcagcgcgctgcaggcccaggcccggcagctcgaaaaccagttgggcgacgtcggccagcgcattgcgcagcggcagctggagcagcaggcactgaagctgcagatgcgcaacctcacgcagctggatgtgtatgccgattttcgcgatctggactggcagccactggtggccgacatcgccaggctgcagcacgagcagcaggccctgcgcgcggcctccgacctgctgcggcacctgggagagcagcgcgatgcggtgctcgaagagctgaagaagatcgaggccgacatggaccaccagcgcgatgcccgcgccaggaccgagcagcggcgctccgacgcccaggccctgcgcagccagacccaggccttgctggcggagcacccgctgtccggcgacgcgcacctgccggcgcagctggaggcgctgcgcgcacaggcacagcttgaccagcgcctgacactggagtcctgcgacgcacgtgagcgcgacctgcgcgactggctgcaaaagaagatcgatgccgaggatctgcagctcaagcgcctgcgcgaacgcatcatccgcgacatgtcggcctacaagaacacctaccccctcgaaacgcaggaggtggacgccagcatcgaggccagccacgagtaccggacgatgctggacaacctgcgtgccgacgacctgccgcgcttcgaggccacgttcaagaacctgctcaacgagaacaccatccatgaggtggccatgttcctgtcgatgctggagagggagcggggaacaattctggaccgcatcggccgcatcaacacatcgctcacgcagatcgactacaaccccggccgcaccatccgcctggaggcgcagacggcgccggacgtggacatacgcgactttcgcaacgacctgcgcgcctgcaccgaaggcggcatcacgggctcggacgatgcgcagtattcggaggccaagttcctgcaggtgcagcgcatcatcgaacgcctgcgggggcgggagggtacgggcgaagcggaccggcgctgggccgccaaggtcaccgacgtgcgcaactggttcgtctttgccgccagcgagcgctggcgcgaggacgacagcgagcacgagcactactccgactctggcggcaagtccggcgggcaaaaggaaaagctggcctacaccatcctggcggccagcctggcctaccagttcgggctgcaatggggcgctgcgcgctcgccccggttccacttcgtcatgatcgacgaggccttcgggcggggctcggacgaatccgcgcagtacggcctgcagctgttcgcgcagctgcaactgcagctgctggtgatcaccccgctgcagaaaatccacaccatcgaacccttcgtctccagcgtgggcttcgtgcacaacgcggacggccggtcctcgcaactgcgcaacctgtccatcgaggaatatcgggcctcccgcccggaggcgggtgaatga

SEQ ID NO: 48026 - DNA, 1194 bp, Acidovorax sp. Root219
atgaactggagccgccccgacgatctgctggcgcagttgcaaaggctctgggaccgcggcgacctgctggccagcgccgtgcccgccgcgccggacgccttgcagcccaccccgcttttcccgcgccgcctggcgctgcgcggccccagttcgggcgacatcaccgaccagtttgccagtgtgcgcgcgtgggtggcgcaaatcagggcgctcccccattgccgcgtggagatgcgcagctttcgccaccgccttttcggcaccaacgaagttccagaccagatctgggtggacagcctggacgacgccatggcctggctgggaaagcgccgcgacctggcggatttcaacgccctggtggaaaccacccggcaacaacagcccctgttgctcccatggctggcgcagcgccccctgcaggcgctggcgctgacgcacgactggcagcgcctgctggacgtggtgcagtggctgcagcagcacccccgccccggcgtctatgcacggcagatcgatgtggcgggcgtgcacagcaagtttgtcgaagcccaccgcgcggtgctggccgacctgctggatctggcgctgcccgaggacgccatcgaccggggtgcatcgggggccggcctgttcgaggagcgctacggcctgctgcgaaaacccttgcgcattcgcctgcgcctgctggaccccgccctgcttgcagggccatggggccaggacgtgaccctggacgcagagcccttcgcccagctgcccctggcgggcgcgcgcgtgttcatgaccgagaacgaaaccaacttcctggccttgcctgcgcacccgcgcagcctggtggtttttggcgccgggtatgggtttgacgtgctgcggcaggcgcaatggctggcccactgccccctgcactactggggcgacatcgatacccacggtttcgccatactcgaccagttgcgccaccaatggcaccatgcccagtcatttctcatggacaaggccaccttgcaggcccatgcgccgctgtggggccaggaaaaccagcccacccggcgcgagctgccccgcctgacagaggccgaagcagccctgtacgacgacttgcgcgacaaccggctgcaagccaacctgcggctggagcaggagcacgtgggatttgggtgggtgcaggcggcgctgcagcggctgcaggactga

SEQ ID NO: 48027 - DNA, 1506 bp, Nocardioides sp. Root79
gtgagcgacatcgccggcgagctggcgcgcgtcaagggcgccttcgcgcagccgaccctcaccctgcttcaccagcgccaggcgcccgtcgtcatcacgatcttccgggccgccttcgggcgcaacaacaagccgatcccgacggcgcggttgcacacccaggtcgaggagcacctcgccgagatccggctcgtgggggagggggaggtgccgaacggcaccggcaaggagatctgccagcgctggatgcgggggcagtggctggtccgctcgctcgacgagcagggcaacgaggtctactcgctgacctcgcacgcgcagcaggcgctggagctggtcaagaacctcgcgcgtgaccgggcgacgctcagcgagcaccggatcgccaccatcctcggcaccgtacgacgcttcaactccgaggcgaaccccgaccgtggggcacgggtgaccctgctcaacgaggagatcgcgcggctgaaggaggagcgcgaccggctcgtcgacggcgccgagatggtgagcgccaccgaggactacatggtcgaggggttcaccgagctgctgtcgctgatcagcgcgctgccgagcgacttcgcgcgggtggaggagcggttcgcgaccatccgggccgagatcctgggggccttccgcgctgaggaccggccggcgggcgaggtgatcgacgagtacctcgcgcgggctgacgcgctgatgaccgcgacccacgagggccgggcgttcgagggggcgttcacgctgttgcgcgacgacgcgctcgtgacccagctgcgcgaggacctgaccgcgctgctcgagcaccccctgtccgacggcatcctcggtgacgccgaccgggccgagctgcgggggaccgtgcgcctggtccgcgacggcctcgaccgggtgctggcgcagcgcagccgggtgacggcgacgctcaaggagtacatcgtctcccacgacgcggcgcgcgaccgtgagctggagcagaccctgcgccaggtcgagtccgagctgatgacctggatggccgagaccggaccgcgcgccacccatgacgtcagcctgctgccgagccgggtcggcatcgaccacctgcgcgagcgcttctacgacccggccgacgacgtgctgcccgaccggatcagcgcggccgatcccgccgacgcgccgggcctctcgctggcggagctgatggcgcagggcgggccccagctgggctcgctgcgcgagcggctcgacgacgccctgcgcgacctgctgccggcgggctcgctgggcgagctgttcgagtcgctcgagccggcgttgcgccgcccggtggagatcttcggcctgctgcacctcgccgccaaccgcgacctgcgcaccgaggccgacgcgctggaggccttcgccgccgtacgtccggacgggtcgcagcggaccttcgcggtgccgcgcaccccgctgccggaccccgaccttgaccgtgtccctgctccggaggagtccaacgcatga

SEQ ID NO: 48028 - DNA, 702 bp, Nocardioides sp. Root79
atgagtgtcgacaccgacgaggtggagtacgacgaggtcatcgacgagacgtcggtgtccctgttcgagggcgacgagggcggcctcgactacgtccagcgccaggcgctcgtcgcgctgctcaagcagcggttcatcagcgcccgcacgcacccccgcgactacgacacgctccgggagcacgagcagctgctccgatcgcgcctcaacgacctcttcctcgacctgcagatcgaccgtgaccgcgaggtcgcgtggaagcgccaggcctcgcccgagggcggcggccgcttcccgaccctgctccacgacacgtcgtggacgcgcgaggagaccctcgtgctggtccacctgcgcgaccggttgcgcgccggccaggccggcggcgacctgcgggtctacgtcgaccgcgacgacatcatcgactacgtcgccagctaccgccccacccacgcgaccgacgagtccggcgacgagaagcgtgcccgcaacgccgtcctcagcgtggccaaggccggcctgctgatcggcaccgcctccgaggaccgcttcgagatcagcgaggccgtcgagccactgctgccgctcgagctgctgcaggagctgctcgaggcgctgcagaaggccaacggcaccgagtcggcagaggcggcccccgaggacgccgacgccgacctgttcgacgaggagaacgacgagtga

SEQ ID NO: 48029 - DNA, 3450 bp, Nocardioides sp. Root79
gtgagtgtcgacgaggccgtgtccggcctgttcgccgaggaggtcgtcgccgtccctgccgacgacaccgtccagtggcgtgcctccctgctgcagctggtcaactggggcggcttcggcggcctcacgaccgtgccgctggcgggtgaggcgacgatgatctccggcgcctccggcgtcggcaagagcaccatcctcgacgcctacaccgcgctgatgatgccctcggacaccaagttcaacggtgcgtccaacgacgccgtcgccggccgggcgcgcagcgtcgggcagcgcaatctgctgtcgtacctgcggggcgccgtcgacgtgatcgacgacccgaagacgggccgtccggtcgagaagctgctgcgcggcaagggcgccgacacgtggggcgcggttgcgatgaccttcgtcagcgaccagggcggccggttcacggcgctgcgcacctactacgtcccgcgccgcgccgcgcgctccagcgacgtccacatgcagatgtggacccacgagggcaccctcccgctcgacaagctcgaggccgccgtccccgagaagttccacgccaacacgctcaagaagctctttcccggcatccgcgtccaccgcacgtacgccgagttctccgccgtcctgcacgcccggctcggcatcggcgccaacggtgacggcggcaaggcgctgcgcctgctggcgcggatccaggccggcaaccaggtgcgcagcgtcgacgagctctacaaggacatggtgctcgagcggccggcgacctatgccgccgccgaccgtgcgatcgagcacttcgacgacctcgacgcagcccacgcggcgatgcgcaccgagcagcagaagctcgagctgctcgagccgatcaccgacatgtacgagcgtcgtacggcggccgcgaggcgtctcgacgagctggactcctacggcatcacgcaggccggcgaccagacgccgctgaggtactggctcctgcgcacgcacctgcgcctgatcgagtccgcggtggccgcgaaccgtgacgcgcgtgcagccaccgtgcaggcactcgcgtccgcgcaggcggccgagttgcagctggcgggcgacctcgacgccgccaaggaggcgcaccgtgacgcgggcggcggcgacctgcagcggttggccgcgctcgccgacgcggagcgcaacctgcgggtcgagcgcggcaaccggctcgccgagctcgaggaccgggtctacccgctgatcggcctgcccgacatcgacccgcccgacctcgaggccgccgtggaggacgccggcgccttcacggtgctccaggagcaggcccgcgagcgagtcgtcgcgggcgagaaggagcagaagcgtctccaggccgagcgggagaccgtgctgcgcgagcagcagttcccgctcacgcaggagcagtcggtgctcaagcaggagcgggcctcgctggagagccgcgcgggccgcgtgccgtcgtacctccacgacctgcgcaccgccgtcgcccgcgcgagcgggctgtcggtcgacgagctgccgttcgtcgccgagctgatcgacgtcgcgcccgaggaggcgcgctggcgcaccgcggtcgagacggtgctgggcggcagcgcccggatgatgctggtgccgctcgaccggctgcaggacttctcgtccgcgatcgacgagctgcgcctgccggcccggctgaccttccagggcgtcgagctcgacctgcccgagaccgggccgtccgaccccgagcggatcgccggcaagctgctgttcaaggactcgccgttcgcgggctgggtgcagcagcacgtcgaggacccctcccgcaacgcgctctgcgtcgccaacgccgccgacctcgacggtcccggcttccgcgtcaccctcgcgggccagacgcgcaacgggcgccgcggcgcgcacggtcgcaacgacgtccgcaacatcatcggcttctccagcgaggacgcgatcgccgagatcgacgcgcagcttgtcgaggtcgagagccgactggccgagatcgacggccgcctggccgagctgggccgccgttccagcctgatcgacctccagcgcaaggcctacgacgccatcgtgatggtgcgcttcgacgacgtcgacgtcgcgggcagcgaccggcggatcgccgacctggaggagcggcgggcggcgatcctggcctccgacgaccggctccaggtgctgcaggcgcagatcgaccagctcgaggcggacctgggccaggcgcgcaaggagcgcttctcgctcgaccagcgcaaggaccagctccaggacgaccagcgcgagctctacgacgccgaggacaccatcaaggaccgggtgttcgcgatcgaggacgccggcgtggtcgtcctcgacgaggtgcaggaggcggccctggcggccgacttcgctgcggcggccgcaccggacgaccccgaggacctcgaccgcttcaacaacaactcccagcggctcggcgagcggctgcgcacggcgctcgcggacgccgaggcggagatcaagcggtgcgacgaggacctcgcgcacatcttccgcagctacaagttcacgtgggagtcgccgaacctcggcgcgaccgtggagtcgtacgccgactacgcccgcatcctcgacgacatccgcggcaagggcctcgccgaccgccacgccgagtggcgccgccggctcaccgagtggagcggccaggacctggtgcccctcctcggcgcgatgtcctccagcgtcgaggagatcgaggaccggctcgagccgatcaacgcgatcctgcggcgcctggagttcggcgcctcgggcgaccgcctgcgcatccgcctgcgccgcctggcgccggcccacgtgcaggcgttcatgaaggacctgcgcgagctgtcgaccggtacgacgagcgagctgaaggaggaggacctcgagcggaggttcgccgagctcagccgcttcatgcgccagctgcgccgctcggagcacagcaccgacggcccgaccgagcgcgacaagctcctcgacgtccggcgtcacgtggagatcagcgccgagcgctacgacttcctcagcggcgaggtccgggcgacgtaccggacgctgggggagaagtccggcggcgagagccaggagctggtggcgttcattgtcggctccgcgctgcgcttccggctcggcgacgagatgcgctcgcggccgcggttcgcccccgtcttcctcgacgagggcttcgtgaaggcggactccgagttcgccggccgcgccgtgcaggcgtggcgggggctcgggttccagctgatcatcggcgtcccgctcgacaaggtgaccggtctcgagccgcacatggacgagctgctggcgatcacgaagaacgcgcagacgcaccaggcgtggatcacgccgatctcggacgtcgtggaggccgacccggagtga

SEQ ID NO: 48030 - DNA, 1086 bp, Nocardioides sp. Root79
gtgacaggcgcggtctgggcaccggagatcgctctcggctcctccggcctgaccggtcggcgcctcgcggacgcgtgggaggacattcacccgctccggtcggagtggatgggctgggcggcgaccgcaggcgagggcgtggaggtcgtctggcgcgatgccacgttgtacggcagcggtcaaccgctgccggcgacgctcagggtcgccgacgtcgacacggcggcccgactcctgcaggacgggtggccggaccggctcgacgaggcccgcacccgtgccgcgcgtctggccgcggacttccccggccacgccgatcccgcgggcatgctgcgcgccacccgcgagctcccggccgtcgacttcgacctggtggtccgcgccgcccgctggttcgccgacccgcatcccgccggcctgaccgcccggcaggtgccggtcgagggcatgggcaccaagtggctcgaccgacgcgccagcgtcgtccgtcggctcgccggcctggagtccctggacctcgagccgggccgcccctcgcgcgtgcacctcacctacctcgacccggaccatctcgactccggcggccggcgccacgacgtcgccaccgtcggtgacgtgcacacggtggcctaccggccgtcggtggtcctgatctcggagaatcgtgacacggcgcagcagttcccgcgcgtcgcgggcggcatcgcgatcgagggagacggcaacggacccggcgccgtgccgcagctgccgtgggtgcgcgcctgcccggacgtcgtctactggggcgacatggacgtcaagggcctggagatcctcgcggccttccgtggcaccggcctgcgggcacgctcgatgttcatggacctgacgtcctatcggaggtgggagcgcttcggcgtcgaccatgaccacgacggcgcgcggttggggccccggccagtgcgggaggtcgacctcgagccgggcgagcgggagctctacgaggcgctctgctctcccgactggaccgggcaccgccgcatcgagcaggagcggatcccacttgcggacgctgccgccgtcctacggctcggccgtgcgtag

SEQ ID NO: 48031 - DNA, 1506 bp, Nocardioides sp. Root240; identical to SEQ ID NO: 48027

SEQ ID NO: 48032 - DNA, 702 bp, Nocardioides sp. Root240; identical to SEQ ID NO: 48028

SEQ ID NO: 48033 - DNA, 3450 bp, Nocardioides sp. Root240; identical to SEQ ID NO: 48029

SEQ ID NO: 48034 - DNA, 1086 bp, Nocardioides sp. Root240; identical to SEQ ID NO: 48030

SEQ ID NO: 48035 - DNA, 1413 bp, Mycobacterium sp. Root265
atgcgtgagttactcgatgccaaccgcgaggtgcagggctcgcgcgcggtgcggctgttggccacctcgaacctcgcggtctacgccacgctgatggagcgtcacctgttcgagggactggtcggcgagaccgagctggtggtccggctggaacgcgacctggaggcactccacgagaccggcgaacagtccggcctggcgctgatcaagacctgggccagccagggctggctgcaccgcgtggcctcccaacatcagggaagcgaacgcaatgtctgctacctgacccaggacgcgcgccgggccctggacttcgtgcgcgggatgcgccgcaacgacaccatcgccaccggcggatccatcaacggcatcgcgtcgcggctcaagcaggtcgccatccgcgtcggtgacgacccggaccggatccgggagggcatcgaggccgagatcgcggcgctgcacgccgaactcgacgaactcgacgccgggttgcggcccgagcccgatgtcaccggcatgtacgacgaggcccgcgccatcgcgatgcagatggaacggctgatcaccgatatcggcctgtacggcaccatgatcgagcaggccacctcggcgctggacgacccgatcgacaccaacctcgagtaccgcgaccggcagcgccagatgtacgacgactaccaggcggcctgggattcggcgggccgcgattcgcatcgggcgttcctgcggatgatcaacgaccccgatcagcgggccgagttcgaggccgatatcgccacggtggccgccaccctgcccgaactggacccggcgctgcgcaaggtgatggccggcttcttcgaactggtcggccaccagatcgacgaggtggagcgcatccagcagcgctgcgcccagcgggtcaagcggttcaccgcgttcggcaccctggagcagacccgcggggtggcccgtcagctcaacgaggccatcggtaccgcgcgggccctgctcaaggagtcgttcaccgactcccgcctgcccatcgaggtgccgctggcccggcatgcgatcagttcggtcggggcgctgagcttccggatcaacgacctgtccgcgcccaagcccgccgaggtggcggacggcgtggtcgacctgaccacgttctcctcgctgaccacccaggtcgatgcgcccgctctgtcgaagatgctgaattcgtctctgccggtgtctcttccggacgccctggagatgctcgattccccgtatctgggtcatgtgatcgtgctctggtcgtgggcgctcaagcaaccgtccaccacggacgcagtaccggtcactgtccgattccactcgctggacggccacgaccgcgagatggaggttccgcacctgatgttcaccgaaccggtttccgaggttgcgtcgtga

SEQ ID NO: 48036 - DNA, 660 bp, Mycobacterium sp. Root265
gtgaccgactccgacatcgacttcgcctcgctacccgatgtggaccgcaacgggggtcgcacaccgacgcaacgccgtccacgcttcgacggcgacgtcagcgccatgcccgaccgggcctgctgggcgctgcagcacctgctgacccggcgctacgtcagcagcgaatccgatcccgacatctacagctggatcctggagtaccgcaccgagctgtcggtccggttgtccgagttggaccttcagctccggatcgccgaacaggtcgacatcgcctacatcgagcaggcgcgctatgagccgaccaagggcgccaagctgttgcggcgcgaaccgctgggcacctacgactccatcctggcgctgcacctggcccagatgatgcgcgccggtggcgattccagcttcctcatcacccgcgatgaggtgcacgggctgttcgccggggtgctcaatgacaccgaccgcgacaccgtcaccttcaccgcgcgtgtcgacgccgccatcgcccgactggccgggctggacatcctgcgcaagacccgcgacgacgaggacagttataccgtcagcccggtgatcaccgcgatcatgacggcctcggtcatcaccgaactgcagcagcagttcgagcagctgctgaagggcggttcggaatga

SEQ ID NO: 48037 - DNA, 3339 bp, Mycobacterium sp. Root265
atgagtgagcagttccacctgtcccggctgcaggtcatcaactggggtgtcttcgacggctaccattcggtgccgatcagcgcaggcgggtcgttgatcgccggcgggtcgggcagtggcaaatcctcactgctggatgccatctcgctcggattcctgccgttcaaccggcgcaacttcaacgcctcgggagacaacaccgccgccgggtcaagcgccggccggcgcaccgtcgacaaatacgtgcgcggggcctggggccagcgcagtgacaacggggtcagccaggtcatctatctgcgcggcgagggcaccacctggtcggcggtcgccgtgacctacaccagcaacaccggccgctccatcaccgggttggtgctgaaatggctcaccggcgaatcgcgttcggactcgtcgagcaggttcgtcctcggtgacggcgacctggacatcgaagaggtgtgcaaccgttgggcggccggccgtttcgacagcgcggtcttcaaggacagctggcggttctccaccaaggtggaatcccagtatctggcccagctgtacgcctccatcgggatccgcgcctccgaggccgcccagcagctgctcggaaaggccaagtcgctcaagagcgtcggcggccttgagcagttcgtccgcgatttcatgctcgatgaacccgacagcctggcccggctgcccgaggccctcaagcagatcgacccgctggtggaggcccgcgagctgctggccgtggcccagcgtaaacgcaagatcctcggcgatatcgagaccatccaggtccgctacgcctcggagtcctcggacctcggcatcatcgatctcgtcgacacccagatggtgcgggcctacaccgatcatgtgcgtctgcagcagtgcccggcccaggtcgagaacctggacggcaccatcgatcagctggagaacgaatacgccgacctgaccaggcagctcaatctggccaaggccgaaggtgattcgctcaacgcccagatcagcggcgcgagcaccaatgtcggcccgctgcaatcgcaggtggccgccgccgaggcccaggccgaggagatcacccggcgctacgcggcctacgaggagatggtctccgcgcagggcgtgccggtgcccgagagcgcggacgaattctggaatctgcgtgaggatctcagcaagcaggccgccggccttgcggtgaagctggaacgcggccgggaagcctccaccgatgccgaatacgcccagaaggcggcgcggatgacgcgcgaccacgcggcaaaggaactcaaacgcgtcgaacacgtggggtccgcgctgcccgagttcgcggtcaccatgcgcgaacacatctgcgccgcagtgggtgtcgatccgtcggcgctgccctatgtcgccgagctgatggacctgcgccccgaggagaaccggtggcgtgccgcggtcgagaaggtgctgcgttcggtcgggctgcggctactggtccccgatgagcactacgccaaggtgctgcgcttcgtcaacgagaccaatatgcgtggccggctcgcgctgcaccatgtacggatcaatgcccccgatcgtgagcccgagccgaacacgttggcgggcaagctgttcgtcgtcaacccggaccatccctgcgcggcagaggcactcgatatcctcagcgccgccggcgaccacatctgcgtggacaccccggatctgttcgctcggttccgccgggcggtcaccgatgccgggctgtacaaggactccgaccggctggcgatcaaggacgaccgccgcgcactcaaaccgtcggagtacatctaccagggcgacatcaccgccaagctggacgcgctgaccgccgaattggcagaagccgagcaggctttcgagcaggcgcgccaggccgccgacgatatcgccgccggtcgccagcagtggcgggaccgcgccgcggcctgcaaggcgatctgcgagcagttcccgcagtggagccagatcgacaccgagaccgccgacgggcacgccgaccggctgcgcgagcagtacgacctgctgatggccgacaatcccgatgtggaggcgctcagcgcccgcgccgacgagtgctggatcgacatccagaccctgatgacgcgccgtggcgccatccagacccggcgtgacgacctcgacggacgccgtacccggctgatggatctgcaggaccggctggccccggcggcgatctcggatgccgccaccgagctgctgcgccgctactccgccgaggtccccgtcgcgctggagctgctgaacccggaaccgcaccgcgaggcgctgctggccgcgatccgccgcgagcgtgatcagctcaccgaaagccgcagacgttcccatgaggaactggcccgcatcatcaccaccttcgacacgtcgttccccgatgccattcccaatgactccgaggatttcgacgagcgggtccacgattacgtcgccgtctgccgccacatcgatgaacgcgagctgccggacgcctacgaccggatgatgcggctgatcaccgagcaggcccccgatgcgatcctgaccctgcaccgggtggccgagcaggagacccggcgcatcagtgaccagatcgacagggtcaacaccggactgggctcggtggagttcaaccgcggcacccgactgacgctgcgcgccactccgcgcagcctggtcgccgtcgcagagctcaccgatatcgtcaagtccatctcgcgccgtatcgccgaggtcggcctcggcgacaagaaggcgatcctggatcagtacgccgatatcctgcgcctgcgtaatcggttggccggcaacactcccgaggatcgcgcctggacccgcgacgctctcgacgtgcgcaaccgcttcaccttcgactgcgcggagtgggatgtgcgcagcgaggaactgatccggacgcacagcaacgccggcgacaactccggcggtgagcaggagaagctgatggcgttctgcctcgcgggcgcgctgagcttcaacctggccaatcccgaaagtggagacaacaaaccggttttcgcgcagctcatgctggacgaggcgttctccaaatccgatccgcagttcgcccagcaggccctgcaggcgttccgtaagttcgggttccagctcgtcatcgtcgcaaccgtgcagaacgccaccaccattcagccctatatcgacggggtggtcatggtgtccaagaccgaggcgaccggccgcaatgcccgtcccgtcgcgtcggtcgccaccaagacgatcagcgatttcaccgcgctgcgcaaggaactgaaagtgcccgaacccgtctaa

SEQ ID NO: 48038 - DNA, 1464 bp, Microbacterium sp. Root280D1
gtgactggatccagggctgaggccgcgtatgcgcgtgccgtcaccgcattcagcaccccgacactcgatctgctgcacggtcggttcgccccgttcgtggtcgcgtcgctcactcttctgttcaccgccgaccgggcgtctgtcgcggtcgcggatgcgcacgccgagctgggcgaggtgctcgacgaactccgagcggcggggtacgacgacgacaggcgccttccgtccgggagcggccgggacgtgtgccggaactgggtgcgcctcggctggctgatccagcagatcgacgacgacgtcgaggtctaccgcctgtctgcgcatgccgtcgcagcactcgagatatccggccgcaccggcggagggcgcacgcgcgtgtcgaactcccgcgtgcgcaccctcctcgacgcggtcgaccacctgtcggtgagcgcggaagtcgacccggtccggcggctggcgcggctgtatgacgaacgcgatctgctcgacgcagagatcgctcgcatccaggagaccgggcatgccgaccctgccgacgatgaggagctcctcgaggaggccgagaacgtcctgcacctggcacgcgaactgcccgccgatttcacgcgcgtcgccgagtcgctcaggtcgatgcaacgcgacgtcgtcgcccacctgcgcagggacgagagaccgacgagcgaagtgctccgcgagtatctgcagcgcgcccaggatgtgatgcagtcgacaccggaggggcgcgcgttcgcaggagccctgcgtctgatcggcgaccccgatcgcatcgatgccctcacagagcagcttcgcggactgctcggccggcccttcgcccgtatgctcgacggcgcgcagcgcgccgagctcgacgccatcggtcgacgcgtagagcagggggtggaggaggtgctggccgcgcagcgccgcgcttcgcacgtgatcaccggccaggtgaagacccacgatccgctgcgcgatcgtcagatcgacgacctcctgcgcgacgtcatcgccgggctccatgggtggtccggcccggcgacggtcgtcgacccggtgcgcagcatgccgctgatcgatctcgggcatctgcgtcagaccaccagcgatatccgcccgccgcgtgcaccggcgcccctcgccgacgccgatgacgtcgacttcctcgatcatgacacgcgcgcctggggcggtccgagatatgccgagctcgaggaatacgtcgccggactggggacggacttcgacctcgccgatgccttccggtcggtgcccgacgcggctcggcgccctgtcgatctgctcggtctgctcgagatcgcgcaccggaacggcctcaccgagggagatggtatctcgacggtcgaagcattgcgcccggacggcacgagcaggcgattcgcattcggcgccgtgaccgcccgcagcacgaaagaggattcagatgatgagtga

SEQ ID NO: 48039 - DNA, 660 bp, Microbacterium sp. Root280D1; identical to SEQ ID NO: 47404

SEQ ID NO: 48040 - DNA, 3354 bp, Microbacterium sp. Root280D1
atgacgatgatggacacgctcttcgggatgatccccgcgagctcacgcggtcagcagtgggtcgcggaggagctccagctcatcaactggggcggctacgacggcggtccccaccgagtgcggttctcgcccgatgcgaccctgctgtgcggcggatcggggtcgggcaagtcgacgctcatggacggctacatcgcgctgatgatgccgcacacgacgcccttcaacggcgcgtccaacggcggcgtcacgggccgtccccgcggcgacgagcagcggaacatcctgtcgtacgggcgcggcaagatcgacgagtcccgcaccgaggaggggacgaagctccgcgtgctgcgcggcgacggcgaggacacctggagcgccgtctcgatgacgtggttggatcacgacggctcgcgcttcacggcggtgcgcgggtggtacatccccgcggacgcccgcaccctcgaggacaccacgcgattgcgggccacgatcgacggcgccttcgacctctcgcagctcgaacgcgctgcggtccagcgactcagtgacgcgtcggtgcgcgccgtcgggctggagcccgtggcgaccgaccgcgagttctcggctcgacttcacgccgtgctcggcatcggcgcggccggttcgggggcgaaggcgatcagtcttctggcccgcatccaggccggtcagcagatcacgacggtcgacgacctctacaagaagctcgtgctcgaggagcccgagacgatggcgaccgcggacgcggtggtcgctcatttcgatgagttggagagcacccggacgcggatgctcgtcgccaagcagcaggtggcggctctcgagccgatccgcgagatctcgcagcgcatcgcggcggcgtcggcgcggatgagcgtcgtggacgaggtcggggtcttctcggagccgacctccctcgcgtccctgtggagcgccgagcgccgcctcgatctgctgcgcgaggtggaggcggatctgcgtgaccgcacccaggcgctgcagctggccgtccgcgagaagaacgcactgatcgccgccgccgaggtcgagcgggaggggctgctcgacgtcctgcggcagtccggaggcgaccgcctcgagaccgctcagcgcgagctgcggggtgtcgagcgccgactggaggacgtccagcgcgagcgggcgcgcttcgacagcgtcgccagggagctcggcgccgaggtgcgcaccgcatccgatttcgaggaactgctcgcccgcgtcggccgggagctcccgcagagcggactgcgcggagcccgcgccgccttcgccgatgcagagtcgtcgcgccgagcggtcgagagcgagctgagtcgggcgcgtgccgagcaggaccgcacccgtgagctccgcgggagcattcccgcgcatctgcatgaggcgagaactctcctcgcccaggcggccgggctcaccccgacggatctgcccttcgtcggtgagctcatcgaggtgcgcaccgagttcgagccctggcgggacgcgttcaacctcgccctcggcgggttcgcgcggacattgctcgtcgatgtcgcggacctcgggcggttccgtgcggccatcgagtcggtgcgcatcgctgagcggatcagctacgaaggcgtcccgacgggcgtcgccgagtctcggacggcggacccccgcacgctccccggtcgtctcgatcaccgatcgacgccgttcaccggatggcttcagcagcgactccgtgagcggttcgagtacgtgtgcgtggactcgtcgaccgagctcgccgagcaccctcgcgcgctgacgctcgcggggcaggtgtcgcacggagaccgcgggtcccatggcgggcatggccgggcgaacatgctcggattctcgaacgcgcgccgtcttcgcgagctcgacgagcagatcagccagctcgagagccgccgcgatgctgcgactcaggccgctgcggacgccgaggccgacctcgaccggatcgaggcgacgtccaaggcgcacgcgaagatcgaggacctcacctgggatcagatcgacgtcgaggccgtcacggcggagcgcgcgcgatgggtcgcagtggaggcggaggtcaccgacgagaacccgaagatcgccgagctgaagtcgcaggccgaggagctcagaagacgggtcggccgtctgcgcgacgagagctcccgactcgggggagacctcacactcgctcaggaccgttgggtggaggtcaccgaccaggtcgacgactgtcagcggatcgtcgatgcggctgaggcggccgagatcgcgctggaggagcggcatcgttcgttcctcgacgcgcgcttcctcggagcagacgcggccgtcagcgtgacggcgtcggagcgcctcgctcacctcgacgccgcattgcgcacggccgcgaccagattgctcgaggatcgcacgtcggcagccgcggcacacgccgagcagcgtgagcagatgcgacgcctgatgaccggcttcctcgagcgctgggatacgctcacgatcctccccgaccccgacgagtcggtcgcggagttcgagagcatcctcgtggcgctcgagaccaacggcctgcacgagctggaatccgaatggcgagacagcctcctcaagctctccggaaacgatctgacgagcctggattcgacgctgggtcgtgcactgcgcgagatcaagaaccgcatcgacccgatcaacaggatcatggaggagctgccgttctacgacgatgatcaccgtcttcagatcacaccgcgcgagaaccagtccgaggcgcgcaggcgattccgcaaggagcttcgcgaggtgcgcagtctcatcgacgcagcggagacggatgtcgatcgtgagagcgtctaccggaggatgagccgtctcatcggtcggatgcgacgcacggctcccgacttcgccgagctcatcgacgtgcgcaaccatgtgcgggtgagcgcggagcgggtccatgcgacgacccgggagcatgtcgcgctctacgaccacatcggcgagaaatcgggtggagagtcgcaggagctggtcgccttcatcgtgggcgcggcactgcgctaccagctcggcgacgcgggtgccgagcgtccgaggtatgcacccgtgttcatggacgaggccctgatcaaggcggacgcgcacttcacgaagcgtgcgatcggagcatggcggggtctcggcttccagctcgtgatcggtgcgccgaacgacaagtacagcgccatcgaaccgcatgtcgacgtggagtacgacatcctcaaggacacgcgcggccgctcgtgggcacggccgaaggtcggtctgcccgccgagtga

SEQ ID NO: 48041 - DNA, 1524 bp, Nocardioides sp. Soil796
atgagcgagatcgccggtgagctggcgcgggtcaagggggcgttcagccagcccaccctgaccctgctccaccagcgccaggcgcccgtggtgatcacgatcttccgggccgcgttcggacgcaacaacaagccgatccccaccgcccgcctgcatgcccaggtcgaggagcacctcgcccagatccgcctgaccggcgagtccctggtgcccgaggggagcggacgcgacctctgccagaagtggatgcgcggtcagtggctggtgcgcgcgctcgacgaacgcggtcacgaggtctacacgctcacctcccacgcgcagcaggcactcgagctggtcaagggcctggcccgcgaccgggccacgctgagcgagcaccgcatcgccaccatcctcggcacggtccggcggttcaacgccgaggccaaccccgatcgcaccgcgcgggtctccctgctcaacgaggagatcgccaggctcagcgccgagcgcgaccggctcgtcgacggcgcggagatggtcagcgccaccgaggactacatgctcgaggggttcaccgagctccagtcgttgatctccgcgctgccgagcgacttcgcccgggtcgaggagcggttcgccggcatccgtgccgagatcctggccgccttccgcgccgaggaccgtccacccggcgacgtgatcgacgactacctggcccgcgccgacgcactgatgactgcaacccacgagggccgggccttcgagggcgccttcgggctgctccgcgacgacgccctggtcgcccagctccgcgaagacctcaccgcgctgctcgagcacccgatctccgaccggatcctcgccgagtccgaccgggccgagctgcgcggcaccgtcaagctggttcgcgacgggctcgaccgggtgctcacccagcggtcgagggtgaccgcgacgctcaaggaatacatcgtctcccacgacgccgcccgtgaccgcgagctcgagcagacgctgcgccaggtggagtccgagctgatgacctggatggccaccaccggcccgcgggccacccacgacgtgccactgctgccgttgcgcgccggcatcgaccacctgcgcgagcgcttccacgacccggccgacgaccggctgcccgacccgatcgagccggtcgaccccgacgacgcgaggtcgccgtcgctggccgagctgatggcccagggcgggccgcagctgccgtcgctgcggcagcgcctcgacgacgcactctccgacctgctgcccgcagccactctcggcgaggtcttcgaccggctcgagccctcgttgcgccgaccggtggagatctacggactgctccacctggccgccgaccgcggctggaccaccgacgacgtcgtcgagacctgggccacggtccgccacgacgggtcgcgacgaaccttcgccgtgccgcggatgccgctgcccgaccccgacctcgacgcacaccgcacccagcagagccgcacccagcagaacagtgagacccccgcatga

SEQ ID NO: 48042 - DNA, 789 bp, Nocardioides sp. Soil796
atgaccaccgacgtcgaccttaaccggccggagccggaagacgcgctcgaaccggacgacgccctcgagcacgacccggcgtacgacgactcggtctcgctcttcgagggcgacgaaggcggtctcgagcactcccaacgccaggccctcgtcgtgctgctcaagcagcggttcatcagcgctcgcacccacccacgtgactggcaggtgctggtcgagcacgagcgggtgctccgctcacgcctcaacgacgtgttcctcgacctgatggtcgaccgcgagcgcgaggtcgcctggaagcgccaggccgtccccgagaccggcggccggttcccgaccctgctccacgacaccggctggtcgcgcgaggagacgctggtgctggtgcacgtgcgcgaccggctgcgcgccgggctggccagtggcgacacccgggtcttcgtcgaccgcgacgacatcctcgactacgtggccagcttccgacccgcgcacgccacggacgagtcgggcgacaccaagcgcgcccagaacgccgtccagagcgtcgtgaagtccggtctcctgatcggtgccaccggtgacgaacggttcgagatcagcgaggcggtggagccgctgctcccgcttgagctgctccaggagctcctgtccgcgctccgctccgccaacgacaccaccccagaacccgaggagcccgccgacctcttcgacgaggacggtgctgacacagacggtgccggcaaggaccgtgccgacaaggacggggccgacgaggagcgcgacgcatga

SEQ ID NO: 48043 - DNA, 3468 bp, Nocardioides sp. Soil796
atgaacgagcacgagctcggcggcgacgaggtcgacgaggcctccgacgggctcttcgcccgacaggtggtcgacaccccggccgacgacaccgtccagtggcgggcggcccttctccagctggtcaactggggaggcttcggcggcctgacgacggtgccgctgcgcggtgacaccacgatgatctccggggcctccggcgtcgggaagagcacgatcctcgacgcctacaccgcgttgatgatgccctccgacaccaagttcaacggcgcctccaacgacgcggtcagcgggcgcgcccgcggtgtcggccagcgcaacctgctctcctaccttcgtggcgccgtcgacgtgatcgacgaccccaggaccggccgaccggtcgagaagctgctgcgcggcaagggcgccgacacctggggtgcggtcgcgatgacgttcgtcaacgaccagggcggccggttcaccgcgctgcgcacctactacgtgccgcgtcgcgccactaggtcgagcgacgtgcagatgcagctggccacccacgagggggcgctcaccctcgacaccctcgaggtcgccgtccccgagcgcttccacgccaacaccttgaagaagctcctccccggcattcgcgtgcaccgcacctacgccgagttctccgccgtcctgcacgcccgcctcggcatcggtgcgaacggcgatggtgccaaggcgctgcgcctgctctcacgcatccaggccggcaaccaggtgcgcagcgtcgacgagctctacaaggagatggtgctcgagcgccccgcgacgtacgccgccgccgaccgcgccatcgagcacttcgacgacctcgacgcggcgtactccgcgatgcgcaccgaggaggagaagctcgacctcctcggcccgatcaccgaactgcacgggcgcaaggtcgcggccacccggcgccagtcccagctcgactcctacggcgtcaccctcggcggcgacaccccgctgcgactgtggctcctgcgcactcaccatcgcctgctcgaggcggcggtcgccgccaaccgcgacgcgcgtacgacgaacgcggacgacctgtcccagacgtcgtcgtccgaggccgccctggtcgccgacctcgagaacgccaaggactcccaccgcgccgccggtggaaccacgctccagaacctcgccctgtcgatcgagcaggagcaggtggtccgcgacgaccgcgccggccggcgcgccgtgttgcaggagcgcctgctgccgctggtcgacgtggccgacccgcacgcagtcagcgtcgagaccgcgctcgagtccgatgccggcttcggcgccctgcagcagcaggcccgtgagtggctggccggctggcaggaccaggcggccagcctcaagcgtgagcgtgacatcgcccgcgacggactcttcccggtcaagcagcggcaggccgagctgcgcgaggagcgtgcctcgctgcagagtcgggccggccgcatgccgtcccgcatgcatgagatgcgtgaagaggtggccctggccagcgggctcggcatcgacgagctcccgttcgtggccgagctggtcgacgtcgcccccgacgagtcgcggtggcgcaccgcggtcgagaccgtcctcggcggcaccgcccgcctcatgctggtgccgatcgaccggctcaaggacttctcctcggccatcgacgggctccggctgcgtggccggctgaccttcgagggcgtcgagctcgacctgcccgacaccggtccggccgaccccgagcgcatcgccggcaagctgctcttcaaggactcgccgttctccggctgggtgcaggcccacctcggtgagccgtcgcgcaacgccctgtgcgtcgagaccgccgacggcctcgccggtggcggcttccgggtgactctcgccggccagacccgcaacggtcgtcgcggtgcccacggacgcgccgacacccgcaacatcatcggtttctccaacgaggacgcgctctccgagatcgactccgagctcgccgccctcgaggagaagctgcaggccttcgacgccgacgtggccgagctcgaccgccagggccgcgtgctggagcaggtccgcacggcctacgacacgatccgtgcggcgcgcttcgacgacatcgacgtcgcgggcagcgacgagcgcattgccgagctcggtcatcggcgagccgagatcctgcgcgccgacgacaagctgcacgtgctccagggccagatcgacgacctgtccgaccgactggagcaggcccgcaagaagcggttcgtgctcgaggagcgccacaagcgcctggccgcggagcatgccgagctggtcgactccgaagacctggtcaacgaccgcctcgaggtgatggaccgcaacggcacggtgacgctcaccgaggagcaggacgcggcgttggccgccgacttcgccgcggccgcgacgcccgacgaccccgacgacctcgaccgcttcccggtcacgtcgcagcggttggccgagcgactgcgcgacgcggtgggggagaccgagaccgagatcaaccgggtcgacgacgagctcggtgcgatcttccggatgtacaagctcaagtgggagtcgccgaacctcgccgcgacccccgactcgtacgccgactacgcccgcatcctcgacgacatccgcggcaccggcctggcccaacggcgcaccgagtggcgccgccgcctcaccgagtggagtggccaggacctcgtgccgctcgtgggcgcgatggccgcctccatcgaggagatcgaggaccggctcgagccgatcaacgcgatcctgcggcggctggagttcggggcgtccggcgacagactgcgcatccgactgcggcggctctcacccgcccacgtgcaggtcttcatgaaggacctccgcatgctctcctccggtgtgacggccgagccggacgaggccgacctcgagaagcggttcctcgacctgagccggttcatgcgccagctgcgcaggccggtcccgggtggcgatccggtcaccgaccgcgaccgcctcctcgacgtacgccggcacgtggagatcagcgccgagcgctatgaccaccacaccggcgagctgcgggcgacgtaccgcacgctgggggagaagagcggcggcgagagccaggagctggtcgcgttcatcgtcggctcggcgctgcggttccggctcggcgacgagatgcgctcgcggccccggttcgcgccggtcttcctcgacgagggcttcgtgaaggccgactccgagttcgccggccgcgccgtccaggcgtggaagggtctcggcttccagctgatcatcggtgtgcccctcgacaaggtcaccggtctcgaaccgcacatggacgagctgctggcgatcaccaagagcaccacgacctaccagtcgtggatcactccgatcaccgacgcggagcagactcccgctggttga

SEQ ID NO: 48044 - DNA, 1503 bp, Nocardioides sp. Soil797
atgagcgatatcgaggcggagctgcaccgcgtccggggcgcgttcgcaaccccgacgctcaccctgctccaccagcgccaggcgcccgtggtgatcacactgttcaggtcggcgttcggccggagcaacacgcccatccccacggcccggctgcacacccaggtcgcgacctacctggatcggctgcgtgctgcgggggaggacgacctccccaacggctcgggcaaggagctgtgccaccggtggatgcgtgggcagtggctggtgcgctcgatcgacgaacgcggacgcgaggtctacacgctgacctcccacgcccagcaggccctcgagctggtcaagaacctgacccgtgaccgggccacgctcagcgagcaccgcatcgccaccatcctcggcacggtccgccggttcaacgcggaggcgaaccccgaccgcaccacccgcgtcacgttgctcaacgaggagatcgcccggctccaggccgagagggaccgactcgtcgacggcgcggagatggtcagcgccaccgaggactacatgcacgagggctacaccgagctcctctcgctgatctccgcgttgccgagtgacttcgcccgggtggaggagcggttcgcgaggatccgcggcgagatcctggccgccttccgcgccgaggaccggccggccggtgaagtgatcgacgactacctcgagcgcgccgacctgctgatgacgcgcacccacgaggggcgcgcgttcgagggtgcgttcgcgctcctccgcgacgacgcgctcgtcacccagctccgcgaggacttgaccgcgctgctcgatcatccgctgtccgaccgcatcctcggcgaggcggaccgtgcggagctgcgcggcacggtgcgcctagtccgtgacggactcgaccgggtcctcaagcaacgctctcgggtgaccgcgacgctgaaggaatacatcgtctcccacgacggcgcgcgggatcggcagctggagcagaccctgcgccaggtggagtccgagctgatgacctggatggcgaacaccggaccccgggcgacccacgacgtcgccctgttgccctcccgggtcacggtcgaccacctgcgcgagaagttccacgaccccgctgacgacgtactgcctgagcgcatcgcgccgccctcgcccgccgacgccccgtcgctgaccctggcggagctcaaggcccagggcgggccgcgcctcggtgagttgcggcaacgcctcgacgaagcgctcaacgaccggctcccggcagactcgttgggtgcgctcttcgacagcctcgagcccgagctgcggcgaccggtggagatcttcgggctgctccaccttgccgcagaccggggctgggagggaaccgaggacctcgaggagtacgccgcacagcgtcacgacggctctcgacggagcttcgcggtgccacggcttcccctgcccgccgtccatgaacgagccgacgaacagaagagtgagcaccccgcatga

SEQ ID NO: 48045 - DNA, 729 bp, Nocardioides sp. Soil797
atgagcgacgtcgttgacgagatcccgacggacctgccggacgaccactcggctgagcccactggtctcgaggaggaggtcgaggacacctccgtctcgctcttcgagggcgacgaaggcggtctcgagctggcccagcggcaggccctggtggccctgctcaagcaacgcttcatcagtgcccgcacgcatccgcgcgactggcaggtgctcatcgaccacgagcgagccctcaggtcgcgactcaacgacctgttcctcgacctgcaggtcgaccgtgcccgcgaggtcgcctggaagcgacaggcggtctccgagaccggtagccgctttcccaccctcctgtacgacgcaccgtggtcacgcgaggagaccatcgtgctggtgcacctgcgcgatcggctgcgggccggggtcgccggtggtgaactgcgggtgttcgtcgaccgcgaggacgtcgtcaaccacgtggccagcttccggccgccgcacgccaccgacgaggccggcgacgaacgccgcgctcgcaacgcggtgaccagcgtcgcgaagtcggggctgctgatcgcgacggcctcggaggatcgctacgagatcagcgaagcggtcgagccactgctgccgctggagctgttggccgagctgttggaggcgctgcagaaggccaacggctccgccgaggccgcggaccatggcgacgacgagttgttcgaggaggacgcggaatga
